United States Patent Application Publication US 2024/0327476 A1 - sequence listing, part 88

SEQ ID NO: 169002 - DNA, 2346 bp, synthetic construct
  misc_feature 1..2346: note = Description of Artificial Sequence: Synthetic coding sequence
  source 1..2346: mol_type = other DNA
atggtgcgggtgctgcgctccatgtgcctgccccagctgtgcagccacatcctgtctgtgtgcagcggcaccaccagtgacagaaatgtgtacagcgtgcccggcagccagtacctgtacaaccagcccagctgctaccggggcttccagacagtgaagcacagaaatgaaaacacctgccccctgccccaggagatgaaggccctcttcaagaagaagacctatgatgagaagaagacctatgaccagcagaagtttgacagcgagcgggcagatggcaccatcagcagcgagatcaagagcgcccggggcagccaccacctgagcatctatgcagagaacagcctgaagagtgatggctaccacaagaggacagacaggaagagccgcatcatcgccaagaatgtgtccaccagcaagccagagtttgagttcaccaccctggacttccctgagctgcagggcgctgagaacaacatgtctgagatccagaagcagcccaagtggggccctgtgcacagcgtgtccacagacatcagcctgctgcgggaggtggtgaagccagctgctgtgctgagcaagggggagatcgtggtgaagaacaaccccaatgaatctgtgacagccaatgctgccaccaacagccccagctgcacccgggagctgtcctggacccccatgggctacgtggtgcggcagaccctgagcacagagctgtctgctgcccccaagaatgtgacctccatgatcaacctgaagaccatcgccagcagcgctgaccccaagaatgtgtccatccccagcagcgaggccctgagcagtgaccccagctacaacaaggagaagcacatcatccaccccacccagaagagcaaggccagccagggcagtgacctggagcagaatgaggccagcaggaagaacaagaagaagaaggagaagagcaccagcaaatatgaggtgctgactgtgcaggagcccccaagaattgaagatgctgaggagttccccaacctggccgtggccagcgagcggcgggacagaattgagacccccaagttccagagcaagcagcagccccaggacaacttcaagaacaacgtgaagaagagccagctgcctgtgcagctggacctgggcggcatgctgacagccctggagaagaagcagcacagccagcacgccaagcagagcagcaagcctgtggtggtgtctgtgggcgctgtgcctgtgctgagcaaagaatgtgccagcggggagcggggccgcaggatgagccagatgaagaccccccacaaccccctggacagcagcgcccccctgatgaagaagggcaagcagcgggagatccccaaggccaagaagcccaccagcctgaagaagatcatcctgaaggagcggcaggagaggaagcagaggctgcaggagaatgctgtgtccccagccttcaccagtgatgacacccaggatggagagagcggaggagatgaccagtttcctgagcaggccgagctgagcggccctgagggcatggatgagctgatcagcaccccatctgtggaggacaagtctgaggagcccccaggcacagagctgcagagggacacagaggccagccacctggcccccaaccacaccaccttccccaagatccacagccgccgcttccgggactactgcagccagatgctgagcaaggaggtggatgcctgtgtgacagacctgctgaaggagctggtgcgcttccaggacaggatgtaccagaaggaccctgtgaaggccaagaccaagaggcggctggtgctgggcctgcgggaggtgctgaagcacctgaagctgaagaagctgaagtgtgtgatcatcagccccaactgtgagaagatccagagcaaaggaggcctggatgacaccctgcacaccatcatcgactatgcctgtgagcagaacatcccctttgtgtttgccctgaacaggaaggccctgggccgcagcctgaacaaggctgtgcctgtgtctgtggtgggcatcttctcctatgatggagcccaggaccagttccacaagatggtggagctgactgtggccgcccggcaggcctacaagaccatgctggagaatgtgcagcaggagctggtgggggagccccggccccaggccccacccagcctgcccacccagggccccagctgcccagcagaagatggccccccagccctgaaggagaaggaggagccccactacatcgagatctggaagaagcacctggaggcctacagcggctgcaccctggagctggaggagagcctggaggccagcaccagccagatgatgaacctgaacctgtag

SEQ ID NO: 169003 - DNA, 2565 bp, synthetic construct
  misc_feature 1..2565: note = Description of Artificial Sequence: Synthetic coding sequence
  source 1..2565: mol_type = other DNA
atggccagcgagggcccccgggagcctgagagcgagggcatcaagctgtctgcagatgtgaagccctttgtgcccaggtttgctggcctgaatgtggcctggctggagagcagcgaggcctgtgtgttccccagcagcgctgccacctactacccctttgtgcaggagccccctgtgacagagcagaagatctacacagaggacatggcctttggagccagcaccttccccccccagtacctgagcagcgagatcaccctgcacccctatgcctacagcccctacaccctggacagcacccagaatgtgtacagcgtgcccggcagccagtacctgtacaaccagcccagctgctaccggggcttccagacagtgaagcacagaaatgaaaacacctgccccctgccccaggagatgaaggccctcttcaagaagaagacctatgatgagaagaagacctatgaccagcagaagtttgattctgagcgggcagatggcaccatcagcagcgagatcaagagcgcccggggcagccaccacctgagcatctatgcagagaacagcctgaagagtgatggctaccacaagaggacagacaggaagagccgcatcatcgccaagaatgtgtccaccagcaagccagagtttgagttcaccaccctggacttccctgagctgcagggcgctgagaacaacatgtctgagatccagaagcagcccaagtggggccctgtgcacagcgtgtccacagacatcagcctgctgcgggaggtggtgaagccagctgctgtgctgagcaaaggagagatcgtggtgaagaacaaccccaatgaatctgtgacagccaatgctgccaccaacagccccagctgcacccgggagctgtcctggacccccatgggctacgtggtgcggcagaccctgagcacagagctgtctgctgcccccaagaatgtgacctccatgatcaacctgaagaccatcgccagcagcgctgaccccaagaatgtgtccatccccagcagcgaggccctgagcagtgaccccagctacaacaaggagaagcacatcatccaccccacccagaagagcaaggccagccagggcagtgacctggagcagaatgaggccagcaggaagaacaagaagaagaaggagaagagcaccagcaaatatgaggtgctgactgtgcaggagcccccaagaattgaagatgctgaggagttccccaacctggccgtggccagcgagcggcgggaccgcatcgagacccccaagttccagagcaagcagcagccccaggacaacttcaagaacaacgtgaagaagagccagctgcctgtgcagctggacctgggcggcatgctgacagccctggagaagaagcagcacagccagcacgccaagcagagcagcaagcctgtggtggtgtctgtgggcgctgtgcctgtgctgagcaaagaatgtgccagcggggagcggggccgcaggatgagccagatgaagaccccccacaaccccctggacagcagcgcccccctgatgaagaagggcaagcagcgggagatccccaaggccaagaagcccaccagcctgaagaagatcatcctgaaggagcggcaggagaggaagcagaggctgcaggagaatgctgtgtccccagccttcaccagtgatgacacccaggatggagagagcggaggagatgaccagtttcctgagcaggccgagctgagcggccctgagggcatggatgagctgatcagcacccccagcgtggaggacaagtctgaggagcccccaggcacagagctgcagagggacacagaggccagccacctggcccccaaccacaccaccttccccaagatccacagccgccgcttccgggactactgcagccagatgctgagcaaggaggtggatgcctgtgtgacagacctgctgaaggagctggtgcgcttccaggacaggatgtaccagaaggaccctgtgaaggccaagaccaagaggcggctggtgctgggcctgcgggaggtgctgaagcacctgaagctgaagaagctgaagtgtgtgatcatcagccccaactgtgagaagatccagagcaagggcggcctggatgacaccctgcacaccatcattgattatgcctgtgagcagaacatcccctttgtgtttgccctgaacaggaaggccctgggccgcagcctgaacaaggctgtgcctgtgtctgtggtgggcatcttctcctatgatggagcccaggaccagttccacaagatggtggagctgactgtggccgcccggcaggcctacaagaccatgctggagaatgtgcagcaggagctggtgggggagccccggccccaggccccacccagcctgcccacccagggccccagctgcccagcagaagatggccccccagccctgaaggagaaggaggagccccactacatcgagatctggaagaagcacctggaggcctacagcggctgcaccctggagctggaggagagcctggaggccagcaccagccagatgatgaacctgaacctgtag

SEQ ID NO: 169004 - DNA, 2583 bp, synthetic construct
  misc_feature 1..2583: note = Description of Artificial Sequence: Synthetic coding sequence
  source 1..2583: mol_type = other DNA
ccagccagccggcggcctgctgctggcctgagagatgctgccagcagcgccccccggggcatggccagcgagggcccccgggagcctgagagcgagggcatcaagctgtctgcagatgtgaagccctttgtgcccaggtttgctggcctgaatgtggcctggctggagagcagcgaggcctgtgtgttccccagcagcgctgccacctactacccctttgtgcaggagccccctgtgacagagcagaagatctacacagaggacatggcctttggagccagcaccttccccccccagtacctgagcagcgagatcaccctgcacccctatgcctacagcccctacaccctggacagcacccagaatgtgtacagcgtgcccggcagccagtacctgtacaaccagcccagctgctaccggggcttccagacagtgaagcacagaaatgaaaacacctgccccctgccccaggagatgaaggccctcttcaagaagaagacctatgatgagaagaagacctatgaccagcagaagtttgattctgagcgggcagatggcaccatcagcagcgagatcaagagcgcccggggcagccaccacctgagcatctatgcagagaacagcctgaagagtgatggctaccacaagaggacagacaggaagagccgcatcatcgccaagaatgtgtccaccagcaagccagagtttgagttcaccaccctggacttccctgagctgcagggcgctgagaacaacatgtctgagatccagaagcagcccaagtggggccctgtgcacagcgtgtccacagacatcagcctgctgcgggaggtggtgaagccagctgctgtgctgagcaaaggagagatcgtggtgaagaacaaccccaatgaatctgtgctgatgcccctgcccatcctgctgcacgtgcaggagaccctgagcacagagctgtctgctgcccccaagaatgtgacctccatgatcaacctgaagaccatcgccagcagcgctgaccccaagaatgtgtccatccccagcagcgaggccctgagcagtgaccccagctacaacaaggagaagcacatcatccaccccacccagaagagcaaggccagccagggcagtgacctggagcagaatgaggccagcaggaagaacaagaagaagaaggagaagagcaccagcaaatatgaggtgctgactgtgcaggagcccccaagaattgaagatgctgaggagttccccaacctggccgtggccagcgagcggcgggaccgcatcgagacccccaagttccagagcaagcagcagccccaggacaacttcaagaacaacgtgaagaagagccagctgcctgtgcagctggacctgggcggcatgctgacagccctggagaagaagcagcacagccagcacgccaagcagagcagcaagcctgtggtggtgtctgtgggcgctgtgcctgtgctgagcaaagaatgtgccagcggggagcggggccgcaggatgagccagatgaagaccccccacaaccccctggacagcagcgcccccctgatgaagaagggcaagcagcgggagatccccaaggccaagaagcccaccagcctgaagaagatcatcctgaaggagcggcaggagaggaagcagaggctgcaggagaatgctgtgtccccagccttcaccagtgatgacacccaggatggagagagcggaggagatgaccagtttcctgagcaggccgagctgagcggccctgagggcatggatgagctgatcagcacccccagcgtggaggacaagtctgaggagcccccaggcacagagctgcagagggacacagaggccagccacctggcccccaaccacaccaccttccccaagatccacagccgccgcttccgggactactgcagccagatgctgagcaaggaggtggatgcctgtgtgacagacctgctgaaggagctggtgcgcttccaggacaggatgtaccagaaggaccctgtgaaggccaagaccaagaggcggctggtgctgggcctgcgggaggtgctgaagcacctgaagctgaagaagctgaagtgtgtgatcatcagccccaactgtgagaagatccagagcaagggcggcctggatgacaccctgcacaccatcattgattatgcctgtgagcagaacatcccctttgtgtttgccctgaacaggaaggccctgggccgcagcctgaacaaggctgtgcctgtgtctgtggtgggcatcttctcctatgatggagcccaggaccagttccacaagatggtggagctgactgtggccgcccggcaggcctacaagaccatgctggagaatgtgcagcaggagctggtgggggagccccggccccaggccccacccagcctgcccacccagggccccagctgcccagcagaagatggccccccagccctgaaggagaaggaggagccccactacatcgagatctggaagaagcacctggaggcctacagcggctgcaccctggagctggaggagagcctggaggccagcaccagccagatgatgaacctgaacctgtag

SEQ ID NO: 169005 - DNA, 828 bp, synthetic construct
  misc_feature 1..828: note = Description of Artificial Sequence: Synthetic coding sequence
  source 1..828: mol_type = other DNA
ggcaccatcagcagcgagatcaagagcgcccggggcagccaccacctgagcatctatgcagagaacagcctgaagagtgatggctaccacaagaggacagacaggaagagccgcatcatcgccaagaatgtgtccaccagcaagccagagtttgagttcaccaccctggacttccctgagctgcagggcgctgagaacaacatgtctgagatccagaagcagcccaagtggggccctgtgcacagcgtgtccacagacatcagcctgctgcgggaggtggtgaagccagctgctgtgctgagcaagggggagatcgtggtgaagaacaaccccaatgaatctgtgacagccaatgctgccaccaacagccccagctgcaccagggctgaccccaagaatgtgtccatccccagcagcgaggccctgagcagtgaccccagctacaacaaggagaagcacatcatccaccccacccagaagagcaaggccagccagggcagtgacctggagcagaatgaggccagcaggaagaacaagaagaagaaggagaagagcaccagcaaatatgaggtgctgactgtgcaggagcccccaagaattgaagatgctgaggagttccccaacctggccgtggccagcgagcggcgggacagaattgagacccccaagttccagagcaagcagcagccccaggacaacttcaagaacaacgtgaagaagagccagctgcctgtgcagctggacctgggcggcatgctgacagccctggagaagaagcagcacagccagcacgccaagcagagcagcaagcctgtggtggtgtcctag

SEQ ID NO: 169006 - DNA, 183 bp, synthetic construct
  misc_feature 1..183: note = Description of Artificial Sequence: Synthetic coding sequence
  source 1..183: mol_type = other DNA
atgcccctgcccatcctgctgcacgtgcaggagcagatcctgaagatgctggtgtaccacctgctgaagctgtacctgcgcatcctgcccaccaccaagaagaacaccctcttcatcctgcccaagagcctgaagcaccacaaggtggtgaccctgaacaagatgaagccccaggagaggtag

SEQ ID NO: 169007 - DNA, 2361 bp, synthetic construct
  misc_feature 1..2361: note = Description of Artificial Sequence: Synthetic coding sequence
  source 1..2361: mol_type = other DNA
atggcctttggagccagcaccttccccccccagtacctgagcagcgagatcaccctgcacccctatgcctacagcccctacaccctggacagcacccagaatgtgtacagcgtgcccggcagccagtacctgtacaaccagcccagctgctaccggggcttccagacagtgaagcacagaaatgaaaacacctgccccctgccccaggagatgaaggccctcttcaagaagaagacctatgatgagaagaagacctatgaccagcagaagtttgattctgagcgggcagatggcaccatcagcagcgagatcaagagcgcccggggcagccaccacctgagcatctatgcagagaacagcctgaagagtgatggctaccacaagaggacagacaggaagagccgcatcatcgccaagaatgtgtccaccagcaagccagagtttgagttcaccaccctggacttccctgagctgcagggcgctgagaacaacatgtctgagatccagaagcagcccaagtggggccctgtgcacagcgtgtccacagacatcagcctgctgcgggaggtggtgaagccagctgctgtgctgagcaaaggagagatcgtggtgaagaacaaccccaatgaatctgtgacagccaatgctgccaccaacagccccagctgcacccgggagctgtcctggacccccatgggctacgtggtgcggcagaccctgagcacagagctgtctgctgcccccaagaatgtgacctccatgatcaacctgaagaccatcgccagcagcgctgaccccaagaatgtgtccatccccagcagcgaggccctgagcagtgaccccagctacaacaaggagaagcacatcatccaccccacccagaagagcaaggccagccagggcagtgacctggagcagaatgaggccagcaggaagaacaagaagaagaaggagaagagcaccagcaaatatgaggtgctgactgtgcaggagcccccaagaattgaagatgctgaggagttccccaacctggccgtggccagcgagcggcgggaccgcatcgagacccccaagttccagagcaagcagcagccccaggacaacttcaagaacaacgtgaagaagagccagctgcctgtgcagctggacctgggcggcatgctgacagccctggagaagaagcagcacagccagcacgccaagcagagcagcaagcctgtggtggtgtctgtgggcgctgtgcctgtgctgagcaaagaatgtgccagcggggagcggggccgcaggatgagccagatgaagaccccccacaaccccctggacagcagcgcccccctgatgaagaagggcaagcagcgggagatccccaaggccaagaagcccaccagcctgaagaagatcatcctgaaggagcggcaggagaggaagcagaggctgcaggagaatgctgtgtccccagccttcaccagtgatgacacccaggatggagagagcggaggagatgaccagtttcctgagcaggccgagctgagcggccctgagggcatggatgagctgatcagcacccccagcgtggaggacaagtctgaggagcccccaggcacagagctgcagagggacacagaggccagccacctggcccccaaccacaccaccttccccaagatccacagccgccgcttccgggactactgcagccagatgctgagcaaggaggtggatgcctgtgtgacagacctgctgaaggagctggtgcgcttccaggacaggatgtaccagaaggaccctgtgaaggccaagaccaagaggcggctggtgctgggcctgcgggaggtgctgaagcacctgaagctgaagaagctgaagtgtgtgatcatcagccccaactgtgagaagatccagagcaagggcggcctggatgacaccctgcacaccatcattgattatgcctgtgagcagaacatcccctttgtgtttgccctgaacaggaaggccctgggccgcagcctgaacaaggctgtgcctgtgtctgtggtgggcatcttctcctatgatggagcccaggaccagttccacaagatggtggagctgactgtggccgcccggcaggcctacaagaccatgctggagaatgtgcagcaggagctggtgggggagccccggccccaggccccacccagcctgcccacccagggccccagctgcccagcagaagatggccccccagccctgaaggagaaggaggagccccactacatcgagatctggaagaagcacctggaggcctacagcggctgcaccctggagctggaggagagcctggaggccagcaccagccagatgatgaacctgaacctgtag

SEQ ID NO: 169008 - DNA, 747 bp, synthetic construct
  misc_feature 1..747: note = Description of Artificial Sequence: Synthetic coding sequence
  source 1..747: mol_type = other DNA
atgcagacctgccccctggccttccctggccacgtgtcccaggccctgggcaccctgctcttcctggccgccagcctgagcgcccagaatgaaggctgggacagccccatctgcacagaaggagtggtgtctgtgtcctggggagaaaatacagtgatgagctgcaacatcagcaatgccttcagccacgtgaacatcaagctgcgggcccacggccaggagagcgccatcttcaatgaggtggcccctggctacttcagcagagatggctggcagctgcaggtgcagggcggcgtggcccagctggtgatcaagggggcccgggacagccacgccggcctgtacatgtggcacctggtgggccaccagaggaacaaccggcaggtgaccctggaggtgtctggagctgagccccagagcgccccagacaccggcttctggcctgtgcctgctgtggtgacagctgtgttcatcctgctggtggccctggtgatgtttgcctggtaccgctgccgctgcagccagcagaggcgggagaagaagttcttcctgctggagccccagatgaaggtggccgccctgcgggccggggcccagcagggcctgagccgggccagcgctgagctgtggaccccagacagcgagcccaccccccggcccctggccctggtgttcaagcccagccccctgggcgccctggagctgctgagcccccagcccctcttcccctatgctgctgacccctag

SEQ ID NO: 169009 - DNA, 888 bp, synthetic construct
  misc_feature 1..888: note = Description of Artificial Sequence: Synthetic coding sequence
  source 1..888: mol_type = other DNA
atgctgcagggccctggcagcctgctgctgctcttcctggccagccactgctgcctgggcagcgcccggggcctcttcctgtttggccagcctgacttctcctacaagaggagcaactgcaagcccatcccagccaacctgcagctgtgccacggcatcgagtaccagaacatgaggctgcccaacctgctgggccacgagaccatgaaggaggtgctggagcaggccggggcctggatccccctggtgatgaagcagtgccacccagacaccaagaagttcctgtgcagcctgtttgcccctgtgtgcctggatgacctggatgagaccatccagccctgccacagcctgtgtgtgcaggtgaaggacagatgtgcccctgtgatgtctgccttcggcttcccctggccagacatgctggagtgtgaccgcttcccccaggacaatgacctgtgcatccccctggccagcagtgaccacctgctgcctgccacagaggaggcccccaaggtgtgtgaggcctgcaagaacaagaatgatgatgacaatgacatcatggagaccctgtgcaagaatgactttgccctgaagatcaaggtgaaggagatcacctacatcaacagagacaccaagatcatcctggagaccaagagcaagaccatctacaagctgaatggagtgtctgagcgggacctgaagaagtctgtgctgtggctgaaggacagcctgcagtgcacctgtgaggagatgaatgacatcaatgccccctacctggtgatgggccagaagcagggcggggagctggtgatcacctctgtgaagcgctggcagaagggccagcgggagttcaagaggatcagccgcagcatcaggaagctgcagtgctag

SEQ ID NO: 169010 - DNA, 312 bp, synthetic construct
  misc_feature 1..312: note = Description of Artificial Sequence: Synthetic coding sequence
  source 1..312: mol_type = other DNA
atggccagccgctgggccgtgcagctgctgctggtggccgcctggagcatgggctgtggggaggccctgaagtgctacacctgcaaggagcccatgaccagcgccagctgcaggaccatcacccgctgcaagccagaggacacagcctgcatgaccaccctggtgacagtggaggccgagtaccccttcaaccagagccctgtggtgaccaggagctgcagcagcagctgtgtggccacagatcctgacagcattggagctgcccacctgatcttctgctgcttccgggacctgtgcaacagcgagctgtag

SEQ ID NO: 169011 - DNA, 636 bp, synthetic construct
  misc_feature 1..636: note = Description of Artificial Sequence: Synthetic coding sequence
  source 1..636: mol_type = other DNA
atgatcagcaggatggagaagatgaccatgatgatgaagatcctgatcatgtttgccctgggcatgaactactggagctgcagcggcttccctgtgtatgactatgaccccagcagcctgagagatgccctgagcgcctctgtggtgaaggtgaacagccagagcctgagcccctacctgttccgggccttccgcagcagcctgaagagggtggaggtgctggatgagaacaacctggtgatgaacctggagttcagcatccgggagaccacctgcaggaaggacagcggggaggaccctgccacctgtgccttccagagggactactacgtgtccacagctgtgtgccgcagcacagtgaaggtgtctgcccagcaggtgcagggcgtgcacgcccgctgctcctggagcagcagcaccagcgagagctacagcagcgaggagatgatctttggagacatgctgggcagccacaagtggaggaacaactacctgtttggcctcatcagtgatgagagcatcagcgagcagttctatgacaggagcctgggcatcatgagaagagtgctgcccccaggcaacagacgctaccccaaccaccgccaccgggcccgcatcaacacagactttgaatag

SEQ ID NO: 169012 - DNA, 636 bp, synthetic construct; identical to SEQ ID NO: 169011
  misc_feature 1..636: note = Description of Artificial Sequence: Synthetic coding sequence
  source 1..636: mol_type = other DNA

SEQ ID NO: 169013 - DNA, 366 bp, synthetic construct
  misc_feature 1..366: note = Description of Artificial Sequence: Synthetic coding sequence
  source 1..366: mol_type = other DNA
atggccccccggcccctgctgctgctgctgctgctgctgggcggcagcgctgcccggcctgccccaccccgggcccggcggcacagtgatggcaccttcaccagcgagctgagccggctgcgggagggcgcccggctgcagaggctgctgcagggcctggtgggcaagaggtctgagcaggatgctgaaaattccatggcctggacccggctgtctgctggcctgctgtgccccagcggcagcaacatgcccatcctgcaggcctggatgcccctggatggcacctggagcccctggctgcccccaggccccatggtgtctgagcctgctggagctgctgctgagggcaccctgcggcccaggtag

SEQ ID NO: 169014 - DNA, 1323 bp, synthetic construct
  misc_feature 1..1323: note = Description of Artificial Sequence: Synthetic coding sequence
  source 1..1323: mol_type = other DNA
atgaggccccacctgagcccccccctgcagcagctgctgctgcctgtgctgctggcctgtgccgcccacagcactggagccctgccccggctgtgtgatgtgctgcaggtgctgtgggaggagcaggaccagtgcctgcaggagctgagccgggagcagacaggagacctgggcacagagcagcctgtgcccggctgtgagggcatgtgggacaacatcagctgctggcccagctctgtgcccggccgcatggtggaggtggagtgcccccgcttcctgaggatgctgaccagcagaaatggcagcctcttcaggaactgcacccaggacggctggagcgagaccttcccccggcccaacctggcctgtggggtgaatgtgaatgacagcagcaatgagaagaggcacagctacctgctgaagctgaaggtgatgtacacagtgggctacagcagcagcctggtgatgctgctggtggccctgggcatcctgtgtgccttccggcggctgcactgcaccaggaactacatccacatgcacctgtttgtgtccttcatcctgcgggccctgagcaacttcatcaaggatgctgtgctcttcagcagtgatgatgtgacctactgtgatgcccacagagctggctgcaagctggtgatggtgctcttccagtactgcatcatggccaactacagctggctgctggtggagggcctgtacctgcacaccctgctggccatctccttcttcagcgagaggaagtacctgcagggctttgtggccttcggctggggcagccctgccatctttgtggccctgtgggccatcgcccggcacttcctggaggatgtgggctgctgggacatcaatgccaatgccagcatctggtggatcatccggggccctgtgatcctgagcatcctgatcaacttcatcctcttcatcaacatcctgcgcatcctgatgaggaagctgcggacccaggagaccagaggaaatgaggtgagccactacaagaggctggcccggagcaccctgctgctgatccccctgtttggcatccactacatcgtgtttgccttctccccagaagatgccatggagatccagctgttctttgagctggccctgggcagcttccagggcctggtggtggccgtgctgtactgcttcctgaatggagaggtgcagctggaggtgcagaagaagtggcagcagtggcacctgcgggagttccccctgcaccctgtggccagcttcagcaacagcaccaaggccagccacctggagcagagccagggcacctgcaggaccagcatcatctag

SEQ ID NO: 169015 - DNA, 288 bp, synthetic construct
  misc_feature 1..288: note = Description of Artificial Sequence: Synthetic coding sequence
  source 1..288: mol_type = other DNA
atgaagctgctgatggtgctgatgctggccgccctgctgctgcactgctacgccgacagcggctgcaagctgctggaggacatggtggagaagaccatcaacagcgacatcagcatccctgagtacaaggagctgctgcaggagttcatcgacagtgatgctgctgctgaggccatgggcaagttcaagcagtgcttcctgaaccagagccacaggaccctgaagaactttggcctgatgatgcacacagtgtatgacagcatctggtgcaacatgaagagcaactag

SEQ ID NO: 169016 - DNA, 1746 bp, synthetic construct
  misc_feature 1..1746: note = Description of Artificial Sequence: Synthetic coding sequence
  source 1..1746: mol_type = other DNA
atgcctgccccccgggcccgggagcagccccgggtgcctggagagcggcagcccctgctgcccaggggggcccggggcccccggcgctggaggagagctgctggagctgctgtgctgctggtggagatgctggagagagctgccttcttcggcgtgacagccaacctggtgctgtacctgaacagcaccaacttcaactggacaggagagcaggccaccagggctgccctggtgttcctgggcgccagctacctgctggcccctgtgggcggctggctggctgatgtgtacctgggccgctacagagctgtggccctgagcctgctgctgtacctggccgccagcggcctgctgcctgccacagccttcccagatggccgcagcagcttctgtggggagatgcctgccagccccctgggccctgcctgccccagcgctggctgccccaggagcagccccagcccctactgtgcccctgtgctgtatgccggcctgctgctgctgggcctggccgccagctctgtgcgcagcaacctgaccagctttggagctgaccaggtgatggacctgggcagagatgccacccggcgcttcttcaactggttctactggagcatcaacctgggcgctgtgctgagcctgctggtggtggccttcatccagcagaacatctccttcctgctgggctacagcatccctgtgggctgtgtgggcctggccttcttcatcttcctgtttgccacccctgtgttcatcaccaagccacccatgggcagccaggtgtcctccatgctgaagctggccctgcagaactgctgcccccagctgtggcagaggcacagcgcccgggaccggcagtgtgcccgggtgctggctgatgagaggagcccccagcccggggccagcccccaggaggacatcgccaacttccaggtgctggtgaagatcctgcctgtgatggtgaccctggtgccctactggatggtgtacttccagatgcagagcacctacgtgctgcagggcctgcacctgcacatccccaacatcttccctgccaacccagccaacatctctgtggccctgcgggcccagggcagcagctacaccatccctgaggcctggctgctgctggccaacgtggtggtggtgctgatcctggtgcccctgaaggaccggctgattgaccccctgctgctgcgctgcaagctgctgcccagcgccctgcagaagatggccctgggcatgttcttcggcttcacctctgtgattgtggccggcgtgctggagatggagcggctgcactacatccaccacaatgaaacagtgtcccagcagatcggggaggtgctgtacaatgctgcccccctgagcatctggtggcagatcccccagtacctgctgattggcatcagcgagatctttgccagcatccctggcctggagtttgcctacagcgaggcccccaggtccatgcagggcgccatcatgggcatcttcttctgcctgtctggagtgggcagcctgctgggcagcagcctggtggccctgctgagcctgcccggcggctggctgcactgccccaaggactttggaaacatcaacaactgcaggatggacctgtacttcttcctgctggccggcatccaggccgtgacagccctgctgtttgtgtggattgctggccgctatgagcgggccagccagggccctgccagccacagccgcttcagccgggaccggggctag

SEQ ID NO: 169017 - DNA, 363 bp, synthetic construct
  misc_feature 1..363: note = Description of Artificial Sequence: Synthetic coding sequence
  source 1..363: mol_type = other DNA
atgaagctgctgatggtgctgatgctggccgccctgagccagcactgctacgccggcagcggctgccccctgctggagaatgtcatcagcaagaccatcaacccccaggtgtccaagacagagtacaaggagctgctgcaggagttcattgatgacaatgccaccaccaatgccattgatgagctgaaggagtgcttcctgaaccagacagatgagaccctgagcaatgtggaggtgttcatggtgatctccttcagcagctacaagctgttcaagagcccagaccagggccaggtgggcagcagcttcctgacagacaatgccaaggccaccagcgagcaggccttctcctacatcggctag

SEQ ID NO: 169018 - DNA, 315 bp, synthetic construct
  misc_feature 1..315: note = Description of Artificial Sequence: Synthetic coding sequence
  source 1..315: mol_type = other DNA
atgaagctggccgccctgctgggcctgtgtgtggccctgagctgcagcagcgctgctgccttcctggtgggcagcgccaagcctgtggcccagcctgtggccgccctggagagcgctgctgaggccggggccggcaccctggccaaccccctgggcaccctgaaccccctgaagctgctgctgagcagcctgggcatccctgtgaaccacctgattgagggcagccagaagtgtgtggccgagctgggcccccaggccgtgggcgctgtgaaggccctgaaggccctgctgggcgccctgactgtgtttggatag

SEQ ID NO: 169019 - DNA, 282 bp, synthetic construct
  misc_feature 1..282: note = Description of Artificial Sequence: Synthetic coding sequence
  source 1..282: mol_type = other DNA
atgaagctggtgaccatcttcctgctggtgaccatcagcctgtgcagctacagcgccacagccttcctgatcaacaaggtgcccctgcctgtggacaagctggcccccctgcccctggacaacatcctgcccttcatggaccccctgaagctgctgctgaagaccctgggcatctctgtggagcacctggtggagggcctgaggaaatgtgtgaatgagctgggccctgaggccagcgaggccgtgaagaagctgctggaggccctgagccacctggtgtag

SEQ ID NO: 169020 - DNA, 1854 bp, synthetic construct
  misc_feature 1..1854: note = Description of Artificial Sequence: Synthetic coding sequence
  source 1..1854: mol_type = other DNA
atggccgaggccaagacccactggctgggcgccgccctgagcctcatccccctcatcttcctgatctctggagctgaggccgccagcttccagaggaaccagctgctgcagaaggagccagacctgcggctggagaatgtgcagaagttccccagccctgagatgatccgggccctggagtacatcgagaacctgcggcagcaggcccacaaggaggagagcagcccagactacaacccctaccagggcgtgtctgtgcccctgcagcagaaggaaaatggagatgagagccacctgcctgagcgggacagcctgtctgaggaggactggatgaggatcatcctggaggccctgcggcaggccgagaatgagccccagagcgcccccaaggagaacaagccctatgccctgaacagcgagaagaacttccccatggacatgtctgatgattatgagacccagcagtggccagagaggaagctgaagcacatgcagtttcctcccatgtatgaggagaacagccgggacaaccccttcaagaggaccaatgaaattgtggaggagcagtacaccccccagagcctggccaccctggagagcgtcttccaggagctgggcaagctgaccggccccaacaaccagaagcgggagaggatggatgaggagcagaagctgtacacagatgatgaagatgacatctacaaggccaacaacatcgcctatgaagatgtggtgggcggggaggactggaaccctgtggaggagaagattgagagccagacccaggaggaggtgcgggacagcaaggagaacatcgagaagaatgagcagatcaatgatgagatgaagaggagcggccagctgggcatccaggaggaggacctgaggaaggagagcaaggaccagctgagtgatgatgtgtccaaggtgattgcctacctgaagaggctggtgaatgctgctggcagcggccgcctgcagaatggccagaatggagagcgggccacccggctgtttgagaagcccctggacagccagagcatctaccagctgattgagatcagcaggaacctgcagatccccccagaagatctcatcgagatgctgaagacaggagagaagcccaacggctctgtggagcctgagcgggagctggacctgcctgtggacctggatgacatcagcgaggccgacctggaccacccagacctcttccagaacaggatgctgagcaagagcggctaccccaagaccccaggccgggccggcacagaggccctgcctgatggcctgtctgtggaggacatcctgaacctgctgggcatggagagcgctgccaaccagaagaccagctacttccccaacccctacaaccaggagaaggtgctgccccggctgccctacggggccggccgcagccgcagcaaccagctgcccaaggccgcctggatcccccacgtggagaaccggcagatggcctatgagaacctgaatgacaaggaccaggagctgggggagtacctggccaggatgctggtgaagtacccagagatcatcaacagcaaccaggtgaagagggtgcccggccagggcagcagtgaagatgacctgcaggaggaggagcagatcgagcaggccatcaaggagcacctgaaccagggcagcagccaggagacagacaagctggcccctgtgtccaagcgcttccctgtgggcccccccaagaatgatgacacccccaaccggcagtactgggatgaggacctgctgatgaaggtgctggagtacctgaaccaggagaaggccgagaagggccgggagcacatcgccaagagggccatggagaacatgtag

SEQ ID NO: 169021 - DNA, 435 bp, synthetic construct
  misc_feature 1..435: note = Description of Artificial Sequence: Synthetic coding sequence
  source 1..435: mol_type = other DNA
atggccgaggccaagacccactggctgggcgccgccctgagcctcatccccctcatcttcctgatctctggagctgaggccgccagcttccagaggaaccagctgctgcagaaggagccagacctgcggctggagaatgtgcagaagttccccagccctgagatgatccgggccctggagtacatcgagaacctgcggcagcaggcccacaaggaggagagcagcccagactacaacccctaccagggcgtgtctgtgcccctgcagcagaaggaaaatggagatgagagccacctgcctgagcgggacagcctgtctgaggaggactggatgaggatcatcctggaggccctgcggcaggccgagaatgagccccagagcgcccccaaggagaacaagccctatgccctgaacagcgagaagaacttcccctag

SEQ ID NO: 169022 - DNA, 378 bp, synthetic construct
  misc_feature 1..378: note = Description of Artificial Sequence: Synthetic coding sequence
  source 1..378: mol_type = other DNA
atggccgaggccaagacccactggctgggcgccgccctgagcctcatccccctcatcttcctgatctctggagctgaggccgccagcttccagaggaaccagctgctgcagaaggagccagacctgcggctggagaatgtgcagaagttccccagccctgagatgatccgggccctggagtacatcgagaacctgcggcagcaggcccacaaggaggagagcagcccagactacaacccctaccagggcgtgtctgtgcccctgcagcagaaggaaaatggagatgagagccacctgcctgagcgggacagcctgtctgaggaggactggatgaggatcatcctggaggccctgcggcaggccgagaatgagccctag

SEQ ID NO: 169023 - DNA, 1434 bp, synthetic construct
  misc_feature 1..1434: note = Description of Artificial Sequence: Synthetic coding sequence
  source 1..1434: mol_type = other DNA
atggccgaggccaagacccactggctgggcgccgccctgagcctcatccccctcatcttcctgatctctggagctgaggccgccagcttccagaggaaccagctgctgcagaaggagccagacctgcggctggagaatgtgcagaagttccccagccctgagatgatccgggccctggagtacatcgagaacctgcggcagcaggcccacaaggaggagagcagcccagactacaacccctaccagggcgtgtctgtgcccctgcagcagaaggaaaatggagatgagagccacctgcctgagcgggacagcctgcggggggaggactggaaccctgtggaggagaagattgagagccagacccaggaggaggtgcgggacagcaaggagaacatcgagaagaatgagcagatcaatgatgagatgaagaggagcggccagctgggcatccaggaggaggacctgaggaaggagagcaaggaccagctgagtgatgatgtgtccaaggtgattgcctacctgaagaggctggtgaatgctgctggcagcggccgcctgcagaatggccagaatggagagcgggccacccggctgtttgagaagcccctggacagccagagcatctaccagctgattgagatcagcaggaacctgcagatccccccagaagatctcatcgagatgctgaagacaggagagaagcccaacggctctgtggagcctgagcgggagctggacctgcctgtggacctggatgacatcagcgaggccgacctggaccacccagacctcttccagaacaggatgctgagcaagagcggctaccccaagaccccaggccgggccggcacagaggccctgcctgatggcctgtctgtggaggacatcctgaacctgctgggcatggagagcgctgccaaccagaagaccagctacttccccaacccctacaaccaggagaaggtgctgccccggctgccctacggggccggccgcagccgcagcaaccagctgcccaaggccgcctggatcccccacgtggagaaccggcagatggcctatgagaacctgaatgacaaggaccaggagctgggggagtacctggccaggatgctggtgaagtacccagagatcatcaacagcaaccaggtgaagagggtgcccggccagggcagcagtgaagatgacctgcaggaggaggagcagatcgagcaggccatcaaggagcacctgaaccagggcagcagccaggagacagacaagctggcccctgtgtccaagcgcttccctgtgggcccccccaagaatgatgacacccccaaccggcagtactgggatgaggacctgctgatgaaggtgctggagtacctgaaccaggagaaggccgagaagggccgggagcacatcgccaagagggccatggagaacatgtag

SEQ ID NO: 169024 - DNA, 390 bp, synthetic construct; identical to SEQ ID NO: 144893
  misc_feature 1..390: note = Description of Artificial Sequence: Synthetic coding sequence
  source 1..390: mol_type = other DNA

SEQ ID NO: 169025 - DNA, 711 bp, synthetic construct
  misc_feature 1..711: note = Description of Artificial Sequence: Synthetic coding sequence
  source 1..711: mol_type = other DNA
atggccgccatccaggacggcctggccaagggggagaatgatgagaccgtgagcaacaccctgaccctgaccaacggcctggagaggaggaccaagacctacagcgaggacaactttgaggagctgcagtacttccccaacttctacgccctgctgaagagcattgattctgagaaggaggccaaggagaaggagaccctcatcaccatcatgaagaccctgattgactttgtgaagatgatggtgaagtatggcaccatcagccctgaggagggcgtgtcctacctggagaacctggatgagatgattgccctgcagaccaagaacaagctggagaagaatgccacagacaacatcagcaagctgtttcctgcccccagcgagaagagccatgaggagacagacagcaccaaggaggaggccgccaagatggagaaggagtatggcagcctgaaggacagcaccaaggatgacaacagcaaccctgggggcaagacagatgagcccaagggcaagacagaggcctacctggaggccatcaggaagaacatcgagtggctgaagaagcatgacaagaagggcaacaaggaggactatgacctgagcaagatgagggacttcatcaacaagcaggctgatgcctacgtggagaagggcatcctggacaaggaggaggccgaggccatcaagaggatctacagcagcctgtag

SEQ ID NO: 169026 - DNA, 174 bp, synthetic construct
  misc_feature 1..174: note = Description of Artificial Sequence: Synthetic coding sequence
  source 1..174: mol_type = other DNA
atggccgccatccaggacggcctggccaagggggagaatgatgagaccgtgagcaacaccctgaccctgaccaacggcctggagaggaggaccaagacctacagcgaggacaactttgaggagctgcagtacttccccaacttctacgccctgctgaagagcattgacagctag

SEQ ID NO: 169027 - DNA, 990 bp, synthetic construct
  misc_feature 1..990: note = Description of Artificial Sequence: Synthetic coding sequence
  source 1..990: mol_type = other DNA
atgtctgcctttgacaccaacccctttgctgaccctgtggatgtgaaccccttccaggaccccagcgtgacccagctgaccaatgccccccagggcggcctggccgagttcaaccccttcagcgagaccaatgctgccaccaccgtgcctgtgacccagctgcccggcagcagccagcctgctgtgctgcagcccagcgtggagcccacccagcccaccccccaggccgtggtgtctgctgcccaggccggcctgctgcggcagcaggaggagctggacaggaaggctgctgagctggagaggaaggagcgggagctgcagaacacagtggccaacctgcacgtgcggcagaacaactggccacccctgcccagctggtgccctgtgaagccctgcttctaccaggacttcagcacagagatcccagctgactaccagaggatctgcaagatgctgtactacctgtggatgctgcacagcgtgaccctcttcctgaacctgctggcctgcctggcctggttcagcggcaacagcagcaagggcgtggactttggcctgagcatcctgtggttcctgatcttcaccccctgtgccttcctgtgctggtaccggcccatctacaaggccttcagaagtgacaacagcttctccttctttgtgttcttctttgtgttcttctgccagatcggcatctacatcatccagctggtgggcatccctggcctgggggacagcggctggattgctgccctgagcaccctggacaaccacagcctggccatcagcgtcatcatgatggtggtggccggcttcttcaccctgtgtgctgtgctgtctgtgttcctgctgcagagggtgcacagcctgtacagaagaactggagccagcttccagcaggcccaggaggagttcagccagggcatcttcagcagcaggaccttccacagagctgccagcagcgctgcccagggcgccttccagggcaactag

SEQ ID NO: 169028 - DNA, 864 bp, synthetic construct
  misc_feature 1..864: note = Description of Artificial Sequence: Synthetic coding sequence
  source 1..864: mol_type = other DNA
atgtctgcctttgacaccaacccctttgctgacaccaatgctgccaccaccgtgcctgtgacccagctgcccggcagcagccagcctgctgtgctgcagcccagcgtggagcccacccagcccaccccccaggccgtggtgtctgctgcccaggccggcctgctgcggcagcaggaggagctggacaggaaggctgctgagctggagaggaaggagcgggagctgcagaacacagtggccaacctgcacgtgcggcagaacaactggccacccctgcccagctggtgccctgtgaagccctgcttctaccaggacttcagcacagagatcccagctgactaccagaggatctgcaagatgctgtactacctgtggatgctgcacagcgtgaccctcttcctgaacctgctggcctgcctggcctggttcagcggcaacagcagcaaaggagtggactttggcctgagcatcctgtggttcctgatcttcaccccctgtgccttcctgtgctggtaccggcccatctacaaggccttcagaagtgacaacagcttctccttctttgtgttcttctttgtgttcttctgccagatcggcatctacatcatccagctggtgggcatccctggcctgggggacagcggctggattgctgccctgagcaccctggacaaccacagcctggccatcagcgtcatcatgatggtggtggccggcttcttcaccctgtgtgctgtgctgagcgtcttcctgctgcagagggtgtctggagtgggccgggctgacagcaagtgggaggaggccggcaaccgcttcctgcccctgcccagagatgtgttccaccactgctcctgggccagctag

SEQ ID NO: 169029 - DNA, 1044 bp, synthetic construct
  misc_feature 1..1044: note = Description of Artificial Sequence: Synthetic coding sequence
  source 1..1044: mol_type = other DNA
atggcccagagcagagatggcggcaacccctttgctgagcccagcgagctggacaaccccttccaggaccctgctgtgatccagcaccggcccagccggcagtatgccaccctggatgtgtacaacccctttgagacccgggagcccccaccagcctatgagcccccagccccagcccccctgcccccaccttctgcccccagcctgcagcccagcaggaagctgagccccacagagcccaagaactacggcagctacagcacccaggccagcgctgctgctgccacagctgagctgctgaagaagcaggaggagctgaacaggaaggccgaggagctggacagaagagagcgggagctgcagcacgccgccctgggcggcacagccacccggcagaacaactggccacccctgcccagcttctgccctgtgcagccctgcttcttccaggacatctccatggagatcccccaggagttccagaagacagtgtccaccatgtactacctgtggatgtgcagcaccctggccctgctgctgaacttcctggcctgcctggccagcttctgtgtggagaccaacaatggagctggcttcggcctgagcatcctgtgggtgctgctcttcaccccctgcagctttgtgtgctggtaccggcccatgtacaaggccttcagaagtgacagcagcttcaacttctttgtgttcttcttcatcttctttgtgcaggatgtgctgtttgtgctgcaggccatcggcatccctggctggggcttcagcggctggatcagcgccctggtggtgcccaagggcaacacagctgtgtctgtgctgatgctgctggtggccctgctcttcaccggcattgctgtgctgggcatcgtgatgctgaagaggatccacagcctgtacagaagaactggagccagcttccagaaggcccagcaggagtttgctgctggggtcttcagcaacccagctgtgaggacagctgctgccaatgctgctgctggagctgctgaaaatgccttccgggccccctag

SEQ ID NO: 169030 - DNA, 966 bp, synthetic construct
  misc_feature 1..966: note = Description of Artificial Sequence: Synthetic coding sequence
  source 1..966: mol_type = other DNA
atggcccagagcagagatggcggcaacccctttgctgagcccagcgagctggacaaccccttccagcccccaccagcctatgagcccccagccccagcccccctgcccccaccttctgcccccagcctgcagcccagcaggaagctgagccccacagagcccaagaactacggcagctacagcacccaggccagcgctgctgctgccacagctgagctgctgaagaagcaggaggagctgaacaggaaggccgaggagctggacagaagagagcgggagctgcagcacgccgccctgggcggcacagccacccggcagaacaactggccacccctgcccagcttctgccctgtgcagccctgcttcttccaggacatctccatggagatcccccaggagttccagaagacagtgtccaccatgtactacctgtggatgtgcagcaccctggccctgctgctgaacttcctggcctgcctggccagcttctgtgtggagaccaacaatggagctggcttcggcctgagcatcctgtgggtgctgctcttcaccccctgcagctttgtgtgctggtaccggcccatgtacaaggccttcagaagtgacagcagcttcaacttctttgtgttcttcttcatcttctttgtgcaggatgtgctgtttgtgctgcaggccatcggcatccctggctggggcttcagcggctggatcagcgccctggtggtgcccaagggcaacacagctgtgtctgtgctgatgctgctggtggccctgctcttcaccggcattgctgtgctgggcatcgtgatgctgaagaggatccacagcctgtacagaagaactggagccagcttccagaaggcccagcaggagtttgctgctggggtcttcagcaacccagctgtgaggacagctgctgccaatgctgctgctggagctgctgaaaatgccttccgggccccctag

SEQ ID NO: 169031 - DNA, 690 bp, synthetic construct
  misc_feature 1..690: note = Description of Artificial Sequence: Synthetic coding sequence
  source 1..690: mol_type = other DNA
atgtctgagaaggagaacaacttcccccccctgcccaagttcatccctgtgaagccctgcttctaccagaacttcagtgatgagatccctgtggagcaccaggtgctggtgaagaggatctaccgcctgtggatgttctactgtgccaccctgggcgtgaacctgattgcctgcctggcctggtggattggaggcggcagcggcaccaactttggcctggcctttgtgtggctgctgctcttcaccccctgtggctacgtgtgctggttccggcctgtgtacaaggccttccgggctgacagcagcttcaacttcatggccttcttcttcatctttggagcccagtttgtgctgaccgtcatccaggccatcggcttcagcggctggggcgcctgtggctggctgagcgccatcggcttcttccagtacagccctggagctgctgtggtgatgctgctgcctgccatcatgttttctgtgtctgctgccatgatggccatcgccatcatgaaggtgcaccgcatctacagaggagctgggggcagcttccagaaggcccagacagagtggaacacaggcacctggaggaacccccccagccgggaggcccagtacaacaacttcagcggcaacagcctgcctgagtaccccaccgtgcccagctacccaggcagcggccagtggccctag

SEQ ID NO: 169032 - DNA, 588 bp, synthetic construct
  misc_feature 1..588: note = Description of Artificial Sequence: Synthetic coding sequence
  source 1..588: mol_type = other DNA
atgtctgagaaggagaacaacttcccccccctgcccaagttcatccctgtgaagccctgcttctaccagaacttcagtgatgagatccctgtggagcaccaggtgctggtgaagaggatctaccgcctgtggatgttctactgtgccaccctgggcgtgaacctgattgcctgcctggcctggtggattggaggcggcagcggcaccaactttggcctggcctttgtgtggctgctgctcttcaccccctgtggctacgtgtgctggttccggcctgtgtacaaggccttccggggctggctgagcgccatcggcttcttccagtacagccctggagctgctgtggtgatgctgctgcctgccatcatgttttctgtgtctgctgccatgatggccatcgccatcatgaaggtgcaccgcatctacagaggagctgggggcagcttccagaaggcccagacagagtggaacacaggcacctggaggaacccccccagccgggaggcccagtacaacaacttcagcggcaacagcctgcctgagtaccccaccgtgcccagctacccaggcagcggccagtggccctag

SEQ ID NO: 169033 - DNA, 588 bp, synthetic construct
  misc_feature 1..588: note = Description of Artificial Sequence: Synthetic coding sequence
  source 1..588: mol_type = other DNA
atgatccagaggcacatccctgtgtgtggccgcagccggccctaccagaggggctgtgtggtgcaggccggcagcagcggcagccctggctggagccacttcaagatcatctgtggcctggccccagcccccagcgaggccgtgctgagcgccaggaacaactgtgagcacactggaggctgccgcctgcagcctgccctggtgggggagacagagatgtctgagaaggagaacaacttcccccccctgcccaagttcatccctgtgaagccctgcttctaccagaacttcagtgatgagatccctgtggagcaccaggtgctggtgaagaggatctaccgcctgtggatgttctactgtgccaccctgggcgtgaacctgattgcctgcctggcctggtggattggaggcggcagcggcaccaactttggcctggcctttgtgtggctgctgctcttcaccccctgtggctacgtgtgctggttccggcctgtgtacaaggccttccgggctgacagcagcttcaacttcatggccttcttcttcatctttggagcccagtttgtgctgaccgtcatccaggcctag

SEQ ID NO: 169034 - DNA, 708 bp, synthetic construct
  misc_feature 1..708: note = Description of Artificial Sequence: Synthetic coding sequence
  source 1..708: mol_type = other DNA
atggccgagaaggtgaacaacttcccccccctgcccaagttcatccccctgaagccctgcttctaccaggactttgaagctgacatccccccccagcacgtgtccatgaccaagaggctgtactacctgtggatgctgaacagcgtgaccctggccgtgaacctggtgggctgcctggcctggctgattggaggcggcggggccaccaactttggcctggccttcctgtggctgatcctcttcaccccctgcagctatgtgtgctggttccggcccatctacaaggccttcaagacagacagcagcttctccttcatggccttcttcttcaccttcatggcccagctggtgatcagcatcatccaggccgtgggcatccctggctggggcgtgtgtggctggatcgccaccatctccttcttcggcaccaacatcggcagcgctgtggtgatgctgatccccaccgtgatgttcaccgtgatggctgtgttctccttcatcgccctgtccatggtgcacaagttctaccggggcagcggcggcagcttcagcaaggcccaggaggagtggaccaccggggcctggaagaacccccacgtgcagcaggccgcccagaatgctgccatgggcgccgcccagggcgccatgaaccagccccagacccagtacagcgccacccccaactacacctacagcaatgagatgtag

SEQ ID NO: 169035 - DNA, 708 bp, synthetic construct; identical to SEQ ID NO: 169034
  misc_feature 1..708: note = Description of Artificial Sequence: Synthetic coding sequence
  source 1..708: mol_type = other DNA

SEQ ID NO: 169036 - DNA, 495 bp, synthetic construct
  misc_feature 1..495: note = Description of Artificial Sequence: Synthetic coding sequence
  source 1..495: mol_type = other DNA
atgttcctgccccggctgcggggccgctacagcagccctgcctgccagcacgaccaggcccccctgctgcccctggatgtgacagacagcagcttctccttcatggccttcttcttcaccttcatggcccagctggtgatcagcatcatccaggccgtgggcatccctggctggggcgtgtgtggctggatcgccaccatctccttcttcggcaccaacatcggcagcgctgtggtgatgctgatccccaccgtgatgttcaccgtgatggctgtgttctccttcatcgccctgtccatggtgcacaagttctaccggggcagcggcggcagcttcagcaaggcccaggaggagtggaccactggagcctggaagaacccccacgtgcagcaggccgcccagaatgctgccatgggcgccgcccagggcgccatgaaccagccccagacccagtacagcgccacccccaactacacctacagcaatgagatgtag

SEQ ID NO: 169037 - DNA, 1083 bp, synthetic construct
  misc_feature 1..1083: note = Description of Artificial Sequence: Synthetic coding sequence
  source 1..1083: mol_type = other DNA
atgtttgtggcccggagcattgctgctgaccacaaggacctgattcatgatgtgtcctttgacttccatggaagaaggatggccacctgcagcagtgaccagagcgtgaaggtgtgggacaagtctgagagcggggactggcactgcacagcctcctggaagacccacagcggctctgtgtggagggtgacctgggcccaccctgagtttggccaggtgctggccagctgcagctttgacagaacagctgctgtgtgggaggagatcgtgggggagagcaatgacaagctgcggggccagagccactgggtgaagaggaccaccctggtggacagcaggacctctgtgacagatgtgaagtttgcccccaagcacatgggcctgatgctggccacctgcagcgcagatggcatcgtgcgcatctatgaggccccagatgtgatgaacctgagccagtggagcctgcagcacgagatcagctgcaagctgagctgcagctgcatctcctggaaccccagcagcagccgggcccacagccccatgattgctgtgggcagtgatgacagcagccccaatgccatggccaaggtgcagatctttgagtacaatgaaaacaccaggaaatatgccaaggccgagaccctgatgacagtgacagatcctgtgcatgacatcgcctttgcccccaacctgggccgctccttccacatcctggccatcgccaccaaggatgtgcgcatcttcaccctgaagcctgtgaggaaggagctgaccagcagcggcggccccaccaagtttgagatccacatcgtggcccagtttgacaaccacaacagccaggtgtggagggtgtcctggaacatcactggaacagtgctggccagcagtggagatgatggctgtgtgcggctgtggaaggccaactacatggacaactggaagtgcaccggcatcctgaagggaaatggcagccctgtgaatggcagcagccagcagggcaccagcaaccccagcctgggcagcaccatccccagcctgcagaacagcctgaatggcagcagcgctggcaggaagcacagctag

SEQ ID NO: 169038 - DNA, 1266 bp, synthetic construct
  misc_feature 1..1266: note = Description of Artificial Sequence: Synthetic coding sequence
  source 1..1266: mol_type = other DNA
atgtttgtggcccggagcattgctgctgaccacaaggacctgattcatgatgtgtcctttgacttccatggaagaaggatggccacctgcagcagtgaccagagcgtgaaggtgtgggacaagtctgagagcggggactggcactgcacagcctcctggaagacccacagcggctctgtgtggagggtgacctgggcccaccctgagtttggccaggtgctggccagctgcagctttgacagaacagctgctgtgtgggaggagatcgtgggggagagcaatgacaagctgcggggccagagccactgggtgaagaggaccaccctggtggacagcaggacctctgtgacagatgtgaagtttgcccccaagcacatgggcctgatgctggccacctgcagcgcagatggcatcgtgcgcatctatgaggccccagatgtgatgaacctgagccagtggagcctgcagcacgagatcagctgcaagctgagctgcagctgcatctcctggaaccccagcagcagccgggcccacagccccatgattgctgtgggcagtgatgacagcagccccaatgccatggccaaggtgcagatctttgagtacaatgaaaacaccaggaaatatgccaaggccgagaccctgatgacagtgacagatcctgtgcatgacatcgcctttgcccccaacctgggccgctccttccacatcctggccatcgccaccaaggatgtgcgcatcttcaccctgaagcctgtgaggaaggagctgaccagcagcggcggccccaccaagtttgagatccacatcgtggcccagtttgacaaccacaacagccaggtgtggagggtgtcctggaacatcactggaacagtgctggccagcagtggagatgatggctgtgtgcggctgtggaaggccaactacatggacaactggaagtgcaccggcatcctgaagggaaatggcagccctgtgaatggcagcagccagcagggcaccagcaaccccagcctgggcagcaccatccccagcctgcagaacagcctgaatggcagcagcgctggccgctacttcttcacccccctggacagcccccgggccggcagccgctggagcagctatgcccagctgctgcccccacctcctccacccctggtggagcacagctgtgatgctgacacagccaacctgcagtacccccacccccggcggcgctacctgagccggcccctgaaccccctgcctgaaaatgaaggcatctag

SEQ ID NO: 169039 - DNA, 3075 bp, synthetic construct
  misc_feature 1..3075: note = Description of Artificial Sequence: Synthetic coding sequence
  source 1..3075: mol_type = other DNA
atgcctgctgcccggcccccagctgctggcctgcggggcatcagcctcttcctggccctgctgctgggcagccctgctgctgccctggagagagatgccctgcctgaaggagatgccagccccctgggcccctacctgctgcccagcggggcccctgagcggggcagccctgggaaggagcaccctgaggagcgggtggtgacagccccacccagcagcagccagagcgctgaggtgctgggggagctggtgctggatggaacagcccccagcgcccaccacgacatcccagccctgagccccctgctgcctgaggaggcccggcccaagcacgccctgccccccaagaagaagctgcccagcctgaagcaggtgaacagcgccaggaagcagctgcggcccaaggccaccagcgctgccaccgtgcagagagctggcagccagcctgccagccagggcctggacctgctgagcagcagcacagagaagccaggccccccaggggaccctgaccccatcgtggccagcgaggaggccagcgaggtgcccctgtggctggacaggaaggagagcgctgtgcccaccaccccagcccccctgcagatcagccccttcaccagccagccctacgtggcccacaccctgccccagaggcctgagcctggagagcccggccctgacatggcccaggaggccccccaggaggacaccagccccatggccctgatggacaagggagaaaatgagctgactggaagtgccagcgaggagagccaggagaccaccaccagcaccatcatcaccaccaccgtcatcaccacagagcaggccccagccctgtgcagcgtgtccttcagcaaccctgagggctacatcgacagcagtgactaccccctgctgcccctgaacaacttcctggagtgcacctacaacgtgacagtgtacacaggctacggcgtggagctgcaggtgaagtctgtgaacctgagtgatggagagctgctgagcatccggggcgtggatggccccaccctgactgtgctggccaaccagaccctgctggtggagggccaggtgatccgcagccccaccaacaccatctctgtgtacttccgcaccttccaggatgatggcctgggcaccttccagctgcactaccaggccttcatgctgagctgcaacttccccaggaggccagattctggagatgtgacagtgatggacctgcacagcggaggagtggcccacttccactgccacctgggctatgagctgcagggcgccaagatgctgacctgcatcaatgccagcaagccccactggagcagccaggagcccatctgcagcgccccctgtggcggcgctgtgcacaatgccaccatcggccgggtgctgagccccagctacccagagaacaccaacggcagccagttctgcatctggaccatcgaggcccctgagggccagaagctgcacctgcactttgagcggctgctgctgcatgacaaggacaggatgacagtgcacagcggccagaccaacaagagcgccctgctgtatgacagcctgcagacagaatctgtgccctttgagggcctgctgtctgagggcaacaccatccgcatcgagttcaccagtgaccaggcccgggccgccagcaccttcaacatccgctttgaggcctttgagaagggccactgctatgagccctacatccagaatggaaacttcaccaccagtgaccccacctacaacatcggcaccatcgtggagttcacctgtgaccccggccacagcctggagcagggccctgccatcatcgagtgcatcaacgtgcgggacccctactggaatgacacagagcccctgtgccgggccatgtgtggcggggagctgtctgctgtggccggcgtggtgctgagccccaactggccagagccctacgtggagggggaggactgcatctggaagatccacgtgggggaggagaagaggatcttcctggacatccagttcctgaacctgagcaacagcgacatcctgaccatctatgatggagatgaggtgatgccccacatcctgggccagtacctgggcaacagcggcccccagaagctgtacagcagcaccccagacctgaccatccagttccacagcgaccctgctggcctcatctttgggaagggccagggcttcatcatgaactacatcgaggtgtccagaaatgacagctgcagcgacctgcctgagatccagaatggctggaagaccaccagccacacagagctggtgcggggggcccgcatcacctaccagtgtgaccccggctatgacatcgtgggcagtgacaccctgacctgccagtgggacctgtcctggagcagtgacccccccttctgtgagaagatcatgtactgcacagatcctggagaggtggaccacagcaccaggctcatcagtgaccctgtgctgctggtgggcaccaccatccagtacacctgcaaccctggctttgtgctggagggcagcagcctgctgacctgctacagccgggagaccggcacccccatctggaccagccggctgccccactgtgtgtctgaggagagcctggcctgtgacaaccctggcctgcctgaaaatggctaccagatcctgtacaagaggctgtacctgcctggagagagcctgaccttcatgtgctatgagggctttgagctgatgggagaggtgaccatccgctgcatcctgggccagcccagccactggaatggccccctgcctgtgtgcaaggtgaaccaggacagctttgaacatgccctggaggtggccgaggccgctgctgagaccagcctggagggcggcaacatggccctggccatcttcatccctgtgctgatcatcagcctgctgctgggcggggcctacatctacatcacccgctgccgctactacagcaacctgcggctgcccctgatgtacagccacccctacagccagatcaccgtggagacagaatttgacaaccccatctatgagaccggggagacccgggagtatgaggtgtccatctag

SEQ ID NO: 169040 - DNA, 2847 bp, synthetic construct
  misc_feature 1..2847: note = Description of Artificial Sequence: Synthetic coding sequence
  source 1..2847: mol_type = other DNA
atgcctgctgcccggcccccagctgctggcctgcggggcatcagcctcttcctggccctgctgctgggcagccctgctgctgccctggagagagatgccctgcctgaaggagatgccagccccctgggcccctacctgctgcccagcggggcccctgagcggggcagccctgggaaggagcaccctgaggagcgggtggtgacagccccacccagcagcagccagagcgctgaggtgctgggggagctggtgctggatggaacagcccccagcgcccaccacgacatcccagccctgagccccctgctgcctgaggaggcccggcccaagcacgccctgccccccaagaagaagctgcccagcctgaagcaggtgaacagcgccaggaagcagctgcggcccaaggccaccagcgctgccaccgtgcagagagctggcagccagcctgccagccagggcctggacctgctgagcagcagcacagagaagccaggccccccaggggaccctgaccccatcgtggccagcgaggaggccagcgaggtgcccctgtggctggacaggaaggagagcgctgtgcccaccaccccagcccccctgcagatcagccccttcaccagccagccctacgtggcccacaccctgccccagaggcctgagcctggagagcccggccctgacatggcccaggaggccccccaggaggacaccagccccatggccctgatggacaagggagaaaatgagctgactggaagtgccagcgaggagagccaggagaccaccaccagcaccatcatcaccaccaccgtcatcaccacagagcaggccccagccctgtgcagcgtgtccttcagcaaccctgagggctacatcgacagcagtgactaccccctgctgcccctgaacaacttcctggagtgcacctacaacgtgacagtgtacacaggctacggcgtggagctgcaggtgaagtctgtgaacctgagtgatggagagctgctgagcatccggggcgtggatggccccaccctgactgtgctggccaaccagaccctgctggtggagggccaggtgatccgcagccccaccaacaccatctctgtgtacttccgcaccttccaggatgatggcctgggcaccttccagctgcactaccaggccttcatgctgagctgcaacttccccaggaggccagattctggagatgtgacagtgatggacctgcacagcggaggagtggcccacttccactgccacctgggctatgagctgcagggcgccaagatgctgacctgcatcaatgccagcaagccccactggagcagccaggagcccatctgcagcgccccctgtggcggcgctgtgcacaatgccaccatcggccgggtgctgagccccagctacccagagaacaccaacggcagccagttctgcatctggaccatcgaggcccctgagggccagaagctgcacctgcactttgagcggctgctgctgcatgacaaggacaggatgacagtgcacagcggccagaccaacaagagcgccctgctgtatgacagcctgcagacagaatctgtgccctttgagggcctgctgtctgagggcaacaccatccgcatcgagttcaccagtgaccaggcccgggccgccagcaccttcaacatccgctttgaggcctttgagaagggccactgctatgagccctacatccagaatggaaacttcaccaccagtgaccccacctacaacatcggcaccatcgtggagttcacctgtgaccccggccacagcctggagcagggccctgccatcatcgagtgcatcaacgtgcgggacccctactggaatgacacagagcccctgtgccgggccatgtgtggcggggagctgtctgctgtggccggcgtggtgctgagccccaactggccagagccctacgtggagggggaggactgcatctggaagatccacgtgggggaggagaagaggatcttcctggacatccagttcctgaacctgagcaacagcgacatcctgaccatctatgatggagatgaggtgatgccccacatcctgggccagtacctgggcaacagcggcccccagaagctgtacagcagcaccccagacctgaccatccagttccacagcgaccctgctggcctcatctttgggaagggccagggcttcatcatgaactacatcgaggtgtccagaaatgacagctgcagcgacctgcctgagatccagaatggctggaagaccaccagccacacagagctggtgcggggggcccgcatcacctaccagtgtgaccccggctatgacatcgtgggcagtgacaccctgacctgccagtgggacctgtcctggagcagtgacccccccttctgtgagaagatcatgtactgcacagatcctggagaggtggaccacagcaccaggctcatcagtgaccctgtgctgctggtgggcaccaccatccagtacacctgcaaccctggctttgtgctggagggcagcagcctgctgacctgctacagccgggagaccggcacccccatctggaccagccggctgccccactgtgtgctggccgaggccgctgctgagaccagcctggagggcggcaacatggccctggccatcttcatccctgtgctgatcatcagcctgctgctgggcggggcctacatctacatcacccgctgccgctactacagcaacctgcggctgcccctgatgtacagccacccctacagccagatcaccgtggagacagaatttgacaaccccatctatgagaccggggagacccgggagtatgaggtgtccatctag

SEQ ID NO: 169041 - DNA, 2850 bp, synthetic construct
  misc_feature 1..2850: note = Description of Artificial Sequence: Synthetic coding sequence
  source 1..2850: mol_type = other DNA
atgcctgctgcccggcccccagctgctggcctgcggggcatcagcctcttcctggccctgctgctgggcagccctgctgctgccctggagagagatgccctgcctgaaggagatgccagccccctgggcccctacctgctgcccagcggggcccctgagcggggcagccctgggaaggagcaccctgaggagcgggtggtgacagccccacccagcagcagccagagcgctgaggtgctgggggagctggtgctggatggaacagcccccagcgcccaccacgacatcccagccctgagccccctgctgcctgaggaggcccggcccaagcacgccctgccccccaagaagaagctgcccagcctgaagcaggtgaacagcgccaggaagcagctgcggcccaaggccaccagcgctgccaccgtgcagagagctggcagccagcctgccagccagggcctggacctgctgagcagcagcacagagaagccaggccccccaggggaccctgaccccatcgtggccagcgaggaggccagcgaggtgcccctgtggctggacaggaaggagagcgctgtgcccaccaccccagcccccctgcagatcagccccttcaccagccagccctacgtggcccacaccctgccccagaggcctgagcctggagagcccggccctgacatggcccaggaggccccccaggaggacaccagccccatggccctgatggacaagggagaaaatgagctgactggaagtgccagcgaggagagccaggagaccaccaccagcaccatcatcaccaccaccgtcatcaccacagagcaggccccagccctgtgcagcgtgtccttcagcaaccctgagggctacatcgacagcagtgactaccccctgctgcccctgaacaacttcctggagtgcacctacaacgtgacagtgtacacaggctacggcgtggagctgcaggtgaagtctgtgaacctgagtgatggagagctgctgagcatccggggcgtggatggccccaccctgactgtgctggccaaccagaccctgctggtggagggccaggtgatccgcagccccaccaacaccatctctgtgtacttccgcaccttccaggatgatggcctgggcaccttccagctgcactaccaggccttcatgctgagctgcaacttccccaggaggccagattctggagatgtgacagtgatggacctgcacagcggaggagtggcccacttccactgccacctgggctatgagctgcagggcgccaagatgctgacctgcatcaatgccagcaagccccactggagcagccaggagcccatctgcagcgccccctgtggcggcgctgtgcacaatgccaccatcggccgggtgctgagccccagctacccagagaacaccaacggcagccagttctgcatctggaccatcgaggcccctgagggccagaagctgcacctgcactttgagcggctgctgctgcatgacaaggacaggatgacagtgcacagcggccagaccaacaagagcgccctgctgtatgacagcctgcagacagaatctgtgccctttgagggcctgctgtctgagggcaacaccatccgcatcgagttcaccagtgaccaggcccgggccgccagcaccttcaacatccgctttgaggcctttgagaagggccactgctatgagccctacatccagaatggaaacttcaccaccagtgaccccacctacaacatcggcaccatcgtggagttcacctgtgaccccggccacagcctggagcagggccctgccatcatcgagtgcatcaacgtgcgggacccctactggaatgacacagagcccctgtgccgggccatgtgtggcggggagctgtctgctgtggccggcgtggtgctgagccccaactggccagagccctacgtggagggggaggactgcatctggaagatccacgtgggggaggagaagaggatcttcctggacatccagttcctgaacctgagcaacagcgacatcctgaccatctatgatggagatgaggtgatgccccacatcctgggccagtacctgggcaacagcggcccccagaagctgtacagcagcaccccagacctgaccatccagttccacagcgaccctgctggcctcatctttgggaagggccagggcttcatcatgaactacatcgaggtgtccagaaatgacagctgcagcgacctgcctgagatccagaatggctggaagaccaccagccacacagagctggtgcggggggcccgcatcacctaccagtgtgaccccggctatgacatcgtgggcagtgacaccctgacctgccagtgggacctgtcctggagcagtgacccccccttctgtgagaagacagaggagagcctggcctgtgacaaccctggcctgcctgaaaatggctaccagatcctgtacaagaggctgtacctgcctggagagagcctgaccttcatgtgctatgagggctttgagctgatgggagaggtgaccatccgctgcatcctgggccagcccagccactggaatggccccctgcctgtgtgcaaggtggccgaggccgctgctgagaccagcctggagggcggcaacatggccctggccatcttcatccctgtgctgatcatcagcctgctgctgggcggggcctacatctacatcacccgctgccgctactacagcaacctgcggctgcccctgatgtacagccacccctacagccagatcaccgtggagacagaatttgacaaccccatctatgaaacaggagagacccgggagtatgaggtgtccatctag

SEQ ID NO: 169042 - DNA, 420 bp, synthetic construct
  misc_feature 1..420: note = Description of Artificial Sequence: Synthetic coding sequence
  source 1..420: mol_type = other DNA
atgtactgcacagaccccggggaggtggaccacagcaccaggctcatcagtgaccctgtgctgctggtgggcaccaccatccagtacacctgcaaccctggctttgtgctggagggcagcagcctgctgacctgctacagccgggagaccggcacccccatctggaccagccggctgccccactgtgtgtctgaggagagcctggcctgtgacaaccctggcctgcctgaaaatggctaccagatcctgtacaagaggctgtacctgcccggggagagcctgaccttcatgtgctatgagggctttgagctgatgggagaggtgaccatccgctgcatcctgggccagcccagccactggaatggccccctgcctgtgtgcaaggatgtggccaccatccccaccagcgcctgcctgtag

SEQ ID NO: 169043 - DNA, 3042 bp, synthetic construct
  misc_feature 1..3042: note = Description of Artificial Sequence: Synthetic coding sequence
  source 1..3042: mol_type = other DNA
atgcctgctgcccggcccccagctgctggcctgcggggcatcagcctcttcctggccctgctgctgggcagccctgctgctgccctggagagagatgccctgcctgaaggagatgccagccccctgggcccctacctgctgcccagcggggcccctgagcggggcagccctgggaaggagcaccctgaggagcgggtggtgacagccccacccagcagcagccagagcgctgaggtgctgggggagctggtgctggatggaacagcccccagcgcccaccacgacatcccagccctgagccccctgctgcctgaggaggcccggcccaagcacgccctgccccccaagaagaagctgcccagcctgaagcaggtgaacagcgccaggaagcagctgcggcccaaggccaccagcgctgccaccgtgcagagagctggcagccagcctgccagccagggcctggacctgctgagcagcagcacagagaagccaggccccccaggggaccctgaccccatcgtggccagcgaggaggccagcgaggtgcccctgtggctggacaggaaggagagcgctgtgcccaccaccccagcccccctgcagatcagccccttcaccagccagccctacgtggcccacaccctgccccagaggcctgagcctggagagcccggccctgacatggcccaggaggccccccaggaggacaccagccccatggccctgatggacaagggagaaaatgagctgactggaagtgccagcgaggagagccaggagaccaccaccagcaccatcatcaccaccaccgtcatcaccacagagcaggccccagccctgtgcagcgtgtccttcagcaaccctgagggctacatcgacagcagtgactaccccctgctgcccctgaacaacttcctggagtgcacctacaacgtgacagtgtacacaggctacggcgtggagctgcaggtgaagtctgtgaacctgagtgatggagagctgctgagcatccggggcgtggatggccccaccctgactgtgctggccaaccagaccctgctggtggagggccaggtgatccgcagccccaccaacaccatctctgtgtacttccgcaccttccaggatgatggcctgggcaccttccagctgcactaccaggccttcatgctgagctgcaacttccccaggaggccagattctggagatgtgacagtgatggacctgcacagcggaggagtggcccacttccactgccacctgggctatgagctgcagggcgccaagatgctgacctgcatcaatgccagcaagccccactggagcagccaggagcccatctgcagcgccccctgtggcggcgctgtgcacaatgccaccatcggccgggtgctgagccccagctacccagagaacaccaacggcagccagttctgcatctggaccatcgaggcccctgagggccagaagctgcacctgcactttgagcggctgctgctgcatgacaaggacaggatgacagtgcacagcggccagaccaacaagagcgccctgctgtatgacagcctgcagacagaatctgtgccctttgagggcctgctgtctgagggcaacaccatccgcatcgagttcaccagtgaccaggcccgggccgccagcaccttcaacatccgctttgaggcctttgagaagggccactgctatgagccctacatccagaatggaaacttcaccaccagtgaccccacctacaacatcggcaccatcgtggagttcacctgtgaccccggccacagcctggagcagggccctgccatcatcgagtgcatcaacgtgcgggacccctactggaatgacacagagcccctgtgccgggccatgtgtggcggggagctgtctgctgtggccggcgtggtgctgagccccaactggccagagccctacgtggagggggaggactgcatctggaagatccacgtgggggaggagaagaggatcttcctggacatccagttcctgaacctgagcaacagcgacatcctgaccatctatgatggagatgaggtgatgccccacatcctgggccagtacctgggcaacagcggcccccagaagctgtacagcagcaccccagacctgaccatccagttccacagcgaccctgctggcctcatctttgggaagggccagggcttcatcatgaactacatcgaggtgtccagaaatgacagctgcagcgacctgcctgagatccagaatggctggaagaccaccagccacacagagctggtgcggggggcccgcatcacctaccagtgtgaccccggctatgacatcgtgggcagtgacaccctgacctgccagtgggacctgtcctggagcagtgacccccccttctgtgagaagatcatgtactgcacagatcctggagaggtggaccacagcaccaggctcatcagtgaccctgtgctgctggtgggcaccaccatccagtacacctgcaaccctggctttgtgctggagggcagcagcctgctgacctgctacagccgggagaccggcacccccatctggaccagccggctgccccactgtgtgtctgaggagagcctggcctgtgacaaccctggcctgcctgaaaatggctaccagatcctgtacaagaggctgtacctgcctggagagagcctgaccttcatgtgctatgagggctttgagctgatgggagaggtgaccatccgctgcatcctgggccagcccagccactggaatggccccctgcctgtgtgcaaggtggccgaggccgctgctgagaccagcctggagggcggcaacatggccctggccatcttcatccctgtgctgatcatcagcctgctgctgggcggggcctacatctacatcacccgctgccgctactacagcaacctgcggctgcccctgatgtacagccacccctacagccagatcaccgtggagacagaatttgacaaccccatctatgaaacaggagagacccgggagtatgaggtgtccatctag

SEQ ID NO: 169044 - DNA, 3072 bp, synthetic construct
  misc_feature 1..3072: note = Description of Artificial Sequence: Synthetic coding sequence
  source 1..3072: mol_type = other DNA
atgcctgctgcccggcccccagctgctggcctgcggggcatcagcctcttcctggccctgctgctgggcagccctgctgctgccctggagagagatgccctgcctgaaggagatgccagccccctgggcccctacctgctgcccagcggggcccctgagcggggcagccctgggaaggagcaccctgaggagcgggtggtgacagccccacccagcagcagccagagcgctgaggtgctgggggagctggtgctggatggaacagcccccagcgcccaccacgacatcccagccctgagccccctgctgcctgaggaggcccggcccaagcacgccctgccccccaagaagaagctgcccagcctgaagcaggtgaacagcgccaggaagcagctgcggcccaaggccaccagcgctgccaccgtgcagagagctggcagccagcctgccagccagggcctggacctgctgagcagcagcacagagaagccaggccccccaggggaccctgaccccatcgtggccagcgaggaggccagcgaggtgcccctgtggctggacaggaaggagagcgctgtgcccaccaccccagcccccctgcagatcagccccttcaccagccagccctacgtggcccacaccctgccccagaggcctgagcctggagagcccggccctgacatggcccaggaggccccccaggaggacaccagccccatggccctgatggacaagggagaaaatgagctgactggaagtgccagcgaggagagccaggagaccaccaccagcaccatcatcaccaccaccgtcatcaccacagagcaggccccagccctgtgcagcgtgtccttcagcaaccctgagggctacatcgacagcagtgactaccccctgctgcccctgaacaacttcctggagtgcacctacaacgtgacagtgtacacaggctacggcgtggagctgcaggtgaagtctgtgaacctgagtgatggagagctgctgagcatccggggcgtggatggccccaccctgactgtgctggccaaccagaccctgctggtggagggccaggtgatccgcagccccaccaacaccatctctgtgtacttccgcaccttccaggatgatggcctgggcaccttccagctgcactaccaggccttcatgctgagctgcaacttccccaggaggccagattctggagatgtgacagtgatggacctgcacagcggaggagtggcccacttccactgccacctgggctatgagctgcagggcgccaagatgctgacctgcatcaatgccagcaagccccactggagcagccaggagcccatctgcagcgccccctgtggcggcgctgtgcacaatgccaccatcggccgggtgctgagccccagctacccagagaacaccaacggcagccagttctgcatctggaccatcgaggcccctgagggccagaagctgcacctgcactttgagcggctgctgctgcatgacaaggacaggatgacagtgcacagcggccagaccaacaagagcgccctgctgtatgacagcctgcagacagaatctgtgccctttgagggcctgctgtctgagggcaacaccatccgcatcgagttcaccagtgaccaggcccgggccgccagcaccttcaacatccgctttgaggcctttgagaagggccactgctatgagccctacatccagaatggaaacttcaccaccagtgaccccacctacaacatcggcaccatcgtggagttcacctgtgaccccggccacagcctggagcagggccctgccatcatcgagtgcatcaacgtgcgggacccctactggaatgacacagagcccctgtgccgggccatgtgtggcggggagctgtctgctgtggccggcgtggtgctgagccccaactggccagagccctacgtggagggggaggactgcatctggaagatccacgtgggggaggagaagaggatcttcctggacatccagttcctgaacctgagcaacagcgacatcctgaccatctatgatggagatgaggtgatgccccacatcctgggccagtacctgggcaacagcggcccccagaagctgtacagcagcaccccagacctgaccatccagttccacagcgaccctgctggcctcatctttgggaagggccagggcttcatcatgaactacatcgaggtgtccagaaatgacagctgcagcgacctgcctgagatccagaatggctggaagaccaccagccacacagagctggtgcggggggcccgcatcacctaccagtgtgaccccggctatgacatcgtgggcagtgacaccctgacctgccagtgggacctgtcctggagcagtgacccccccttctgtgagaagatcatgtactgcacagatcctggagaggtggaccacagcaccaggctcatcagtgaccctgtgctgctggtgggcaccaccatccagtacacctgcaaccctggctttgtgctggagggcagcagcctgctgacctgctacagccgggagaccggcacccccatctggaccagccggctgccccactgtgtgtctgaggagagcctggcctgtgacaaccctggcctgcctgaaaatggctaccagatcctgtacaagaggctgtacctgcctggagagagcctgaccttcatgtgctatgagggctttgagctgatgggagaggtgaccatccgctgcatcctgggccagcccagccactggaatggccccctgcctgtgtgcaaggtgaaccaggacagctttgaacatgccctggaggccgaggccgctgctgagaccagcctggagggcggcaacatggccctggccatcttcatccctgtgctgatcatcagcctgctgctgggcggggcctacatctacatcacccgctgccgctactacagcaacctgcggctgcccctgatgtacagccacccctacagccagatcaccgtggagacagaatttgacaaccccatctatgaaacaggagagacccgggagtatgaggtgtccatctag

SEQ ID NO: 169045 - DNA, 258 bp, synthetic construct
  misc_feature 1..258: note = Description of Artificial Sequence: Synthetic coding sequence
  source 1..258: mol_type = other DNA
ggcttcggcacagatgtggactatgaaacagccttcatccactaccgcctggccagcgagcagcagcacagcgcccaggccatgttcaacctgggctacatgcatgagaagggcctgggcatcaagcaggacatccacctggccaagcgcttctatgacatggccgccagccagccccgctgcaccagcagcagcctgcccagccccctgcagatcggccggcggctcttcctggccgtgcacacaggcaacaagtag

SEQ ID NO: 169046 - DNA, 2385 bp, synthetic construct
  misc_feature 1..2385: note = Description of Artificial Sequence: Synthetic coding sequence
  source 1..2385: mol_type = other DNA
atgagggtgagaattggcctgaccctgctgctgtgtgctgtgctgctgagcctggccagcgccagcagtgatgaggagggcagccaggatgagagcctggacagcaagaccaccctgaccagtgatgagagcgtgaaggaccacaccacagctggccgggtggtggccggccagatcttcctggacagcgaggagagcgagctggagagcagcatccaggaggaggaggacagcctgaagagccaggagggggagagcgtgacagaggacatctccttcctggagagccccaaccctgagaacaaggactatgaggagcccaagaaggtgaggaagccagccctgacagccatcgagggcacagcccatggagagccctgccacttccccttcctgttcctggacaaggagtatgatgagtgcaccagtgatggaagagaagatggccgcctgtggtgtgccaccacctatgactacaaggcagatgagaagtggggcttctgtgaaacagaggaggaggccgccaagaggcggcagatgcaggaggccgagatgatgtaccagacaggcatgaagatcctgaatggcagcaacaagaagagccagaagcgggaggcctaccgctacctgcagaaggccgcctccatgaaccacaccaaggccctggagcgggtgtcctatgccctgctgtttggagactacctgccccagaacatccaggccgcccgggagatgtttgagaagctgacagaggagggcagccccaagggccagacagccctgggcttcctgtatgccagcggcctgggcgtgaacagcagccaggccaaggccctggtgtactacaccttcggggccctgggcggcaacctgattgcccacatggtgctgggctaccgctactgggccggcattggagtgctgcagagctgtgagagcgccctgacccactaccgcctggtggccaaccacgtggccagtgacatcagcctgaccggcggctctgtggtgcagaggatccggctgcctgatgaggtggagaaccctggcatgaacagcggcatgctggaggaggacctgatccagtactaccagttcctggccgagaagggagatgtgcaggcccaggtgggcctgggccagctgcacctgcatggaggccggggcgtggagcagaaccaccagagggcctttgactacttcaacctggccgccaatgccggcaacagccacgccatggccttcctgggcaagatgtacagcgagggcagtgacatcgtgccccagagcaatgaaacagccctgcactacttcaagaaggctgctgacatgggcaaccctgtgggccagagcggcctgggcatggcctacctgtatggccggggcgtgcaggtgaactatgacctggccctgaagtacttccagaaggctgctgagcagggctgggtggatggccagctgcagctgggctccatgtactacaatggaattggagtgaagagggactacaagcaggccctgaagtacttcaacctggccagccagggcggccacatcctggccttctacaacctggcccagatgcacgccagcggcactggagtgatgaggagctgccacacagctgtggagctgttcaagaatgtgtgtgagcggggccgctggagcgagcggctgatgacagcctacaacagctacaaggatggagactacaatgctgctgtgatccagtacctgctgctggccgagcagggctatgaggtggcccagagcaatgctgccttcatcctggaccagcgggaggccagcatcgtgggagaaaatgagacctacccccgggccctgctgcactggaacagagctgccagccagggctacacagtggcccgcatcaagctgggggactaccacttctacggctttggaacagatgtggactatgaaacagccttcatccactaccgcctggccagcgagcagcagcacagcgcccaggccatgttcaacctgggctacatgcatgagaagggcctgggcatcaagcaggacatccacctggccaagcgcttctatgacatggctgctgaggccagcccagatgcccaggtgcctgtgttcctggccctgtgcaagctgggcgtggtgtacttcctgcagtacatccgggagaccaacatccgggacatgttcacccagctggacatggaccagctgctgggccctgagtgggacctgtacctgatgaccatcatcgccctgctgctgggcaccgtgattgcctaccggcagaggcagcaccaggacatgcctgccccccggcccccaggccccaggcctgccccaccccagcaggagggccccccagagcagcagcccccccagtag

SEQ ID NO: 169047 - DNA, 906 bp, synthetic construct
  misc_feature 1..906: note = Description of Artificial Sequence: Synthetic coding sequence
  source 1..906: mol_type = other DNA
atgagggtgagaattggcctgaccctgctgctgtgtgctgtgctgctgagcctggccagcgccagcagtgatgaggagggcagccaggatgagagcctggacagcaagaccaccctgaccagtgatgagagcgtgaaggaccacaccacagctggccgggtggtggccggccagatcttcctggacagcgaggagagcgagctggagagcagcatccaggaggaggaggacagcctgaagagccaggagggggagagcgtgacagaggacatctccttcctggagagccccaaccctgagaacaaggactatgaggagcccaagaaggtgaggaagccagccctgacagccatcgagggcacagcccatggagagccctgccacttccccttcctgttcctggacaaggagtatgatgagtgcaccagtgatggaagagaagatggccgcctgtggtgtgccaccacctatgactacaaggcagatgagaagtggggcttctgtgaaacagaggaggaggccgccaagaggcggcagatgcaggaggccgagatgatgtaccagacaggcatgaagatcctgaatggcagcaacaagaagagccagaagcgggaggcctaccgctacctgcagaaggccgcctccatgaaccacaccaaggccctggagcgggtgtcctatgccctgctgtttggagactacctgccccagaacatccaggccgcccgggagatgtttgagaagctgacagaggagggcagccccaagggccagacagccctgggcttcctgtatgccagcggcctgggcgtgaacagcagccaggccaaggccctggtgtactacaccttcggggccctgggcggcaacctgattgcccacatggtgctggtgtcccggctgtag

SEQ ID NO: 169048 - DNA, 2067 bp, synthetic construct
  misc_feature 1..2067: note = Description of Artificial Sequence: Synthetic coding sequence
  source 1..2067: mol_type = other DNA
atgaagcccctgagcctgctgattgagatcctgatcatcctgggcgtgaccatcaagaccatcaaggccgaggagcacaacaagaggcagaaggagagaaatgtgaccacccaggtgtctgtgaatgagatcaagcagtacctgagccacatcctggagcagaggaccagcagcaatgtcatcaacaagcgggagaacctgctggagaagaagaagaaccagaggaagatccgcatcaagggcatccagaacaaggacatcctgaagaggaacaagaaccacctgcagaagcaggccgagaagaacttcacagatgaaggagaccagctgttcaagatgggcatcaaggtgctgcagcagagcaagagccagaagcagaaggaggaggcctacctgctgtttgccaaggctgctgacatgggcaacctgaaggccatggagaagatggctgatgccctgctgtttggaaactttggagtgcagaacatcacagctgccatccagctgtatgagagcctggccaaggagggcagctgcaaggcccagaatgccctgggcttcctgagcagctatggaattggcatggagtatgaccaggccaaggccctgatctactacaccttcggcagcgctgggggcaacatgatgagccagatgatcctgggctaccgctacctgagcggcatcaacgtgctgcagaactgtgaggtggccctgagctactacaagaaggtggccgactacatcgctgacacctttgagaagtctgagggcgtgcctgtggagaaggtgcggctgacagagaggcctgagaacctgagcagcaacagcgagatcctggactgggacatctaccagtactacaagttcctggccgagagaggagatgtgcagatccaggtgtccctgggccagctgcacctgattggaaggaagggcctggaccaggactactacaaggccctgcactacttcctgaaggccgccaaggccggcagcgccaatgccatggccttcatcggcaagatgtacctggagggcaatgctgctgtgccccagaacaatgccacagccttcaagtacttctccatggccgccagcaaaggaaatgccatcggcctgcacggcctgggcctgctgtacttccatggaaaaggagtgcccctgaactatgcagaggccctgaagtacttccagaaggctgctgagaagggctggccagatgcccagttccagctgggcttcatgtactacagcggcagcggcatctggaaggactacaagctggccttcaagtacttctacctggccagccagagcggccagcccctggccatctactacctggccaagatgtatgccactggaactggagtggtgcgcagctgcaggacagctgtggagctgtacaagggcgtgtgtgagctgggccactgggccgagaagttcctgacagcctactttgcctacaaggatggagacatcgacagcagcctggtgcagtatgccctgctggccgagatgggctatgaggtggcccagagcaacagcgccttcatcctggagagcaagaaggccaacatcctggagaaggagaagatgtaccccatggccctgctgctgtggaacagagctgccatccagggcaatgcctttgcccgggtgaagattggagactaccactactacggctacggcaccaagaaggactaccagacagctgccacccactacagcattgctgccaacaagtaccacaatgcccaggccatgttcaacctggcctacatgtatgagcacggcctgggcatcaccaaggacatccacctggcccggcggctgtatgacatggccgcccagaccagcccagatgcccacatccctgtgctgtttgctgtgatgaagctggagaccacccacctgctgcgggacatcctcttcttcaacttcaccacccgctggaactggctgaagctggacaacaccatcggcccccactgggacctcttcgtcatcggcctgattgtgcccggcctcatcctgctgctgaggaaccaccacggctag

SEQ ID NO: 169049 - DNA, 1728 bp, synthetic construct
  misc_feature 1..1728: note = Description of Artificial Sequence: Synthetic coding sequence
  source 1..1728: mol_type = other DNA
atgaagcccctgagcctgctgattgagatcctgatcatcctgggcgtgaccatcaagaccatcaaggccgaggagcacaacaagaggcagaaggagagaaatgtgaccacccaggtgtctgtgaatgagatcaagcagtacctgagccacatcctggagcagaggaccagcagcaatgtcatcaacaagcgggagaacctgctggagaagaagaagaaccagaggaagatccgcatcaagggcatccagaacaaggacatcctgaagaggaacaagaaccacctgcagaagcaggccgagaagaacttcacagatgaaggagaccagctgttcaagatgggcatcaaggtgctgcagcagagcaagagccagaagcagaaggaggaggcctacctgctgtttgccaaggctgctgacatgggcaacctgaaggccatggagaagatggctgatgccctgctgtttggaaactttggagtgcagaacatcacagctgccatccagctgtatgagagcctggccaaggagggcagctgcaaggcccagaatgccctgggcttcctgagcagctatggaattggcatggagtatgaccaggccaaggccctgatctactacaccttcggcagcgctgggggcaacatgatgagccagatgatcctgggctaccgctacctgagcggcatcaacgtgctgcagaactgtgaggtggccctgagctactacaagaaggtggccgactacatcgctgacacctttgagaagtctgagggcgtgcctgtggagaaggtgcggctgacagagaggcctgagaacctgagcagcaacagcgagatcctggactgggacatctaccagtactacaagttcctggccgagagaggagatgtgcagatccaggtgtccctgggccagctgcacctgattggaaggaagggcctggaccaggactactacaaggccctgcactacttcctgaaggccgccaaggccggcagcgccaatgccatggccttcatcggcaagatgtacctggagggcaatgctgctgtgccccagaacaatgccacagccttcaagtacttctccatggccgccagcaaaggaaatgccatcggcctgcacggcctgggcctgctgtacttccatggaaaaggagtgcccctgaactatgcagaggccctgaagtacttccagaaggctgctgagaagggctggccagatgcccagttccagctgggcttcatgtactacagcggcagcggcatctggaaggactacaagctggccttcaagtacttctacctggccagccagagcggccagcccctggccatctactacctggccaagatgtatgccactggaactggagtggtgcgcagctgcaggacagctgtggagaagaggctgaccttcctgaagaagaggcgctgcatccagtggaggttctcctatggcatcgagctgcccttcaaggacatccacctggcccggcggctgtatgacatggccgcccagaccagcccagatgcccacatccctgtgctgtttgctgtgatgaagctggagaccacccacctgctgcgggacatcctcttcttcaacttcaccacccgctggaactggctgaagctggacaacaccatcggcccccactgggacctgtttgtgattggcctcatcgtgcccggcctcatcctgctgctgaggaaccaccacggctag

SEQ ID NO: 169050 - DNA, 1833 bp, synthetic construct
  misc_feature 1..1833: note = Description of Artificial Sequence: Synthetic coding sequence
  source 1..1833: mol_type = other DNA
atgattgccagccagttcctgagcgccctgaccctggtgctgctgatcaaggagagcggggcctggagctacaacaccagcacagaggccatgacctatgatgaggccagcgcctactgccagcagcgctacacccacctggtggccatccagaacaaggaggagattgagtacctgaacagcatcctgagctacagccccagctactactggattggcatcaggaaggtgaacaacgtgtgggtgtgggtgggcacccagaagcccctgacagaggaggccaagaactgggcccctggagagcccaacaaccggcagaaggatgaggactgtgtggagatctacatcaagcgggagaaggatgtgggcatgtggaatgatgagcgctgcagcaagaagaagctggccctgtgctacacagctgcctgcaccaacaccagctgcagcggccatggagaatgtgtggagaccatcaacaactacacctgcaagtgtgaccccggcttcagcggcctgaagtgtgagcagatcgtgaactgcacagccctggagagccctgagcacggcagcctggtgtgcagccaccccctgggcaacttctcctacaacagcagctgcagcatcagctgtgaccggggctacctgcccagctccatggagaccatgcagtgcatgagcagtggagagtggagcgcccccatcccagcctgcaatgtggtggagtgtgatgctgtgaccaacccagccaacggctttgtggagtgcttccagaaccctggcagcttcccctggaacaccacctgcacctttgactgtgaggagggctttgagctgatgggcgcccagagcctgcagtgcaccagcagcggcaactgggacaatgagaagcccacctgcaaggctgtgacctgcagagctgtgcggcagccccagaatggatctgtgcgctgcagccacagccctgctggggagttcaccttcaagagcagctgcaacttcacctgtgaggagggcttcatgctgcagggccctgcccaggtggagtgcaccacccagggccagtggacccagcagatccctgtgtgtgaggccttccagtgcacagccctgagcaaccctgagcggggctacatgaactgcctgcccagcgccagcggcagcttccgctatggcagcagctgtgagttcagctgtgagcagggctttgtgctgaagggcagcaagaggctgcagtgtggccccactggagagtgggacaatgagaagcccacctgtgaggccgtgcgctgtgatgctgtgcaccagccccccaagggcctggtgcgctgtgcccacagccccatcggggagttcacctacaagagcagctgtgccttcagctgtgaggagggctttgagctgcacggcagcacccagctggagtgcaccagccagggccagtggacagaggaggtgcccagctgccaggtggtgaagtgcagcagcctggccgtgcctgggaagatcaacatgagctgcagcggggagcctgtgtttggcaccgtgtgcaagtttgcctgcccagagggctggaccctgaatggatctgctgcccggacctgtggggccaccggccactggagcggcctgctgcccacctgtgaggcccccacagagagcaacatccccctggtggccggcctgtctgctgctggcctgagcctgctgaccctggcccccttcctgctgtggctgaggaagtgcctgaggaaggccaagaagtttgtgcctgccagcagctgccagagcctggagagtgatggcagctaccagaagcccagctacatcctgtag

SEQ ID NO: 169051 - DNA, 1455 bp, synthetic construct
  misc_feature 1..1455: note = Description of Artificial Sequence: Synthetic coding sequence
  source 1..1455: mol_type = other DNA
atgattgccagccagttcctgagcgccctgaccctggtgctgctgatcaaggagagcggggcctggagctacaacaccagcacagaggccatgacctatgatgaggccagcgcctactgccagcagcgctacacccacctggtggccatccagaacaaggaggagattgagtacctgaacagcatcctgagctacagccccagctactactggattggcatcaggaaggtgaacaacgtgtgggtgtgggtgggcacccagaagcccctgacagaggaggccaagaactgggcccctggagagcccaacaaccggcagaaggatgaggactgtgtggagatctacatcaagcgggagaaggatgtgggcatgtggaatgatgagcgctgcagcaagaagaagctggccctgtgctacacagctgcctgcaccaacaccagctgcagcggccatggagaatgtgtggagaccatcaacaactacacctgcaagtgtgaccccggcttcagcggcctgaagtgtgagcagatcgtgaactgcacagccctggagagccctgagcacggcagcctggtgtgcagccaccccctgggcaacttctcctacaacagcagctgcagcatcagctgtgaccggggctacctgcccagctccatggagaccatgcagtgcatgagcagtggagagtggagcgcccccatcccagcctgcaatgtggtggagtgtgatgctgtgaccaacccagccaacggctttgtggagtgcttccagaaccctggcagcttcccctggaacaccacctgcacctttgactgtgaggagggctttgagctgatgggcgcccagagcctgcagtgcaccagcagcggcaactgggacaatgagaagcccacctgcaaggctgtgacctgcagagctgtgcggcagccccagaatggatctgtgcgctgcagccacagccctgctggggagttcaccttcaagagcagctgcaacttcacctgtgaggagggcttcatgctgcagggccctgcccaggtggagtgcaccacccagggccagtggacccagcagatccctgtgtgtgaggtggtgaagtgcagcagcctggccgtgcctgggaagatcaacatgagctgcagcggggagcctgtgtttggcaccgtgtgcaagtttgcctgcccagagggctggaccctgaatggatctgctgcccggacctgtggggccaccggccactggagcggcctgctgcccacctgtgaggcccccacagagagcaacatccccctggtggccggcctgtctgctgctggcctgagcctgctgaccctggcccccttcctgctgtggctgaggaagtgcctgaggaaggccaagaagtttgtgcctgccagcagctgccagagcctggagagtgatggcagctaccagaagcccagctacatcctgtag

SEQ ID NO: 169052 - DNA, 1458 bp, synthetic construct
  misc_feature 1..1458: note = Description of Artificial Sequence: Synthetic coding sequence
  source 1..1458: mol_type = other DNA
atgattgccagccagttcctgagcgccctgaccctggtgctgctgatcaaggagagcggggcctggagctacaacaccagcacagaggccatgacctatgatgaggccagcgcctactgccagcagcgctacacccacctggtggccatccagaacaaggaggagattgagtacctgaacagcatcctgagctacagccccagctactactggattggcatcaggaaggtgaacaacgtgtgggtgtgggtgggcacccagaagcccctgacagaggaggccaagaactgggcccctggagagcccaacaaccggcagaaggatgaggactgtgtggagatctacatcaagcgggagaaggatgtgggcatgtggaatgatgagcgctgcagcaagaagaagctggccctgtgctacacagctgcctgcaccaacaccagctgcagcggccatggagaatgtgtggagaccatcaacaactacacctgcaagtgtgaccccggcttcagcggcctgaagtgtgagcagatggtggagtgtgatgctgtgaccaacccagccaacggctttgtggagtgcttccagaaccctggcagcttcccctggaacaccacctgcacctttgactgtgaggagggctttgagctgatgggcgcccagagcctgcagtgcaccagcagcggcaactgggacaatgagaagcccacctgcaaggctgtgacctgcagagctgtgcggcagccccagaatggatctgtgcgctgcagccacagccctgctggggagttcaccttcaagagcagctgcaacttcacctgtgaggagggcttcatgctgcagggccctgcccaggtggagtgcaccacccagggccagtggacccagcagatccctgtgtgtgaggccgtgcgctgtgatgctgtgcaccagccccccaagggcctggtgcgctgtgcccacagccccatcggggagttcacctacaagagcagctgtgccttcagctgtgaggagggctttgagctgcacggcagcacccagctggagtgcaccagccagggccagtggacagaggaggtgcccagctgccaggtggtgaagtgcagcagcctggccgtgcctgggaagatcaacatgagctgcagcggggagcctgtgtttggaacagtgtgcaagtttgcctgcccagagggctggaccctgaatggcagcgctgcccggacctgtggggccaccggccactggagcggcctgctgcccacctgtgaggcccccacagagagcaacatccccctggtggccggcctgtctgctgctggcctgagcctgctgaccctggcccccttcctgctgtggctgaggaagtgcctgaggaaggccaagaagtttgtgcctgccagcagctgccagagcctggagagtgatggcagctaccagaagcccagctacatcctgtag

SEQ ID NO: 169053 - DNA, 1644 bp, synthetic construct
  misc_feature 1..1644: note = Description of Artificial Sequence: Synthetic coding sequence
  source 1..1644: mol_type = other DNA
atgattgccagccagttcctgagcgccctgaccctggtgctgctgatcaaggagagcggggcctggagctacaacaccagcacagaggccatgacctatgatgaggccagcgcctactgccagcagcgctacacccacctggtggccatccagaacaaggaggagattgagtacctgaacagcatcctgagctacagccccagctactactggattggcatcaggaaggtgaacaacgtgtgggtgtgggtgggcacccagaagcccctgacagaggaggccaagaactgggcccctggagagcccaacaaccggcagaaggatgaggactgtgtggagatctacatcaagcgggagaaggatgtgggcatgtggaatgatgagcgctgcagcaagaagaagctggccctgtgctacacagctgcctgcaccaacaccagctgcagcggccatggagaatgtgtggagaccatcaacaactacacctgcaagtgtgaccccggcttcagcggcctgaagtgtgagcagatcgtgaactgcacagccctggagagccctgagcacggcagcctggtgtgcagccaccccctgggcaacttctcctacaacagcagctgcagcatcagctgtgaccggggctacctgcccagctccatggagaccatgcagtgcatgagcagtggagagtggagcgcccccatcccagcctgcaatgtggtggagtgtgatgctgtgaccaacccagccaacggctttgtggagtgcttccagaaccctggcagcttcccctggaacaccacctgcacctttgactgtgaggagggctttgagctgatgggcgcccagagcctgcagtgcaccagcagcggcaactgggacaatgagaagcccacctgcaaggctgtgacctgcagagctgtgcggcagccccagaatggatctgtgcgctgcagccacagccctgctggggagttcaccttcaagagcagctgcaacttcacctgtgaggagggcttcatgctgcagggccctgcccaggtggagtgcaccacccagggccagtggacccagcagatccctgtgtgtgaggccgtgcgctgtgatgctgtgcaccagccccccaagggcctggtgcgctgtgcccacagccccatcggggagttcacctacaagagcagctgtgccttcagctgtgaggagggctttgagctgcacggcagcacccagctggagtgcaccagccagggccagtggacagaggaggtgcccagctgccaggtggtgaagtgcagcagcctggccgtgcctgggaagatcaacatgagctgcagcggggagcctgtgtttggaacagtgtgcaagtttgcctgcccagagggctggaccctgaatggcagcgctgcccggacctgtggggccaccggccactggagcggcctgctgcccacctgtgaggcccccacagagagcaacatccccctggtggccggcctgtctgctgctggcctgagcctgctgaccctggcccccttcctgctgtggctgaggaagtgcctgaggaaggccaagaagtttgtgcctgccagcagctgccagagcctggagagtgatggcagctaccagaagcccagctacatcctgtag

SEQ ID NO: 169054 - DNA, 1644 bp, synthetic construct
  misc_feature 1..1644: note = Description of Artificial Sequence: Synthetic coding sequence
  source 1..1644: mol_type = other DNA
atgattgccagccagttcctgagcgccctgaccctggtgctgctgatcaaggagagcggggcctggagctacaacaccagcacagaggccatgacctatgatgaggccagcgcctactgccagcagcgctacacccacctggtggccatccagaacaaggaggagattgagtacctgaacagcatcctgagctacagccccagctactactggattggcatcaggaaggtgaacaacgtgtgggtgtgggtgggcacccagaagcccctgacagaggaggccaagaactgggcccctggagagcccaacaaccggcagaaggatgaggactgtgtggagatctacatcaagcgggagaaggatgtgggcatgtggaatgatgagcgctgcagcaagaagaagctggccctgtgctacacagctgcctgcaccaacaccagctgcagcggccatggagaatgtgtggagaccatcaacaactacacctgcaagtgtgaccccggcttcagcggcctgaagtgtgagcagatcgtgaactgcacagccctggagagccctgagcacggcagcctggtgtgcagccaccccctgggcaacttctcctacaacagcagctgcagcatcagctgtgaccggggctacctgcccagctccatggagaccatgcagtgcatgagcagtggagagtggagcgcccccatcccagcctgcaatgtggtggagtgtgatgctgtgaccaacccagccaacggctttgtggagtgcttccagaaccctggcagcttcccctggaacaccacctgcacctttgactgtgaggagggctttgagctgatgggcgcccagagcctgcagtgcaccagcagcggcaactgggacaatgagaagcccacctgcaaggctgtgacctgcagagctgtgcggcagccccagaatggatctgtgcgctgcagccacagccctgctggggagttcaccttcaagagcagctgcaacttcacctgtgaggagggcttcatgctgcagggccctgcccaggtggagtgcaccacccagggccagtggacccagcagatccctgtgtgtgaggccttccagtgcacagccctgagcaaccctgagcggggctacatgaactgcctgcccagcgccagcggcagcttccgctatggcagcagctgtgagttcagctgtgagcagggctttgtgctgaagggcagcaagaggctgcagtgtggccccactggagagtgggacaatgagaagcccacctgtgaggtggtgaagtgcagcagcctggccgtgcctgggaagatcaacatgagctgcagcggggagcctgtgtttggaacagtgtgcaagtttgcctgcccagagggctggaccctgaatggcagcgctgcccggacctgtggggccaccggccactggagcggcctgctgcccacctgtgaggcccccacagagagcaacatccccctggtggccggcctgtctgctgctggcctgagcctgctgaccctggcccccttcctgctgtggctgaggaagtgcctgaggaaggccaagaagtttgtgcctgccagcagctgccagagcctggagagtgatggcagctaccagaagcccagctacatcctgtag

SEQ ID NO: 169055 - DNA, 1455 bp, synthetic construct; identical to SEQ ID NO: 169051
  misc_feature 1..1455: note = Description of Artificial Sequence: Synthetic coding sequence
  source 1..1455: mol_type = other DNA

SEQ ID NO: 169056 - DNA, 1458 bp, synthetic construct; identical to SEQ ID NO: 169052
  misc_feature 1..1458: note = Description of Artificial Sequence: Synthetic coding sequence
  source 1..1458: mol_type = other DNA

SEQ ID NO: 169057 - DNA, 1644 bp, synthetic construct; identical to SEQ ID NO: 169053
  misc_feature 1..1644: note = Description of Artificial Sequence: Synthetic coding sequence
  source 1..1644: mol_type = other DNA

SEQ ID NO: 169058 - DNA, 1644 bp, synthetic construct; identical to SEQ ID NO: 169054
  misc_feature 1..1644: note = Description of Artificial Sequence: Synthetic coding sequence
  source 1..1644: mol_type = other DNA

SEQ ID NO: 169059 - DNA, 1158 bp, synthetic construct
  misc_feature 1..1158: note = Description of Artificial Sequence: Synthetic coding sequence
  source 1..1158: mol_type = other DNA
atgggctgcaggaggacccgggagggccccagcaaggccatgatcttcccctggaagtgccagagcacccagagggacctgtggaacatcttcaagctgtggggctggaccatgctgtgctgtgacttcctggcccaccacggcacagactgctggacctaccactacagcgagaagcccatgaactggcagagggcccggcgcttctgccgggacaactacacagacctggtggccatccagaacaaggccgagattgagtacctggagaagaccctgcccttcagccgcagctactactggattggcatcaggaagattggaggcatctggacctgggtgggcaccaacaagagcctgacagaggaggccgagaactggggagatggagagcccaacaacaagaagaacaaggaggactgtgtggagatctacatcaagaggaacaaggatgctgggaagtggaatgatgatgcctgccacaagctgaaggccgccctgtgctacacagccagctgccagccctggagctgcagcggccatggagaatgtgtggagatcatcaacaactacacctgcaactgtgatgtgggctactacggcccccagtgccagtttgtgatccagtgtgagcccctggaggcccctgagctgggcaccatggactgcacccaccccctgggcaacttctccttcagcagccagtgtgccttcagctgcagcgagggcaccaacctgactggaattgaggagaccacctgtggcccctttggaaactggagcagccctgagcccacctgccaggtgatccagtgtgagcccctgagcgccccagacctgggcatcatgaactgcagccaccccctggccagcttctccttcaccagcgcctgcaccttcatctgcagcgagggcacagagctgattggcaagaagaagaccatctgtgagagcagcggcatctggagcaaccccagccccatctgccagaagctggacaagagcttctccatgatcaaggagggggactacaaccccctcttcatccctgtggccgtgatggtgacagccttcagcggcctggccttcatcatctggctggcccggcggctgaagaagggcaagaagagcaagaggtccatgaatgacccctactag

SEQ ID NO: 169060 - DNA, 2493 bp, synthetic construct
  misc_feature 1..2493: note = Description of Artificial Sequence: Synthetic coding sequence
  source 1..2493: mol_type = other DNA
atggccaactgccagatcgccatcctgtaccagcgcttccagagggtggtgtttggcatcagccagctgctgtgcttcagcgccctgatcagcgagctgaccaaccagaaggaggtggccgcctggacctaccactacagcaccaaggcctacagctggaacatcagcaggaagtactgccagaaccgctacacagacctggtggccatccagaacaagaatgaaattgactacctgaacaaggtgctgccctactacagcagctactactggattggcatcaggaagaacaacaagacctggacctgggtgggcaccaagaaggccctgaccaatgaagctgagaactgggccgacaatgagcccaacaacaagaggaacaatgaagactgtgtggagatctacatcaagagccccagcgcccctgggaagtggaatgatgagcactgcctgaagaagaagcacgccctgtgctacacagccagctgccaggacatgagctgcagcaagcagggagaatgtctggagaccatcggcaactacacctgcagctgctacccaggcttctacggcccagaatgtgaatatgtgagagaatgtggggagctggagctgccccagcacgtgctgatgaactgcagccaccccctgggcaacttctccttcaacagccagtgcagcttccactgcacagatggctaccaggtgaatggccccagcaagctggagtgcctggccagcggcatctggaccaacaagccaccccagtgcctggccgcccagtgcccccccctgaagatccctgagcggggcaacatgacctgcctgcacagcgccaaggccttccagcaccagagcagctgcagcttcagctgtgaggagggctttgccctggtgggccctgaggtggtgcagtgcacagccagcggcgtgtggacagccccagcccctgtgtgcaaggctgtgcagtgccagcacctggaggcccccagcgagggcaccatggactgtgtgcaccccctgacagcctttgcctacggcagcagctgcaagtttgagtgccagcccggctacagagtgcggggcctggacatgctgcgctgcattgattctggccactggagcgcccccctgcccacctgtgaggccatcagctgtgagcccctggagagccctgtgcacggctccatggactgcagccccagcctgcgggccttccagtatgacaccaactgcagcttccgctgtgccgagggcttcatgctgcggggagctgacatcgtgcgctgtgacaacctgggccagtggacagccccagcccctgtgtgccaggccctgcagtgccaggacctgcctgtgcccaatgaggcccgggtgaactgcagccacccctttggagccttccgctaccagagcgtgtgcagcttcacctgcaatgaaggcctgctgctggtgggcgcctctgtgctgcagtgcctggccactggaaactggaacagcgtgcccccagagtgccaggccatcccctgcacccccctgctgagcccccagaatggcaccatgacctgtgtgcagcccctgggcagcagcagctacaagagcacctgccagttcatctgtgatgagggctacagcctgagcggccctgagcggctggactgcaccaggagcggccgctggacagacagcccccccatgtgtgaggccatcaagtgcccagagctgtttgcccctgagcagggcagcctggactgcagcgacaccagaggagagttcaacgtgggcagcacctgccacttcagctgtgacaatggcttcaagctggagggccccaacaacgtggagtgcaccaccagcggccgctggagcgccaccccacccacctgcaagggcatcgccagcctgcccaccccaggagtgcagtgcccagccctgaccaccccaggccagggcaccatgtactgccgccaccaccctggcaccttcggcttcaacaccacctgctacttcggctgcaatgccggcttcaccctgattggagacagcaccctgagctgccggcccagcggccagtggacagctgtgaccccagcctgcagagctgtgaagtgcagcgagctgcacgtgaacaagcccatcgccatgaactgcagcaacctgtggggcaacttctcctatggcagcatctgcagcttccactgcctggagggccagctgctgaatggaagtgcccagacagcctgccaggagaatggccactggagcaccaccgtgcccacctgccaggccggccccctgaccatccaggaggccctgacctactttggaggagctgtggccagcaccatcggcctcatcatgggcggcaccctgctggccctgctgaggaagcgcttccggcagaaggatgatggcaagtgccccctgaacccccacagccacctgggcacctacggcgtcttcaccaatgctgcctttgaccccagcccctag

SEQ ID NO: 169061 - DNA, 2307 bp, synthetic construct
  misc_feature 1..2307: note = Description of Artificial Sequence: Synthetic coding sequence
  source 1..2307: mol_type = other DNA
atggccaactgccagatcgccatcctgtaccagcgcttccagagggtggtgtttggcatcagccagctgctgtgcttcagcgccctgatcagcgagctgaccaaccagaaggaggtggccgcctggacctaccactacagcaccaaggcctacagctggaacatcagcaggaagtactgccagaaccgctacacagacctggtggccatccagaacaagaatgaaattgactacctgaacaaggtgctgccctactacagcagctactactggattggcatcaggaagaacaacaagacctggacctgggtgggcaccaagaaggccctgaccaatgaagctgagaactgggccgacaatgagcccaacaacaagaggaacaatgaagactgtgtggagatctacatcaagagccccagcgcccctgggaagtggaatgatgagcactgcctgaagaagaagcacgccctgtgctacacagccagctgccaggacatgagctgcagcaagcagggagaatgtctggagaccatcggcaactacacctgcagctgctacccaggcttctacggcccagaatgtgaatatgtgagagaatgtggggagctggagctgccccagcacgtgctgatgaactgcagccaccccctgggcaacttctccttcaacagccagtgcagcttccactgcacagatggctaccaggtgaatggccccagcaagctggagtgcctggccagcggcatctggaccaacaagccaccccagtgcctggccgcccagtgcccccccctgaagatccctgagcggggcaacatgacctgcctgcacagcgccaaggccttccagcaccagagcagctgcagcttcagctgtgaggagggctttgccctggtgggccctgaggtggtgcagtgcacagccagcggcgtgtggacagccccagcccctgtgtgcaaggccatcagctgtgagcccctggagagccctgtgcacggctccatggactgcagccccagcctgcgggccttccagtatgacaccaactgcagcttccgctgtgccgagggcttcatgctgcggggagctgacatcgtgcgctgtgacaacctgggccagtggacagccccagcccctgtgtgccaggccctgcagtgccaggacctgcctgtgcccaatgaggcccgggtgaactgcagccacccctttggagccttccgctaccagagcgtgtgcagcttcacctgcaatgaaggcctgctgctggtgggcgcctctgtgctgcagtgcctggccactggaaactggaacagcgtgcccccagagtgccaggccatcccctgcacccccctgctgagcccccagaatggcaccatgacctgtgtgcagcccctgggcagcagcagctacaagagcacctgccagttcatctgtgatgagggctacagcctgagcggccctgagcggctggactgcaccaggagcggccgctggacagacagcccccccatgtgtgaggccatcaagtgcccagagctgtttgcccctgagcagggcagcctggactgcagcgacaccagaggagagttcaacgtgggcagcacctgccacttcagctgtgacaatggcttcaagctggagggccccaacaacgtggagtgcaccaccagcggccgctggagcgccaccccacccacctgcaagggcatcgccagcctgcccaccccaggagtgcagtgcccagccctgaccaccccaggccagggcaccatgtactgccgccaccaccctggcaccttcggcttcaacaccacctgctacttcggctgcaatgccggcttcaccctgattggagacagcaccctgagctgccggcccagcggccagtggacagctgtgaccccagcctgcagagctgtgaagtgcagcgagctgcacgtgaacaagcccatcgccatgaactgcagcaacctgtggggcaacttctcctatggcagcatctgcagcttccactgcctggagggccagctgctgaatggaagtgcccagacagcctgccaggagaatggccactggagcaccaccgtgcccacctgccaggccggccccctgaccatccaggaggccctgacctactttggaggagctgtggccagcaccatcggcctcatcatgggcggcaccctgctggccctgctgaggaagcgcttccggcagaaggatgatggcaagtgccccctgaacccccacagccacctgggcacctacggcgtcttcaccaatgctgcctttgaccccagcccctag

SEQ ID NO: 169062 - DNA, 2307 bp, synthetic construct
  misc_feature 1..2307: note = Description of Artificial Sequence: Synthetic coding sequence
  source 1..2307: mol_type = other DNA
atggccaactgccagatcgccatcctgtaccagcgcttccagagggtggtgtttggcatcagccagctgctgtgcttcagcgccctgatcagcgagctgaccaaccagaaggaggtggccgcctggacctaccactacagcaccaaggcctacagctggaacatcagcaggaagtactgccagaaccgctacacagacctggtggccatccagaacaagaatgaaattgactacctgaacaaggtgctgccctactacagcagctactactggattggcatcaggaagaacaacaagacctggacctgggtgggcaccaagaaggccctgaccaatgaagctgagaactgggccgacaatgagcccaacaacaagaggaacaatgaagactgtgtggagatctacatcaagagccccagcgcccctgggaagtggaatgatgagcactgcctgaagaagaagcacgccctgtgctacacagccagctgccaggacatgagctgcagcaagcagggagaatgtctggagaccatcggcaactacacctgcagctgctacccaggcttctacggcccagaatgtgaatatgtgagagaatgtggggagctggagctgccccagcacgtgctgatgaactgcagccaccccctgggcaacttctccttcaacagccagtgcagcttccactgcacagatggctaccaggtgaatggccccagcaagctggagtgcctggccagcggcatctggaccaacaagccaccccagtgcctggccgtgcagtgccagcacctggaggcccccagcgagggcaccatggactgtgtgcaccccctgacagcctttgcctacggcagcagctgcaagtttgagtgccagcccggctacagagtgcggggcctggacatgctgcgctgcattgattctggccactggagcgcccccctgcccacctgtgaggccatcagctgtgagcccctggagagccctgtgcacggctccatggactgcagccccagcctgcgggccttccagtatgacaccaactgcagcttccgctgtgccgagggcttcatgctgcggggagctgacatcgtgcgctgtgacaacctgggccagtggacagccccagcccctgtgtgccaggccctgcagtgccaggacctgcctgtgcccaatgaggcccgggtgaactgcagccacccctttggagccttccgctaccagagcgtgtgcagcttcacctgcaatgaaggcctgctgctggtgggcgcctctgtgctgcagtgcctggccactggaaactggaacagcgtgcccccagagtgccaggccatcccctgcacccccctgctgagcccccagaatggcaccatgacctgtgtgcagcccctgggcagcagcagctacaagagcacctgccagttcatctgtgatgagggctacagcctgagcggccctgagcggctggactgcaccaggagcggccgctggacagacagcccccccatgtgtgaggccatcaagtgcccagagctgtttgcccctgagcagggcagcctggactgcagcgacaccagaggagagttcaacgtgggcagcacctgccacttcagctgtgacaatggcttcaagctggagggccccaacaacgtggagtgcaccaccagcggccgctggagcgccaccccacccacctgcaagggcatcgccagcctgcccaccccaggagtgcagtgcccagccctgaccaccccaggccagggcaccatgtactgccgccaccaccctggcaccttcggcttcaacaccacctgctacttcggctgcaatgccggcttcaccctgattggagacagcaccctgagctgccggcccagcggccagtggacagctgtgaccccagcctgcagagctgtgaagtgcagcgagctgcacgtgaacaagcccatcgccatgaactgcagcaacctgtggggcaacttctcctatggcagcatctgcagcttccactgcctggagggccagctgctgaatggaagtgcccagacagcctgccaggagaatggccactggagcaccaccgtgcccacctgccaggccggccccctgaccatccaggaggccctgacctactttggaggagctgtggccagcaccatcggcctcatcatgggcggcaccctgctggccctgctgaggaagcgcttccggcagaaggatgatggcaagtgccccctgaacccccacagccacctgggcacctacggcgtcttcaccaatgctgcctttgaccccagcccctag

SEQ ID NO: 169063 - DNA, 1941 bp, synthetic construct
  misc_feature 1..1941: note = Description of Artificial Sequence: Synthetic coding sequence
  source 1..1941: mol_type = other DNA
atggccaactgccagatcgccatcctgtaccagcgcttccagagggtggtgtttggcatcagccagctgctgtgcttcagcgccctgatcagcgagctgaccaaccagaaggaggtggccgcctggacctaccactacagcaccaaggcctacagctggaacatcagcaggaagtactgccagaaccgctacacagacctggtggccatccagaacaagaatgaaattgactacctgaacaaggtgctgccctactacagcagctactactggattggcatcaggaagaacaacaagacctggacctgggtgggcaccaagaaggccctgaccaatgaagctgagaactgggccgacaatgagcccaacaacaagaggaacaatgaagactgtgtggagatctacatcaagagccccagcgcccctgggaagtggaatgatgagcactgcctgaagaagaagcacgccctgtgctacacagccagctgccaggacatgagctgcagcaagcagggagaatgtctggagaccatcggcaactacacctgcagctgctacccaggcttctacggcccagaatgtgaatatgtgagagaatgtggggagctggagctgccccagcacgtgctgatgaactgcagccaccccctgggcaacttctccttcaacagccagtgcagcttccactgcacagatggctaccaggtgaatggccccagcaagctggagtgcctggccagcggcatctggaccaacaagccaccccagtgcctggccgcccagtgcccccccctgaagatccctgagcggggcaacatgacctgcctgcacagcgccaaggccttccagcaccagagcagctgcagcttcagctgtgaggagggctttgccctggtgggccctgaggtggtgcagtgcacagccagcggcgtgtggacagccccagcccctgtgtgcaaggccatcagctgtgagcccctggagagccctgtgcacggctccatggactgcagccccagcctgcgggccttccagtatgacaccaactgcagcttccgctgtgccgagggcttcatgctgcggggagctgacatcgtgcgctgtgacaacctgggccagtggacagccccagcccctgtgtgccaggccctgcagtgccaggacctgcctgtgcccaatgaggcccgggtgaactgcagccacccctttggagccttccgctaccagagcgtgtgcagcttcacctgcaatgaaggcctgctgctggtgggcgcctctgtgctgcagtgcctggccactggaaactggaacagcgtgcccccagagtgccagggcaagagcatcgccagcctgcccaccccaggagtgcagtgcccagccctgaccaccccaggccagggcaccatgtactgccgccaccaccctggcaccttcggcttcaacaccacctgctacttcggctgcaatgccggcttcaccctgattggagacagcaccctgagctgccggcccagcggccagtggacagctgtgaccccagcctgcagagctgtgaagtgcagcgagctgcacgtgaacaagcccatcgccatgaactgcagcaacctgtggggcaacttctcctatggcagcatctgcagcttccactgcctggagggccagctgctgaatggaagtgcccagacagcctgccaggagaatggccactggagcaccaccgtgcccacctgccaggccggccccctgaccatccaggaggccctgacctactttggaggagctgtggccagcaccatcggcctcatcatgggcggcaccctgctggccctgctgaggaagcgcttccggcagaaggatgatggcaagtgccccctgaacccccacagccacctgggcacctacggcgtcttcaccaatgctgcctttgaccccagcccctag

SEQ ID NO: 169064 - DNA, 2493 bp, synthetic construct; identical to SEQ ID NO: 169060
  misc_feature 1..2493: note = Description of Artificial Sequence: Synthetic coding sequence
  source 1..2493: mol_type = other DNA

SEQ ID NO: 169065 - DNA, 1935 bp, synthetic construct
  misc_feature 1..1935: note = Description of Artificial Sequence: Synthetic coding sequence
  source 1..1935: mol_type = other DNA
atggccaactgccagatcgccatcctgtaccagcgcttccagagggtggtgtttggcatcagccagctgctgtgcttcagcgccctgatcagcgagctgaccaaccagaaggaggtggccgcctggacctaccactacagcaccaaggcctacagctggaacatcagcaggaagtactgccagaaccgctacacagacctggtggccatccagaacaagaatgaaattgactacctgaacaaggtgctgccctactacagcagctactactggattggcatcaggaagaacaacaagacctggacctgggtgggcaccaagaaggccctgaccaatgaagctgagaactgggccgacaatgagcccaacaacaagaggaacaatgaagactgtgtggagatctacatcaagagccccagcgcccctgggaagtggaatgatgagcactgcctgaagaagaagcacgccctgtgctacacagccagctgccaggacatgagctgcagcaagcagggagaatgtctggagaccatcggcaactacacctgcagctgctacccaggcttctacggcccagaatgtgaatatgtgagagaatgtggggagctggagctgccccagcacgtgctgatgaactgcagccaccccctgggcaacttctccttcaacagccagtgcagcttccactgcacagatggctaccaggtgaatggccccagcaagctggagtgcctggccagcggcatctggaccaacaagccaccccagtgcctggccgcccagtgcccccccctgaagatccctgagcggggcaacatgacctgcctgcacagcgccaaggccttccagcaccagagcagctgcagcttcagctgtgaggagggctttgccctggtgggccctgaggtggtgcagtgcacagccagcggcgtgtggacagccccagcccctgtgtgcaaggccctgcagtgccaggacctgcctgtgcccaatgaggcccgggtgaactgcagccacccctttggagccttccgctaccagagcgtgtgcagcttcacctgcaatgaaggcctgctgctggtgggcgcctctgtgctgcagtgcctggccactggaaactggaacagcgtgcccccagagtgccaggccatcccctgcacccccctgctgagcccccagaatggcaccatgacctgtgtgcagcccctgggcagcagcagctacaagagcacctgccagttcatctgtgatgagggctacagcctgagcggccctgagcggctggactgcaccaggagcggccgctggacagacagcccccccatgtgtgagggcatcgccagcctgcccaccccaggagtgcagtgcccagccctgaccaccccaggccagggcaccatgtactgccgccaccaccctggcaccttcggcttcaacaccacctgctacttcggctgcaatgccggcttcaccctgattggagacagcaccctgagctgccggcccagcggccagtggacagctgtgaccccagcctgcagagctgtgaagtgcagcgagctgcacgtgaacaagcccatcgccatgaactgcagcaacctgtggggcaacttctcctatggcagcatctgcagcttccactgcctggagggccagctgctgaatggaagtgcccagacagcctgccaggagaatggccactggagcaccaccgtgcccacctgccaggccggccccctgaccatccaggaggccctgacctactttggaggagctgtggccagcaccatcggcctcatcatgggcggcaccctgctggccctgctgaggaagcgcttccggcagaaggatgatggcaagtgccccctgaacccccacagccacctgggcacctacggcgtcttcaccaatgctgcctttgaccccagcccctag

SEQ ID NO: 169066 - DNA, 1941 bp, synthetic construct; identical to SEQ ID NO: 169063
  misc_feature 1..1941: note = Description of Artificial Sequence: Synthetic coding sequence
  source 1..1941: mol_type = other DNA

SEQ ID NO: 169067 - DNA, 2307 bp, synthetic construct; identical to SEQ ID NO: 169062
  misc_feature 1..2307: note = Description of Artificial Sequence: Synthetic coding sequence
  source 1..2307: mol_type = other DNA

SEQ ID NO: 169068 - DNA, 2307 bp, synthetic construct; identical to SEQ ID NO: 169061
  misc_feature 1..2307: note = Description of Artificial Sequence: Synthetic coding sequence
  source 1..2307: mol_type = other DNA

SEQ ID NO: 169069 - DNA, 1935 bp, synthetic construct; identical to SEQ ID NO: 169065
  misc_feature 1..1935: note = Description of Artificial Sequence: Synthetic coding sequence
  source 1..1935: mol_type = other DNA

SEQ ID NO: 169070 - DNA, 2490 bp, synthetic construct
  misc_feature 1..2490: note = Description of Artificial Sequence: Synthetic coding sequence
  source 1..2490: mol_type = other DNA
gccaactgccagatcgccatcctgtaccagcgcttccagagggtggtgtttggcatcagccagctgctgtgcttcagcgccctgatcagcgagctgaccaaccagaaggaggtggccgcctggacctaccactacagcaccaaggcctacagctggaacatcagcaggaagtactgccagaaccgctacacagacctggtggccatccagaacaagaatgaaattgactacctgaacaaggtgctgccctactacagcagctactactggattggcatcaggaagaacaacaagacctggacctgggtgggcaccaagaaggccctgaccaatgaagctgagaactgggccgacaatgagcccaacaacaagagaaataatgaagactgtgtggagatctacatcaagagccccagcgcccctgggaagtggaatgatgagcactgcctgaagaagaagcacgccctgtgctacacagccagctgccaggacatgagctgcagcaagcagggcgagtgcctggagaccatcggcaactacacctgcagctgctacccaggcttctacggcccagaatgtgaatatgtgcgggagtgtggggagctggagctgccccagcacgtgctgatgaactgcagccaccccctgggcaacttctccttcaacagccagtgcagcttccactgcacagatggctaccaggtgaatggccccagcaagctggagtgcctggccagcggcatctggaccaacaagccaccccagtgcctggccgcccagtgcccccccctgaagatccctgagcggggcaacatgacctgcctgcacagcgccaaggccttccagcaccagagcagctgcagcttcagctgtgaggagggctttgccctggtgggccctgaggtggtgcagtgcacagccagcggcgtgtggacagccccagcccctgtgtgcaaggctgtgcagtgccagcacctggaggcccccagcgagggcaccatggactgtgtgcaccccctgacagcctttgcctacggcagcagctgcaagtttgagtgccagcccggctacagagtgcggggcctggacatgctgcgctgcatcgacagcggccactggagcgcccccctgcccacctgtgaggccatcagctgtgagcccctggagagccctgtgcacggctccatggactgcagccccagcctgcgggccttccagtatgacaccaactgcagcttccgctgtgccgagggcttcatgctgcggggagctgacatcgtgcgctgtgacaacctgggccagtggacagccccagcccctgtgtgccaggccctgcagtgccaggacctgcctgtgcccaatgaggcccgggtgaactgcagccacccctttggagccttccgctaccagagcgtgtgcagcttcacctgcaatgaaggcctgctgctggtgggcgcctctgtgctgcagtgcctggccaccggcaactggaacagcgtgcccccagagtgccaggccatcccctgcacccccctgctgagcccccagaatggcaccatgacctgtgtgcagcccctgggcagcagcagctacaagagcacctgccagttcatctgtgatgagggctacagcctgagcggccctgagcggctggactgcaccaggagcggccgctggacagacagcccccccatgtgtgaggccatcaagtgcccagagctgtttgcccctgagcagggcagcctggactgcagcgacaccagaggagagttcaacgtgggcagcacctgccacttcagctgtgacaatggcttcaagctggagggccccaacaacgtggagtgcaccaccagcggccgctggagcgccaccccacccacctgcaagggcatcgccagcctgcccaccccaggagtgcagtgcccagccctgaccaccccaggccagggcaccatgtactgccgccaccaccctggcaccttcggcttcaacaccacctgctacttcggctgcaatgccggcttcaccctcatcggggacagcaccctgagctgccggcccagcggccagtggacagctgtgaccccagcctgcagagctgtgaagtgcagcgagctgcacgtgaacaagcccatcgccatgaactgcagcaacctgtggggcaacttctcctatggcagcatctgcagcttccactgcctggagggccagctgctgaatggcagcgcccagacagcctgccaggagaatggccactggagcaccaccgtgcccacctgccaggccggccccctgaccatccaggaggccctgacctactttggaggagctgtggccagcaccatcggcctcatcatgggcggcaccctgctggccctgctgaggaagcgcttccggcagaaggatgatggaaaatgtcccctgaacccccacagccacctgggcacctatggagtcttcaccaatgctgcctttgaccccagcccctag

SEQ ID NO: 169071 - DNA, 1941 bp, synthetic construct
  misc_feature 1..1941: note = Description of Artificial Sequence: Synthetic coding sequence
  source 1..1941: mol_type = other DNA
tgagccaactgccagatcgccatcctgtaccagcgcttccagagggtggtgtttggcatcagccagctgctgtgcttcagcgccctgatcagcgagctgaccaaccagaaggaggtggccgcctggacctaccactacagcaccaaggcctacagctggaacatcagcaggaagtactgccagaaccgctacacagacctggtggccatccagaacaagaatgaaattgactacctgaacaaggtgctgccctactacagcagctactactggattggcatcaggaagaacaacaagacctggacctgggtgggcaccaagaaggccctgaccaatgaagctgagaactgggccgacaatgagcccaacaacaagaggaacaatgaagactgtgtggagatctacatcaagagccccagcgcccctgggaagtggaatgatgagcactgcctgaagaagaagcacgccctgtgctacacagccagctgccaggacatgagctgcagcaagcagggagaatgtctggagaccatcggcaactacacctgcagctgctacccaggcttctacggcccagaatgtgaatatgtgagagaatgtggggagctggagctgccccagcacgtgctgatgaactgcagccaccccctgggcaacttctccttcaacagccagtgcagcttccactgcacagatggctaccaggtgaatggccccagcaagctggagtgcctggccagcggcatctggaccaacaagccaccccagtgcctggccgcccagtgcccccccctgaagatccctgagcggggcaacatgacctgcctgcacagcgccaaggccttccagcaccagagcagctgcagcttcagctgtgaggagggctttgccctggtgggccctgaggtggtgcagtgcacagccagcggcgtgtggacagccccagcccctgtgtgcaaggccatcagctgtgagcccctggagagccctgtgcacggctccatggactgcagccccagcctgcgggccttccagtatgacaccaactgcagcttccgctgtgccgagggcttcatgctgcggggagctgacatcgtgcgctgtgacaacctgggccagtggacagccccagcccctgtgtgccaggccctgcagtgccaggacctgcctgtgcccaatgaggcccgggtgaactgcagccacccctttggagccttccgctaccagagcgtgtgcagcttcacctgcaatgaaggcctgctgctggtgggcgcctctgtgctgcagtgcctggccactggaaactggaacagcgtgcccccagagtgccagggcaagagcatcgccagcctgcccaccccaggagtgcagtgcccagccctgaccaccccaggccagggcaccatgtactgccgccaccaccctggcaccttcggcttcaacaccacctgctacttcggctgcaatgccggcttcaccctgattggagacagcaccctgagctgccggcccagcggccagtggacagctgtgaccccagcctgcagagctgtgaagtgcagcgagctgcacgtgaacaagcccatcgccatgaactgcagcaacctgtggggcaacttctcctatggcagcatctgcagcttccactgcctggagggccagctgctgaatggaagtgcccagacagcctgccaggagaatggccactggagcaccaccgtgcccacctgccaggccggccccctgaccatccaggaggccctgacctactttggaggagctgtggccagcaccatcggcctcatcatgggcggcaccctgctggccctgctgaggaagcgcttccggcagaaggatgatggcaagtgccccctgaacccccacagccacctgggcacctacggcgtcttcaccaatgctgcctttgaccccagcccctag

SEQ ID NO: 169072 - DNA, 2262 bp, synthetic construct
  misc_feature 1..2262: note = Description of Artificial Sequence: Synthetic coding sequence
  source 1..2262: mol_type = other DNA
gtggtgtttggcatcagccagctgctgtgcttcagcgccctgatcagcgagctgaccaaccagaaggaggtggccgcctggacctaccactacagcaccaaggcctacagctggaacatcagcaggaagtactgccagaaccgctacacagacctggtggccatccagaacaagaatgaaattgactacctgaacaaggtgctgccctactacagcagctactactggattggcatcaggaagaacaacaagacctggacctgggtgggcaccaagaaggccctgaccaatgaagctgagaactgggccgacaatgagcccaacaacaagagaaataatgaagactgtgtggagatctacatcaagagccccagcgcccctgggaagtggaatgatgagcactgcctgaagaagaagcacgccctgtgctacacagccagctgccaggacatgagctgcagcaagcagggcgagtgcctggagaccatcggcaactacacctgcagctgctacccaggcttctacggcccagaatgtgaatatgtgcgggagtgtggggagctggagctgccccagcacgtgctgatgaactgcagccaccccctgggcaacttctccttcaacagccagtgcagcttccactgcacagatggctaccaggtgaatggccccagcaagctggagtgcctggccagcggcatctggaccaacaagccaccccagtgcctggccgcccagtgcccccccctgaagatccctgagcggggcaacatgacctgcctgcacagcgccaaggccttccagcaccagagcagctgcagcttcagctgtgaggagggctttgccctggtgggccctgaggtggtgcagtgcacagccagcggcgtgtggacagccccagcccctgtgtgcaaggccatcagctgtgagcccctggagagccctgtgcacggctccatggactgcagccccagcctgcgggccttccagtatgacaccaactgcagcttccgctgtgccgagggcttcatgctgcggggagctgacatcgtgcgctgtgacaacctgggccagtggacagccccagcccctgtgtgccaggccctgcagtgccaggacctgcctgtgcccaatgaggcccgggtgaactgcagccacccctttggagccttccgctaccagagcgtgtgcagcttcacctgcaatgaaggcctgctgctggtgggcgcctctgtgctgcagtgcctggccaccggcaactggaacagcgtgcccccagagtgccaggccatcccctgcacccccctgctgagcccccagaatggcaccatgacctgtgtgcagcccctgggcagcagcagctacaagagcacctgccagttcatctgtgatgagggctacagcctgagcggccctgagcggctggactgcaccaggagcggccgctggacagacagcccccccatgtgtgaggccatcaagtgcccagagctgtttgcccctgagcagggcagcctggactgcagcgacaccagaggagagttcaacgtgggcagcacctgccacttcagctgtgacaatggcttcaagctggagggccccaacaacgtggagtgcaccaccagcggccgctggagcgccaccccacccacctgcaagggcatcgccagcctgcccaccccaggagtgcagtgcccagccctgaccaccccaggccagggcaccatgtactgccgccaccaccctggcaccttcggcttcaacaccacctgctacttcggctgcaatgccggcttcaccctcatcggggacagcaccctgagctgccggcccagcggccagtggacagctgtgaccccagcctgcagagctgtgaagtgcagcgagctgcacgtgaacaagcccatcgccatgaactgcagcaacctgtggggcaacttctcctatggcagcatctgcagcttccactgcctggagggccagctgctgaatggcagcgcccagacagcctgccaggagaatggccactggagcaccaccgtgcccacctgccaggccggccccctgaccatccaggaggccctgacctactttggaggagctgtggccagcaccatcggcctcatcatgggcggcaccctgctggccctgctgaggaagcgcttccggcagaaggatgatggaaaatgtcccctgaacccccacagccacctgggcacctatggagtcttcaccaatgctgcctttgaccccagcccctag

SEQ ID NO: 169073 - DNA, 2373 bp, synthetic construct
  misc_feature 1..2373: note = Description of Artificial Sequence: Synthetic coding sequence
  source 1..2373: mol_type = other DNA
atggccaactgccagatcgccatcctgtaccagcgcttccagagggtggtgtttggcatcagccagctgctgtgcttcagcgccctgatcagcgagctgaccaaccagaaggaggtggccgcctggacctaccactacagcaccaaggcctacagctggaacatcagcaggaagtactgccagaaccgctacacagacctggtggccatccagaacaagaatgaaattgactacctgaacaaggtgctgccctactacagcagctactactggattggcatcaggaagaacaacaagacctggacctgggtgggcaccaagaaggccctgaccaatgaagctgagaactgggccgacaatgagcccaacaacaagaggaacaatgaagactgtgtggagatctacatcaagagccccagcgcccctgggaagtggaatgatgagcactgcctgaagaagaagcacgccctgtgctacacagccagctgccaggacatgagctgcagcaagcagggagaatgtctggagaccatcggcaactacacctgcagctgctacccaggcttctacggcccagaatgtgaatatgtgagagaatgtggggagctggagctgccccagcacgtgctgatgaactgcagccaccccctgggcaacttctccttcaacagccagtgcagcttccactgcacagatggctaccaggtgaatggccccagcaagctggagtgcctggccagcggcatctggaccaacaagccaccccagtgcctggccgcccagtgcccccccctgaagatccctgagcggggcaacatgacctgcctgcacagcgccaaggccttccagcaccagagcagctgcagcttcagctgtgaggagggctttgccctggtgggccctgaggtggtgcagtgcacagccagcggcgtgtggacagccccagcccctgtgtgcaaggctgtgcagtgccagcacctggaggcccccagcgagggcaccatggactgtgtgcaccccctgacagcctttgcctacggcagcagctgcaagtttgagtgccagcccggctacagagtgcggggcctggacatgctgcgctgcattgattctggccactggagcgcccccctgcccacctgtgaggccatcagctgtgagcccctggagagccctgtgcacggctccatggactgcagccccagcctgcgggccttccagtatgacaccaactgcagcttccgctgtgccgagggcttcatgctgcggggagctgacatcgtgcgctgtgacaacctgggccagtggacagccccagcccctgtgtgccaggccctgcagtgccaggacctgcctgtgcccaatgaggcccgggtgaactgcagccacccctttggagccttccgctaccagagcgtgtgcagcttcacctgcaatgaaggcctgctgctggtgggcgcctctgtgctgcagtgcctggccactggaaactggaacagcgtgcccccagagtgccaggccatcccctgcacccccctgctgagcccccagaatggcaccatgacctgtgtgcagcccctgggcagcagcagctacaagagcacctgccagttcatctgtgatgagggctacagcctgagcggccctgagcggctggactgcaccaggagcggccgctggacagacagcccccccatgtgtgaggccatcaagtgcccagagctgtttgcccctgagcagggcagcctggactgcagcgacaccagaggagagttcaacgtgggcagcacctgccacttcagctgtgacaatggcttcaagctggagggccccaacaacgtggagtgcaccaccagcggccgctggagcgccaccccacccacctgcaagggcatcgccagcctgcccaccccaggagtgcagtgcccagccctgaccaccccaggccagggcaccatgtactgccgccaccaccctggcaccttcggcttcaacaccacctgctacttcggctgcaatgccggcttcaccctgattggagacagcaccctgagctgccggcccagcggccagtggacagctgtgaccccagcctgcagagctgtgaagtgcagcgagctgcacgtgaacaagcccatcgccatgaactgcagcaacctgtggggcaacttctcctatggcagcatctgcagcttccactgcctggagggccagctgctgaatggaagtgcccagacagcctgccaggagaatggccactggagcaccaccgtgcccacctgccaggatgatggcaagtgccccctgaacccccacagccacctgggcacctacggcgtcttcaccaatgctgcctttgaccccagcccctag

SEQ ID NO: 169074 - DNA, 450 bp, synthetic construct
  misc_feature 1..450: note = Description of Artificial Sequence: Synthetic coding sequence
  source 1..450: mol_type = other DNA
atgatgaccaagcacaagaagtgcttcatcatcgtgggcgtgctgatcaccaccaacatcatcaccctcatcgtgaagctgacccgggacagccagagcctgtgcccctatgactggattggcttccagaacaagtgctactacttcagcaaggaggagggggactggaacagcagcaagtacaactgcagcacccagcacgccgacctgaccatcatcgacaacatcgaggagatgaacttcctgcggcgctacaagtgcagcagtgaccactggattggcctgaagatggccaagaacagaacaggccagtgggtggatggagccaccttcaccaagagctttggcatgaggggcagcgagggctgtgcctacctgagtgatgatggagctgccacagcccgctgctacacagagaggaagtggatctgcaggaagaggatccactag

SEQ ID NO: 169075 - DNA, 1209 bp, synthetic construct
  misc_feature 1..1209: note = Description of Artificial Sequence: Synthetic coding sequence
  source 1..1209: mol_type = other DNA
atgcccctgcagctgctgctgctgctgatcctgctgggccctggcaacagcctgcagctgtgggacacctgggcagatgaggccgagaaggccctgggccccctgctggcccgggaccggcggcaggccacagaatatgagtacctggactatgacttcctgcctgagacagagcccccagagatgctgaggaacagcacagacaccacccccctgactggacctggcaccccagagagcaccaccgtggagcctgctgcccggcgcagcacaggcctggatgctggaggagctgtgacagagctgaccacagagctggccaacatgggcaacctgagcacagacagcgctgccatggagatccagaccacccagcctgctgccacagaggcccagaccacccccctggccgccacagaggcccagaccacccggctgacagccacagaggcccagaccacccccctggccgccacagaggcccagaccaccccacctgctgccacagaggcccagaccacccagcccaccggcctggaggcccagaccacagccccagctgccatggaggcccagaccacagccccagctgccatggaggcccagaccaccccacctgctgccatggaggcccagaccacccagaccacagccatggaggcccagaccacagcccctgaggccacagaggcccagaccacccagcccacagccacagaggcccagaccacccccctggccgccatggaggccctgagcacagagcccagcgccacagaggccctgtccatggagcccaccaccaagaggggcctcttcatccccttctctgtgtcctctgtgacccacaagggcatccccatggccgccagcaacctgtctgtgaactaccctgtgggcgccccagaccacatctctgtgaagcagtgcctgctggccatcctgatcctggccctggtggccaccatcttctttgtgtgcaccgtggtgctggccgtgcggctgagcaggaagggccacatgtaccctgtgaggaactacagccccacagagatggtgtgcatcagcagcctgctgcctgatggaggagagggccccagcgccacagccaatggaggcctgagcaaggccaagagccctggcctgaccccagagccccgggaggaccgggagggagatgacctgaccctgcacagcttcctgccctag

SEQ ID NO: 169076 - DNA, 1239 bp, synthetic construct
  misc_feature 1..1239: note = Description of Artificial Sequence: Synthetic coding sequence
  source 1..1239: mol_type = other DNA
atgcccctgcagctgctgctgctgctgatcctgctgggccctggcaacagcctgcagctgtgggacacctgggcagatgaggccgagaaggccctgggccccctgctggcccgggaccggcggcaggccacagaatatgagtacctggactatgacttcctgcctgagacagagcccccagagatgctgaggaacagcacagacaccacccccctgactggacctggcaccccagagagcaccaccgtggagcctgctgcccggcgcagcacaggcctggatgctggaggagctgtgacagagctgaccacagagctggccaacatgggcaacctgagcacagacagcgctgccatggagatccagaccacccagcctgctgccacagaggcccagaccacccagcctgtgcccacagaggcccagaccacccccctggccgccacagaggcccagaccacccggctgacagccacagaggcccagaccacccccctggccgccacagaggcccagaccaccccacctgctgccacagaggcccagaccacccagcccaccggcctggaggcccagaccacagccccagctgccatggaggcccagaccacagccccagctgccatggaggcccagaccaccccacctgctgccatggaggcccagaccacccagaccacagccatggaggcccagaccacagcccctgaggccacagaggcccagaccacccagcccacagccacagaggcccagaccacccccctggccgccatggaggccctgagcacagagcccagcgccacagaggccctgtccatggagcccaccaccaagaggggcctcttcatccccttctctgtgtcctctgtgacccacaagggcatccccatggccgccagcaacctgtctgtgaactaccctgtgggcgccccagaccacatctctgtgaagcagtgcctgctggccatcctgatcctggccctggtggccaccatcttctttgtgtgcaccgtggtgctggccgtgcggctgagcaggaagggccacatgtaccctgtgaggaactacagccccacagagatggtgtgcatcagcagcctgctgcctgatggaggagagggccccagcgccacagccaatggaggcctgagcaaggccaagagccctggcctgaccccagagccccgggaggaccgggagggagatgacctgaccctgcacagcttcctgccctag

SEQ ID NO: 169077 - DNA, 1419 bp, synthetic construct
  misc_feature 1..1419: note = Description of Artificial Sequence: Synthetic coding sequence
  source 1..1419: mol_type = other DNA
atggccaccaagtgtggcaactgtggccctggctacagcacccccctggaggccatgaagggcccccgggaggagatcgtgtacctgccctgcatctacagaaacacaggaacagaggccccagactacctggccaccgtggatgtggaccccaagagcccccagtactgccaggtgatccaccggctgcccatgcccaacctgaaggatgagctgcaccacagcggctggaacacctgcagcagctgcttcggggacagcaccaagagcaggaccaagctggtgctgcccagcctcatcagcagccgcatctacgtggtggatgtgggcagcgagccccgggcccccaagctgcacaaggtgattgagcccaaggacatccacgccaagtgtgagctggccttcctgcacaccagccactgcctggccagcggggaggtgatgatcagcagcctgggagatgtgaagggaaatggcaagggcggctttgtgctgctggatggagagacctttgaggtgaagggcacctgggagaggcctgggggcgccgcccccctgggctatgacttctggtaccagcccaggcacaacgtgatgatcagcacagagtgggccgcccccaacgtgctgagagatggcttcaacccagcagatgtggaggccggcctgtatggcagccacctgtatgtgtgggactggcagagacatgagatcgtgcagaccctgagcctgaaggatggcctcatccccctggagatccgcttcctgcacaacccagatgctgcccagggctttgtgggctgtgccctgagcagcaccatccagcgcttctacaagaatgaaggaggcacctggagcgtggagaaggtgatccaggtgccccccaagaaggtgaagggctggctgctgcctgagatgcctggcctcatcacagacatcctgctgagcctggatgaccgcttcctgtacttcagcaactggctgcatggagacctgcggcagtatgacatcagtgacccccagaggccccggctgaccggccagctgttcctgggcggcagcatcgtgaagggcggccctgtgcaggtgctggaggatgaggagctgaagagccagcctgagcccctggtggtgaagggcaagagggtggccggcggcccccagatgatccagctgagcctggatggcaagaggctgtacatcaccaccagcctgtacagcgcctgggacaagcagttctacccagacctgatccgggagggctctgtgatgctgcaggtggatgtggacacagtgaagggcggcctgaagctgaaccccaacttcctggtggactttgggaaggagcccctgggccctgccctggcccacgagctgcgctacccaggaggagactgcagcagtgacatctggatctag

SEQ ID NO: 169078 - DNA, 1227 bp, synthetic construct
  misc_feature 1..1227: note = Description of Artificial Sequence: Synthetic coding sequence
  source 1..1227: mol_type = other DNA
atgcccaacctgaaggatgagctgcaccacagcggctggaacacctgcagcagctgcttcggggacagcaccaagagcaggaccaagctggtgctgcccagcctcatcagcagccgcatctacgtggtggatgtgggcagcgagccccgggcccccaagctgcacaaggtgattgagcccaaggacatccacgccaagtgtgagctggccttcctgcacaccagccactgcctggccagcggggaggtgatgatcagcagcctgggagatgtgaagggaaatggcaagggcggctttgtgctgctggatggagagacctttgaggtgaagggcacctgggagaggcctgggggcgccgcccccctgggctatgacttctggtaccagcccaggcacaacgtgatgatcagcacagagtgggccgcccccaacgtgctgagagatggcttcaacccagcagatgtggaggccggcctgtatggcagccacctgtatgtgtgggactggcagagacatgagatcgtgcagaccctgagcctgaaggatggcctcatccccctggagatccgcttcctgcacaacccagatgctgcccagggctttgtgggctgtgccctgagcagcaccatccagcgcttctacaagaatgaaggaggcacctggagcgtggagaaggtgatccaggtgccccccaagaaggtgaagggctggctgctgcctgagatgcctggcctcatcacagacatcctgctgagcctggatgaccgcttcctgtacttcagcaactggctgcatggagacctgcggcagtatgacatcagtgacccccagaggccccggctgaccggccagctgttcctgggcggcagcatcgtgaagggcggccctgtgcaggtgctggaggatgaggagctgaagagccagcctgagcccctggtggtgaagggcaagagggtggccggcggcccccagatgatccagctgagcctggatggcaagaggctgtacatcaccaccagcctgtacagcgcctgggacaagcagttctacccagacctgatccgggagggctctgtgatgctgcaggtggatgtggacacagtgaagggcggcctgaagctgaaccccaacttcctggtggactttgggaaggagcccctgggccctgccctggcccacgagctgcgctacccaggaggagactgcagcagtgacatctggatctag

SEQ ID NO: 169079 - DNA, 1233 bp, synthetic construct
  misc_feature 1..1233: note = Description of Artificial Sequence: Synthetic coding sequence
  source 1..1233: mol_type = other DNA
atggccaccaagtgtggcaactgtggccctggctacagcacccccctggaggccatgaagggcccccgggaggagatcgtgtacctgccctgcatctacagaaacacaggaacagaggccccagactacctggccaccgtggatgtggaccccaagagcccccagtactgccaggtgattgagcccaaggacatccacgccaagtgtgagctggccttcctgcacaccagccactgcctggccagcggggaggtgatgatcagcagcctgggagatgtgaagggaaatggcaagggcggctttgtgctgctggatggagagacctttgaggtgaagggcacctgggagaggcctgggggcgccgcccccctgggctatgacttctggtaccagcccaggcacaacgtgatgatcagcacagagtgggccgcccccaacgtgctgagagatggcttcaacccagcagatgtggaggccggcctgtatggcagccacctgtatgtgtgggactggcagagacatgagatcgtgcagaccctgagcctgaaggatggcctcatccccctggagatccgcttcctgcacaacccagatgctgcccagggctttgtgggctgtgccctgagcagcaccatccagcgcttctacaagaatgaaggaggcacctggagcgtggagaaggtgatccaggtgccccccaagaaggtgaagggctggctgctgcctgagatgcctggcctcatcacagacatcctgctgagcctggatgaccgcttcctgtacttcagcaactggctgcatggagacctgcggcagtatgacatcagtgacccccagaggccccggctgaccggccagctgttcctgggcggcagcatcgtgaagggcggccctgtgcaggtgctggaggatgaggagctgaagagccagcctgagcccctggtggtgaagggcaagagggtggccggcggcccccagatgatccagctgagcctggatggcaagaggctgtacatcaccaccagcctgtacagcgcctgggacaagcagttctacccagacctgatccgggagggctctgtgatgctgcaggtggatgtggacacagtgaagggcggcctgaagctgaaccccaacttcctggtggactttgggaaggagcccctgggccctgccctggcccacgagctgcgctacccaggaggagactgcagcagtgacatctggatctag

SEQ ID NO: 169080 - DNA, 1362 bp, synthetic construct
  misc_feature 1..1362: note = Description of Artificial Sequence: Synthetic coding sequence
  source 1..1362: mol_type = other DNA
atgcctggcagcagtggagctggcatggaggccgctgtggcccctggaagagatgccccagccccagctgccagccagcccagcggctgtgggaagcacaacagccctgagaggaaggtgtacatggactacaatgccaccacccccctggagcctgaggtgatccaggccatgaccaaggccatgtgggaggcctggggcaaccccagcagcccctacagcgctggcaggaaggccaaggacatcatcaatgctgcccgggagagcctggccaagatgattggaggcaagccccaggacatcatcttcaccagcggcggcacagagagcaacaacctggtgatccacagcgtggtgaagcacttccacgccaaccagaccagcaagggccacactggaggccaccacagccctgtgaagggggccaagccccacttcatcaccagctctgtggagcatgacagcatccggctgcccctggagcacctggtggaggagcaggtggccgctgtgacctttgtgcctgtgtccaaggtgtctggccaggccgaggtggatgacatcctggccgctgtgcggcccaccacccggctggtgaccatcatgctggccaacaatgagaccggcatcgtgatgcctgtgcctgagatcagccagaggatcaaggccctgaaccaggagcgggtggccgccggcctgccccccatcctggtgcacacagatgctgcccaggccctgggcaagcagagggtggatgtggaggacctgggcgtggacttcctgaccatcgtgggccacaagttctacggccccagaattggagccctgtacatccggggcctgggggagttcacccccctgtaccccatgctgtttggaggcggccaggagaggaacttccggcccggcacagagaacacccccatgattgctggcctgggcaaggctgctgagctggtgacccagaactgtgaggcctatgaggcccacatgagagatgtgcgggactacctggaggagcggctggaggccgagtttggccagaagaggatccacctgaacagccagtttcctggcacccagaggctgcccaacacctgcaacttcagcatccggggcccccggctgcagggccacgtggtgctggcccagtgccgggtgctgatggcctctgtgggcgccgcctgccacagcgaccacggggaccagcccagccctgtgctgctgtcctatggagtgccctttgatgtggccagaaatgccctgcggctgtctgtgggccgcagcaccaccagggctgaggtggacctggtggtgcaggacctgaagcaggccgtggcccagctggaggaccaggcctag

SEQ ID NO: 169081 - DNA, 708 bp, synthetic construct
  misc_feature 1..708: note = Description of Artificial Sequence: Synthetic coding sequence
  source 1..708: mol_type = other DNA
ttcagcaaccccttctgtggggagaccttccccaggaagccagacctgaagggcacccaccgctgggccccccagcccagcgagggcggccaggcccccttccactacttcctgggcggcacccggctgcaccctgctgcccctggggcccctgggggccgcaccagcggcagcctgctgaatgtgaagatgatgaagatgaagaccttcatgatgatctgcttccacctgatcaacacagtgacctttgtgcctgtgtccaaggtgtctggccaggccgaggtggatgacatcctggccgctgtgcggcccaccacccggctggtgaccatcatgctggccaacaatgagaccggcatcgtgatgcctgtgcctgagatcagccagaggatcaaggccctgaaccaggagcgggtggccgccggcctgccccccatcctggtgcacacagatgctgcccaggccctgggcaagcagagggtggatgtggaggacctgggcgtggacttcctgaccatcgtgggccacaagttctacggccccagaattggagccctgtacatccggggcctgggggagttcacccccctgtaccccatgctgtttggaggcggccaggagaggaacttccggcccggcacagagaacacccccatgattgctggcctgggcaaggtgtccccaggagagctggaggagatgtcctag

SEQ ID NO: 169082 - DNA, 954 bp, synthetic construct
  misc_feature 1..954: note = Description of Artificial Sequence: Synthetic coding sequence
  source 1..954: mol_type = other DNA
atggaggccgctgtggcccctggaagagatgccccagccccagctgccagccagcccagcggctgtgggaagcacaacagccctgagaggaaggtgtacatggactacaatgccaccacccccctggagcctgaggtgatccaggccatgaccaaggccatgtgggaggcctggggcaaccccagcagcccctacagcgctggcaggaaggccaaggacatcatcaatgctgcccgggagagcctggccaagatgattggaggcaagccccaggacatcatcttcaccagcggcggcacagagagcaacaacctggtgatccacagcgtggtgaagcacttccacgccaaccagaccagcaagggccacactggaggccaccacagccctgtgaagggggccaagccccacttcatcaccagctctgtggagcatgacagcatccggctgcccctggagcacctggtggaggagcaggtggccgctgtgacctttgtgcctgtgtccaaggtgtctggccaggccgaggtggatgacatcctggccgctgtgcggcccaccacccggctggtgaccatcatgctggccaacaatgagaccggcatcgtgatgcctgtgcctgagatcagccagaggatcaaggccctgaaccaggagcgggtggccgccggcctgccccccatcctggtgcacacagatgctgcccaggccctgggcaagcagagggtggatgtggaggacctgggcgtggacttcctgaccatcgtgggccacaagttctacggccccagaattggagccctgtacatccggggcctgggggagttcacccccctgtaccccatgctgtttggaggcggccaggagaggaacttccggcccggcacagagaacacccccatgattgctggcctgggcaaggtgtccccaggagagctggaggagatgtcctag

SEQ ID NO: 169083 - DNA, 1056 bp, synthetic construct
  misc_feature 1..1056: note = Description of Artificial Sequence: Synthetic coding sequence
  source 1..1056: mol_type = other DNA
atggaggccgctgtggcccctggaagagatgccccagccccagctgccagccagcccagcggctgtgggaagcacaacagccctgagaggaaggtgtacatggactacaatgccaccacccccctggagcctgaggtgatccaggccatgaccaaggccatgtgggaggcctggggcaaccccagcagcccctacagcgctgctgtgacctttgtgcctgtgtccaaggtgtctggccaggccgaggtggatgacatcctggccgctgtgcggcccaccacccggctggtgaccatcatgctggccaacaatgagaccggcatcgtgatgcctgtgcctgagatcagccagaggatcaaggccctgaaccaggagcgggtggccgccggcctgccccccatcctggtgcacacagatgctgcccaggccctgggcaagcagagggtggatgtggaggacctgggcgtggacttcctgaccatcgtgggccacaagttctacggccccagaattggagccctgtacatccggggcctgggggagttcacccccctgtaccccatgctgtttggaggcggccaggagaggaacttccggcccggcacagagaacacccccatgattgctggcctgggcaaggctgctgagctggtgacccagaactgtgaggcctatgaggcccacatgagagatgtgcgggactacctggaggagcggctggaggccgagtttggccagaagaggatccacctgaacagccagtttcctggcacccagaggctgcccaacacctgcaacttcagcatccggggcccccggctgcagggccacgtggtgctggcccagtgccgggtgctgatggcctctgtgggcgccgcctgccacagcgaccacggggaccagcccagccctgtgctgctgtcctatggagtgccctttgatgtggccagaaatgccctgcggctgtctgtgggccgcagcaccaccagggctgaggtggacctggtggtgcaggacctgaagcaggccgtggcccagctggaggaccaggcctag

SEQ ID NO: 169084 - DNA, 720 bp, synthetic construct
  misc_feature 1..720: note = Description of Artificial Sequence: Synthetic coding sequence
  source 1..720: mol_type = other DNA
atggaggccgctgtggcccctggaagagatgccccagccccagctgccagccagcccagcggctgtgggaagcacaacagccctgagaggaaggtgtacatggactacaatgccaccacccccctggagcctgaggtgatccaggccatgaccaaggccatgtgggaggcctggggcaaccccagcagcccctacagcgctggcaggaaggccaaggacatcatcaatgctgcccgggagagcctggccaagatgattggaggcaagccccaggacatcatcttcaccagcggcggcacagaggccgctgagctggtgacccagaactgtgaggcctatgaggcccacatgagagatgtgcgggactacctggaggagcggctggaggccgagtttggccagaagaggatccacctgaacagccagtttcctggcacccagaggctgcccaacacctgcaacttcagcatccggggcccccggctgcagggccacgtggtgctggcccagtgccgggtgctgatggcctctgtgggcgccgcctgccacagcgaccacggggaccagcccagccctgtgctgctgtcctatggagtgccctttgatgtggccagaaatgccctgcggctgtctgtgggccgcagcaccaccagggctgaggtggacctggtggtgcaggacctgaagcaggccgtggcccagctggaggaccaggcctag

SEQ ID NO: 169085 - DNA, 1338 bp, synthetic construct
  misc_feature 1..1338: note = Description of Artificial Sequence: Synthetic coding sequence
  source 1..1338: mol_type = other DNA
atggaggccgctgtggcccctggaagagatgccccagccccagctgccagccagcccagcggctgtgggaagcacaacagccctgagaggaaggtgtacatggactacaatgccaccacccccctggagcctgaggtgatccaggccatgaccaaggccatgtgggaggcctggggcaaccccagcagcccctacagcgctggcaggaaggccaaggacatcatcaatgctgcccgggagagcctggccaagatgattggaggcaagccccaggacatcatcttcaccagcggcggcacagagagcaacaacctggtgatccacagcgtggtgaagcacttccacgccaaccagaccagcaagggccacactggaggccaccacagccctgtgaagggggccaagccccacttcatcaccagctctgtggagcatgacagcatccggctgcccctggagcacctggtggaggagcaggtggccgctgtgacctttgtgcctgtgtccaaggtgtctggccaggccgaggtggatgacatcctggccgctgtgcggcccaccacccggctggtgaccatcatgctggccaacaatgagaccggcatcgtgatgcctgtgcctgagatcagccagaggatcaaggccctgaaccaggagcgggtggccgccggcctgccccccatcctggtgcacacagatgctgcccaggccctgggcaagcagagggtggatgtggaggacctgggcgtggacttcctgaccatcgtgggccacaagttctacggccccagaattggagccctgtacatccggggcctgggggagttcacccccctgtaccccatgctgtttggaggcggccaggagaggaacttccggcccggcacagagaacacccccatgattgctggcctgggcaaggctgctgagctggtgacccagaactgtgaggcctatgaggcccacatgagagatgtgcgggactacctggaggagcggctggaggccgagtttggccagaagaggatccacctgaacagccagtttcctggcacccagaggctgcccaacacctgcaacttcagcatccggggcccccggctgcagggccacgtggtgctggcccagtgccgggtgctgatggcctctgtgggcgccgcctgccacagcgaccacggggaccagcccagccctgtgctgctgtcctatggagtgccctttgatgtggccagaaatgccctgcggctgtctgtgggccgcagcaccaccagggctgaggtggacctggtggtgcaggacctgaagcaggccgtggcccagctggaggaccaggcctag

SEQ ID NO: 169086 - DNA, 966 bp, synthetic construct
  misc_feature 1..966: note = Description of Artificial Sequence: Synthetic coding sequence
  source 1..966: mol_type = other DNA
atgagcacccgggagagcttcaaccctgagagctatgagctggacaagagcttccggctgacccgcttcacagagctgaagggcaccggctgcaaggtgccccaggatgtgctgcagaagctgctggagagcctgcaggagaaccacttccaggaggatgagcagttcctgggcgctgtgatgccccggctgggcatcggcatggacacctgtgtgatccccctgcggcatggaggcctgagcctggtgcagaccacagactacatctaccccatcgtggatgacccctacatgatgggccgcatcgcctgtgccaacgtgctgagtgacctgtatgccatgggcgtgacagaatgtgacaacatgctgatgctgctgggcgtgagcaacaagatgacagaccgggagcgggacaaggtgatgcccctcatcatccagggcttcaaggatgctgctgaggaggccggcacctctgtgactggaggccagacagtgctgaacccctggatcgtgctgggcggcgtggccaccaccgtgtgccagcccaatgagttcatcatgccagacaatgctgtgcctggagatgtgctggtgctgaccaagcccctgggcacccaggtggccgtggccgtgcaccagtggctggacatccctgagaagtggaacaagatcaagctggtggtgacccaggaggatgtggagctggcctaccaggaggccatgatgaacatggcccggctgaacagaactggaggcctgctgatctgcctgccccgggagcaggccgcccgcttctgtgccgagatcaagagccccaagtacggggagggccaccaggcctggatcattggaattgtggagaagggcaacagaacagcccgcatcatcgacaagccccgcatcatcgaggtggccccccaggtggccacccagaatgtgaaccccacccctggggccaccagctag

SEQ ID NO: 169087 - DNA, 1179 bp, synthetic construct
  misc_feature 1..1179: note = Description of Artificial Sequence: Synthetic coding sequence
  source 1..1179: mol_type = other DNA
atgagcacccgggagagcttcaaccctgagagctatgagctggacaagagcttccggctgacccgcttcacagagctgaagggcaccggctgcaaggtgccccaggatgtgctgcagaagctgctggagagcctgcaggagaaccacttccaggaggatgagcagttcctgggcgctgtgatgccccggctgggcatcggcatggacacctgtgtgatccccctgcggcatggaggcctgagcctggtgcagaccacagactacatctaccccatcgtggatgacccctacatgatgggccgcatcgcctgtgccaacgtgctgagtgacctgtatgccatgggcgtgacagaatgtgacaacatgctgatgctgctgggcgtgagcaacaagatgacagaccgggagcgggacaaggtgatgcccctcatcatccagggcttcaaggatgctgctgaggaggccggcacctctgtgactggaggccagacagtgctgaacccctggatcgtgctgggcggcgtggccaccaccgtgtgccagcccaatgagttcatcatgccagacaatgctgtgcctggagatgtgctggtgctgaccaagcccctgggcacccaggtggccgtggccgtgcaccagtggctggacatccctgagaagtggaacaagatcaagctggtggtgacccaggaggatgtggagctggcctaccaggaggccatgatgaacatggcccggctgaacagaacagctgctggcctgatgcacaccttcaatgcccacgccgccacagacatcactggatttggcatcctgggccacgcccagaacctggccaagcagcagagaaatgaggtgtcctttgtgatccacaacctgcctgtgctggccaagatggctgctgtgtccaaggcctgtggcaacatgtttggcctgatgcacggcacctgcccagagaccagcggcggcctgctgatctgcctgccccgggagcaggccgcccgcttctgtgccgagatcaagagccccaagtatggagagggccaccaggcctggatcatcggcatcgtggagaagggcaacagaacagcccgcatcatcgacaagccccgcatcatcgaggtggccccccaggtggccacccagaatgtgaaccccacccctggggccaccagctag

SEQ ID NO: 169088 - DNA, 966 bp, synthetic construct; identical to SEQ ID NO: 169086
  misc_feature 1..966: note = Description of Artificial Sequence: Synthetic coding sequence
  source 1..966: mol_type = other DNA

SEQ ID NO: 169089 - DNA, 501 bp, synthetic construct
  misc_feature 1..501: note = Description of Artificial Sequence: Synthetic coding sequence
  source 1..501: mol_type = other DNA
atgagcacccgggagagcttcaaccctgagagctatgagctggacaagagcttccggctgacccgcttcacagagctgaagggcaccggctgcaaggtgccccaggatgtgctgcagaagctgctggagagcctgcaggagaaccacttccaggaggatgagcagttcctgggcgctgtgatgccccggctgggcatcggcatggacacctgtgtgatccccctgcggcatggaggcctgagcctggtgcagaccacagactacatctaccccatcgtggatgacccctacatgatgggccgcatcgcctgtgccaacgtgctgagtgacctgtatgccatgggcgtgacagaatgtgacaacatgctgatgctgctgggcgtgagcaacaagatgacagaccgggagcgggacaaggtgatgcccctcatcatccagggcttcaaggatgctgctgaggaggccggcacctctgtgactggaggccagacagtgctgtag

SEQ ID NO: 169090 - DNA, 279 bp, synthetic construct
  misc_feature 1..279: note = Description of Artificial Sequence: Synthetic coding sequence
  source 1..279: mol_type = other DNA
atggacacctgtgtgatccccctgcggcacggcggcctgagcctggtgcagaccacagactacatctaccccatcgtggatgacccctacatgatgggcagaattgcctgtgccaacgtgctgagtgacctgtatgccatgggcgtgacagaatgtgacaacatgctgatgctgctgggcgtgagcaacaagatgacagaccgggagcgggacaaggtgatgcccctcatcatccagggcttcaaggatgctgctgaggaggccggcacctctgtgtag

SEQ ID NO: 169091 - DNA, 978 bp, synthetic construct
  misc_feature 1..978: note = Description of Artificial Sequence: Synthetic coding sequence
  source 1..978: mol_type = other DNA
atggacacctgtgtgatccccctgcggcacggcggcctgagcctggtgcagaccacagactacatctaccccatcgtggatgacccctacatgatgggcagaattgcctgtgccaacgtgctgagtgacctgtatgccatgggcgtgacagaatgtgacaacatgctgatgctgctgggcgtgagcaacaagatgacagaccgggagcgggacaaggtgatgcccctcatcatccagggcttcaaggatgctgctgaggaggccggcacctctgtgactggaggccagacagtgctgaacccctggatcgtgctgggcggcgtggccaccaccgtgtgccagcccaatgagttcatcatgccagacaatgctgtgcctggagatgtgctggtgctgaccaagcccctgggcacccaggtggccgtggccgtgcaccagtggctggacatccctgagaagtggaacaagatcaagctggtggtgacccaggaggatgtggagctggcctaccaggaggccatgatgaacatggcccggctgaacagaacagctgctggcctgatgcacaccttcaatgcccatgctgccacagacatcaccggcttcggcatcctgggccacgcccagaacctggccaagcagcagagaaatgaggtgtcctttgtgatccacaacctgcctgtgctggccaagatggctgctgtgtccaaggcctgtggcaacatgtttggcctgatgcacggcacctgcccagagaccagcggcggcctgctgatctgcctgccccgggagcaggccgcccgcttctgtgccgagatcaagagccccaagtacggggagggccaccaggcctggatcattggaattgtggagaagggcaacagaacagcccgcatcatcgacaagccccgcatcatcgaggtggccccccaggtggccacccagaatgtgaaccccacccctggggccaccagctag

SEQ ID NO: 169092 - DNA, 975 bp, synthetic construct
  misc_feature 1..975: note = Description of Artificial Sequence: Synthetic coding sequence
  source 1..975: mol_type = other DNA
atgagcacccgggagagcttcaaccctgagagctatgagctggacaagagcttccggctgacccgcttcacagagctgaagggcaccggctgcaaggtgccccaggatgtgctgcagaagctgctggagagcctgcaggagaaccacttccaggaggatgagcagttcctgggcgctgtgatgccccggctgggcatcggcatggacacctgtgtgatccccctgcggcatggaggcctgagcctggtgcagaccacagactacatctaccccatcgtggatgacccctacatgatgggccgcatcgcctgtgccaacgtgctgagtgacctgtatgccatgggcgtgacagaatgtgacaacatgctgatgctgctgggcgtgagcaacaagatgacagaccgggagcgggacaaggtgatgcccctcatcatccagggcttcaaggatgctgctgaggaggccggcacctctgtgactggaggccagacagtgctgaacccctggatcgtgctgggcggcgtggccaccaccgtgtgccagcccaatgagttcatcatgccagacaatgctgtgcctggagatgtgctggtgctgaccaagcccctgggcacccaggtggccgtggccgtgcaccagtggctggacatccctgagaagtggaacaagatcaagctggtggtgacccaggaggatgtggagctggcctaccaggaggccatgatgaacatggcccggctgaacagaacagctgctggcctgatgcacaccttcaatgcccacgccgccacagacatcactggatttggcatcctgggccacgcccagaacctggccaagcagcagagaaatgaggtgtcctttgtgatccacaacctgcctgtgctggccaagatggctgctgtgtccaaggcctgtggcaacatgtttggcctgatgcacggcacctgcccagagaccagtgatgtgcagtag

SEQ ID NO: 169093 - DNA, 1200 bp, synthetic construct
  misc_feature 1..1200: note = Description of Artificial Sequence: Synthetic coding sequence
  source 1..1200: mol_type = other DNA
atggccgaggccagcgccactggagcctgtggggaggccatggctgctgctgagggcagcagcggccctgctggcctgaccctgggccgcctgaccggcttcagcggcatgaagggcctggtgggcggccaggaggaggccagccaggaggccggcctgcctgctggagctggccccagccccaccttccctgccctgggcatcggcatggacagctgtgtgatccccctgcggcatggaggcctgagcctggtgcagaccacagacttcttctaccccctggtggaggacccctacatgatgggccgcatcgcctgtgccaacgtgctgagtgacctgtatgccatgggcatcacagaatgtgacaacatgctgatgctgctgtctgtgtcccagagcatgtctgaggaggagcgggagaaggtgacccccctgatggtgaagggcttcagagatgctgctgaggagggcggcacagctgtgactggaggccagacagtggtgaacccctggatcatcatcggcggcgtggccaccgtggtgtgccagcccaatgagttcatcatgccagacagcgctgtggtgggagatgtgctggtgctgaccaagcccctgggcacccaggtggccgtgaatgcccaccagtggctggacaaccctgagcgctggaacaaggtgaagatggtggtgtcccgggaggaggtggagctggcctaccaggaggccatgttcaacatggccaccctgaacagaacagctgctggcctgatgcacaccttcaatgcccacgccgccacagacatcactggatttggcatcctgggccacagccagaacctggccaagcagcagagaaatgaggtgtcctttgtgatccacaacctgcccatcatcgccaagatggctgctgtgtccaaggccagcggccgcttcggcctgctgcagggcaccagcgctgagaccagcggcggcctgctgatctgcctgccccgggagcaggccgcccgcttctgcagcgagatcaagagcagcaagtacggggagggccaccaggcctggatcgtgggcatcgtggagaagggcaacagaacagcccgcatcatcgacaagcccagggtcatcgaggtgctgcccaggggggccacagctgctgtgctggccccagacagcagcaatgccagcagcgagcccagcagctag

SEQ ID NO: 169094 - DNA, 1440 bp, synthetic construct
  misc_feature 1..1440: note = Description of Artificial Sequence: Synthetic coding sequence
  source 1..1440: mol_type = other DNA
atggccgaggccagcgccactggagcctgtggggaggccatggctgctgctgagggcagcagcggccctgctggcctgaccctgggccgctccttcagcaactaccggccctttgagccccaggccctgggcctgagccccagctggaggctgaccggcttcagcggcatgaagggctgcaaggtgccccaggaggccctgctgaagctgctggccggcctgaccaggccagatgtgcggccccccctgggccggggcctggtgggcggccaggaggaggccagccaggaggccggcctgcctgctggggccggccccagccccaccttccctgccctgggcatcggcatggacagctgtgtgatccccctgcggcacggcggcctgagcctggtgcagaccacagacttcttctaccccctggtggaggacccctacatgatgggcagaattgcctgtgccaacgtgctgagtgacctgtatgccatgggcatcacagaatgtgacaacatgctgatgctgctgtctgtgtcccagagcatgtctgaggaggagcgggagaaggtgacccccctgatggtgaagggcttcagagatgctgctgaggagggcggcacagctgtgactggaggccagacagtggtgaacccctggatcatcattggaggagtggccaccgtggtgtgccagcccaatgagttcatcatgccagattctgctgtggtgggagatgtgctggtgctgaccaagcccctgggcacccaggtggccgtgaatgcccaccagtggctggacaaccctgagcgctggaacaaggtgaagatggtggtgtcccgggaggaggtggagctggcctaccaggaggccatgttcaacatggccaccctgaacagaacagctgctggcctgatgcacaccttcaatgcccatgctgccacagacatcaccggcttcggcatcctgggccacagccagaacctggccaagcagcagagaaatgaggtgtcctttgtgatccacaacctgcccatcatcgccaagatggctgctgtgtccaaggccagcggccgcttcggcctgctgcagggcaccagcgctgagaccagcggcggcctgctgatctgcctgccccgggagcaggccgcccgcttctgcagcgagatcaagagcagcaaatatggagagggccaccaggcctggatcgtgggcatcgtggagaagggcaacagaacagcccgcatcatcgacaagccccgggtgattgaggtgctgcccaggggggccacagctgctgtgctggccccagacagcagcaatgccagcagcgagcccagcagcgagaggacagaggtggtgtggaccctggagcccctgagcaccatcacagatggcagccaggagctgattgtgaggaacttccagaggcggctgcctgcctag

SEQ ID NO: 169095 - DNA, 1341 bp, synthetic construct
  misc_feature 1..1341: note = Description of Artificial Sequence: Synthetic coding sequence
  source 1..1341: mol_type = other DNA
atggccgaggccagcgccactggagcctgtggggaggccatggctgctgctgagggcagcagcggccctgctggcctgaccctgggccgctccttcagcaactaccggccctttgagccccaggccctgggcctgagccccagctggaggctgaccggcttcagcggcatgaagggctgcaaggtgccccaggaggccctgctgaagctgctggccggcctgaccaggccagatgtgcggccccccctgggccggggcctggtgggcggccaggaggaggccagccaggaggccggcctgcctgctggggccggccccagccccaccttccctgccctgggcatcggcatggacagctgtgtgatccccctgcggcacggcggcctgagcctggtgcagaccacagacttcttctaccccctggtggaggacccctacatgatgggcagaattgcctgtgccaacgtgctgagtgacctgtatgccatgggcatcacagaatgtgacaacatgctgatgctgctgtctgtgtcccagagcatgtctgaggaggagcgggagaaggtgacccccctgatggtgaagggcttcagagatgctgctgaggagggcggcacagctgtgactggaggccagacagtggtgaacccctggatcatcattggaggagtggccaccgtggtgtgccagcccaatgagttcatcatgccagattctgctgtggtgggagatgtgctggtgctgaccaagcccctgggcacccaggtggccgtgaatgcccaccagtggctggacaaccctgagcgctggaacaaggtgaagatggtggtgtcccgggaggaggtggagctggcctaccaggaggccatgttcaacatggccaccctgaacagaacagctgctggcctgatgcacaccttcaatgcccatgctgccacagacatcaccggcttcggcatcctgggccacagccagaacctggccaagcagcagagaaatgaggtgtcctttgtgatccacaacctgcccatcatcgccaagatggctgctgtgtccaaggccagcggccgcttcggcctgctgcagggcaccagcgctgagaccagcggcggcctgctgatctgcctgccccgggagcaggccgcccgcttctgcagcgagatcaagagcagcaaatatggagagggccaccaggcctggatcgtgggcatcgtggagaagggcaacagaacagcccgcatcatcgacaagccccgggtgattgaggtgctgcccaggggggccacagctgctgtgctggccccagacagcagcaatgccagcagcgagcccagcagctag

SEQ ID NO: 169096 - DNA, 1176 bp, synthetic construct
  misc_feature 1..1176: note = Description of Artificial Sequence: Synthetic coding sequence
  source 1..1176: mol_type = other DNA
atggccgaggccagcgccactggagcctgtggggaggccatggctgctgctgagggcagcagcggccctgctggcctgaccctgggccgctccttcagcaactaccggccctttgagccccaggaggccggcctgcctgctggagctggccccagccccaccttccctgccctgggcatcggcatggacagctgtgtgatccccctgcggcatggaggcctgagcctggtgcagaccacagacttcttctaccccctggtggaggacccctacatgatgggccgcatcgcctgtgccaacgtgctgagtgacctgtatgccatgggcatcacagaatgtgacaacatgctgatgctgctgtctgtgtcccagagcatgtctgaggaggagcgggagaaggtgacccccctgatggtgaagggcttcagagatgctgctgaggagggcggcacagctgtgactggaggccagacagtggtgaacccctggatcatcatcggcggcgtggccaccgtggtgtgccagcccaatgagttcatcatgccagacagcgctgtggtgggagatgtgctggtgctgaccaagcccctgggcacccaggtggccgtgaatgcccaccagtggctggacaaccctgagcgctggaacaaggtgaagatggtggtgtcccgggaggaggtggagctggcctaccaggaggccatgttcaacatggccaccctgaacagaacagctgctggcctgatgcacaccttcaatgcccacgccgccacagacatcactggatttggcatcctgggccacagccagaacctggccaagcagcagagaaatgaggtgtcctttgtgatccacaacctgcccatcatcgccaagatggctgctgtgtccaaggccagcggccgcttcggcctgctgcagggcaccagcgctgagaccagcggcggcctgctgatctgcctgccccgggagcaggccgcccgcttctgcagcgagatcaagagcagcaagtacggggagggccaccaggcctggatcgtgggcatcgtggagaagggcaacagaacagcccgcatcatcgacaagcccagggtcatcgaggtgctgcccaggggggccacagctgctgtgctggccccagacagcagcaatgccagcagcgagcccagcagctag

SEQ ID NO: 169097 - DNA, 1671 bp, synthetic construct
  misc_feature 1..1671: note = Description of Artificial Sequence: Synthetic coding sequence
  source 1..1671: mol_type = other DNA
atgggccgggcccggcccggccagaggggcccccccagccctggccctgctgcccagcccccagcccccccaagaagaagagcccggagcctggccctgctgggcgccctgctggccgctgctgctgctgctgctgtgcgggtgtgtgcccggcatgctgaggcccaggccgccgcccggcaggagctggccctgaagaccctgggcacagatggcctcttcctgttcagcagcctggacacagatggagacatgtacatcagccctgaggagttcaagcccatcgccgagaagctgaccggcagcaccccagctgccagctgtgaggaggaggagctgcccccagaccccagcgaggagaccctgaccatcgaggcccgcttccagcccctgctgcctgagaccatgaccaagagcaaggatggcttcctgggcgtgtcccggctggccctgagcggcctgaggaactggacagctgctgccagccccagcgctgtgtttgccaccaggcacttccagcccttcctgcccccacctggccaggagctgggggagccctggtggatcatccccagcgagctgtccatgttcaccggctacctgagcaacaaccgcttctacccacctccacccaagggcaaggaggtgatcatccaccggctgctgtccatgttccacccccggccctttgtgaagaccaggtttgccccccagggcgctgtggcctgcctgacagccatcagtgacttctactacacagtgatgttccgcatccacgccgagttccagctgtctgagcccccagacttccccttctggttcagccctgcccagttcaccggccacatcatcctgagcaaggatgccacccacgtgcgggacttccggctgtttgtgcccaaccacaggagcctgaatgtggacatggagtggctgtatggagccagcgagagcagcaacatggaggtggacatcggctacatcccccagatggagctggaggccaccggccccagcgtgcccagcgtcatcctggatgaagatggctccatgattgacagccacctgcccagcggggagcccctgcagtttgtgtttgaggagatcaagtggcagcaggagctgtcctgggaggaggccgcccggcggctggaggtggccatgtaccccttcaagaaggtgtcctacctgcccttcacagaggcctttgaccgggccaaggccgagaacaagctggtgcacagcatcctgctgtggggcgccctggatgaccagagctgccactgcagcggccgcaccctgcgggagaccgtgctggagagcagccccatcctgaccctgctgaatgaaagcttcatcagcacctggagcctggtgaaggagctggaggagctgcagaacaaccaggagaacagcagccaccagaagctggccggcctgcacctggagaagtacagcttccctgtggagatgatgatctgcctgcccaatggaacagtggtgcaccacatcaatgccaactacttcctggacatcacctctgtgaagccagaggagattgagagcaacctcttctccttcagcagcacctttgaggaccccagcacagccacctacatgcagttcctgaaggagggcctgcggcggggcctgcccctgctgcagccctag

SEQ ID NO: 169098 - DNA, 1761 bp, synthetic construct
  misc_feature 1..1761: note = Description of Artificial Sequence: Synthetic coding sequence
  source 1..1761: mol_type = other DNA
atgggccgggcccggcccggccagaggggcccccccagccctggccctgctgcccagcccccagcccccccaagaagaagagcccggagcctggccctgctgggcgccctgctggccgctgctgctgctgctgctgtgcgggtgtgtgcccggcatgctgaggcccaggccgccgcccggcaggagctggccctgaagaccctgggcacagatggcctcttcctgttcagcagcctggacacagatggagacatgtacatcagccctgaggagttcaagcccatcgccgagaagctgaccggcagctgcagcgtgacccagacaggagtgcagtggtgcagccacagcagcctgcagccccagctgccctggctgaacagctgcctgagcctgctgcggagcaccccagctgccagctgtgaggaggaggagctgcccccagaccccagcgaggagaccctgaccatcgaggcccgcttccagcccctgctgcctgagaccatgaccaagagcaaggatggcttcctgggcgtgtcccggctggccctgagcggcctgaggaactggacagctgctgccagccccagcgctgtgtttgccaccaggcacttccagcccttcctgcccccacctggccaggagctgggggagccctggtggatcatccccagcgagctgtccatgttcaccggctacctgagcaacaaccgcttctacccacctccacccaagggcaaggaggtgatcatccaccggctgctgtccatgttccacccccggccctttgtgaagaccaggtttgccccccagggcgctgtggcctgcctgacagccatcagtgacttctactacacagtgatgttccgcatccacgccgagttccagctgtctgagcccccagacttccccttctggttcagccctgcccagttcaccggccacatcatcctgagcaaggatgccacccacgtgcgggacttccggctgtttgtgcccaaccacaggagcctgaatgtggacatggagtggctgtatggagccagcgagagcagcaacatggaggtggacatcggctacatcccccagatggagctggaggccaccggccccagcgtgcccagcgtcatcctggatgaagatggctccatgattgacagccacctgcccagcggggagcccctgcagtttgtgtttgaggagatcaagtggcagcaggagctgtcctgggaggaggccgcccggcggctggaggtggccatgtaccccttcaagaaggtgtcctacctgcccttcacagaggcctttgaccgggccaaggccgagaacaagctggtgcacagcatcctgctgtggggcgccctggatgaccagagcggcagcggccgcaccctgcgggagaccgtgctggagagcagccccatcctgaccctgctgaatgaaagcttcatcagcacctggagcctggtgaaggagctggaggagctgcagaacaaccaggagaacagcagccaccagaagctggccggcctgcacctggagaagtacagcttccctgtggagatgatgatctgcctgcccaatggaacagtggtgcaccacatcaatgccaactacttcctggacatcacctctgtgaagccagaggagattgagagcaacctcttctccttcagcagcacctttgaggaccccagcacagccacctacatgcagttcctgaaggagggcctgcggcggggcctgcccctgctgcagccctag

SEQ ID NO: 169099 - DNA, 1665 bp, synthetic construct
  misc_feature 1..1665: note = Description of Artificial Sequence: Synthetic coding sequence
  source 1..1665: mol_type = other DNA
atgggccgggcccggcccggccagaggggcccccccagccctggccctgctgcccagcccccagcccccccaagaagaagagcccggagcctggccctgctgggcgccctgctggccgctgctgctgctgctgctgtgcgggtgtgtgcccggcatgctgaggcccaggccgccgcccggcaggagctggccctgaagaccctgggcacagatggcctcttcctgttcagcagcctggacacagatggagacatgtacatcagccctgaggagttcaagcccatcgccgagaagctgaccggcagcaccccagctgccagctgtgaggaggaggagctgcccccagaccccagcgaggagaccctgaccatcgaggcccgcttccagcccctgctgcctgagaccatgaccaagagcaaggatggcttcctgggcgtgtcccggctggccctgagcggcctgaggaactggacagctgctgccagccccagcgctgtgtttgccaccaggcacttccagcccttcctgcccccacctggccaggagctgggggagccctggtggatcatccccagcgagctgtccatgttcaccggctacctgagcaacaaccgcttctacccacctccacccaagggcaaggaggtgatcatccaccggctgctgtccatgttccacccccggccctttgtgaagaccaggtttgccccccagggcgctgtggcctgcctgacagccatcagtgacttctactacacagtgatgttccgcatccacgccgagttccagctgtctgagcccccagacttccccttctggttcagccctgcccagttcaccggccacatcatcctgagcaaggatgccacccacgtgcgggacttccggctgtttgtgcccaaccacaggagcctgaatgtggacatggagtggctgtatggagccagcgagagcagcaacatggaggtggacatcggctacatcccccagatggagctggaggccaccggccccagcgtgcccagcgtcatcctggatgaagatggctccatgattgacagccacctgcccagcggggagcccctgcagtttgtgtttgaggagatcaagtggcagcaggagctgtcctgggaggaggccgcccggcggctggaggtggccatgtaccccttcaagaaggtgtcctacctgcccttcacagaggcctttgaccgggccaaggccgagaacaagctggtgcacagcatcctgctgtggggcgccctggatgaccagagcggcagcggccgcaccctgcgggagaccgtgctggagagcagccccatcctgaccctgctgaatgaaagcttcatcagcacctggagcctggtgaaggagctggaggagctgcagaacaaccaggagaacagcagccaccagaagctggccggcctgcacctggagaagtacagcttccctgtggagatgatgatctgcctgcccaatggaacagtggtgcaccacatcaatgccaactacttcctggacatcacctctgtgaagccagaggagattgagagcaacctcttctccttcagcagcacctttgaggaccccagcacagccacctacatgcagttcctgaaggagggcctgcggcggggcctgcccctgctgcagccctag

SEQ ID NO: 169100 - DNA, 1086 bp, synthetic construct
  misc_feature 1..1086: note = Description of Artificial Sequence: Synthetic coding sequence
  source 1..1086: mol_type = other DNA
atgtggaggagcctgggcctggccctggccctgtgcctgctgcccagcggcggcacagagagccaggaccagagcagcctgtgcaagcagcccccagcctggagcatccgggaccaggaccccatgctgaacagcaatggatctgtgacagtggtggccctgctgcaggccagcctgtgcatcctgcaggccagcaagctggaggacctgcgggtgaagctgaagaaggagggctacagcaacatctcctacatcgtggtgaaccaccagggcatcagcagccggctgaagtacacccacctgaagaacaaggtgtctgagcacatccctgtgtaccagcaggaggagaaccagacagatgtgtggaccctgctgaatggcagcaaggatgacttcctgatctatgacagatgtggccgcctggtgtaccacctgggcctgcccttctccttcctgaccttcccctacgtggaggaggccatcaagatcgcctactgtgagaagaagtgtggcaactgcagcctgaccaccctgaaggatgaggacttctgcaagagggtgtccctggccaccgtggacaagacagtggagacccccagcccccactaccaccacgagcaccaccacaaccacggccaccagcacctgggcagcagcgagctgtctgagaaccagcagcccggggccccaaatgcccccacccacccagcccctcctggcctgcaccaccaccacaagcacaagggccagcaccggcagggccacccagaaaatagagacatgcctgccagcgaggacctgcaggacctgcagaagaagctgtgcaggaagcgctgcatcaaccagctgctgtgcaagctgcccacagattctgagctggccccccgctgctgccactgccgccacctgatctttgagaagacaggcagcgccatccagtgcaaggagaacctgcccagcctgtgccagggcctgcgggcagaggagaacatcacagagagctgccagctgcccccagcccagatcagccagcagctgatccccacagaggccagcgccagcaaccaggccaagcccagcaactag

SEQ ID NO: 169101 - DNA, 624 bp, synthetic construct
  misc_feature 1..624: note = Description of Artificial Sequence: Synthetic coding sequence
  source 1..624: mol_type = other DNA
atgtggaggagcctgggcctggccctggccctgtgcctgctgcccagcggcggcacagagagccaggaccagagcagcctgtgcaagcagcccccagcctggagcatccgggaccaggaccccatgctgaacagcaatggatctgtgacagtggtggccctgctgcaggccagcctgtgcatcctgcaggccagcaagctggaggacctgcgggtgaagctgaagaaggagggctacagcaacatctcctacatcgtggtgaaccaccagggcatcagcagccggctgaagtacacccacctgaagaacaaggtgtctgagcacatccctgtgtaccagcaggaggagaaccagacagatgtgtggaccctgctgaatggcagcaaggatgacttcctgatctatgacagatgtggccgcctggtgtaccacctgggcctgcccttctccttcctgaccttcccctacgtggaggaggccatcaagatcgcctactgtgagaagaagtgtggcaactgcagcctgaccaccctgaaggatgaggacttctgcaagagggtgtccctggccaccgtggacaagacagtggagacccccagcccccactaccaccacgagcactag

SEQ ID NO: 169102 - DNA, 1086 bp, synthetic construct; identical to SEQ ID NO: 169100
  misc_feature 1..1086: note = Description of Artificial Sequence: Synthetic coding sequence
  source 1..1086: mol_type = other DNA

SEQ ID NO: 169103 - DNA, 921 bp, synthetic construct
  misc_feature 1..921: note = Description of Artificial Sequence: Synthetic coding sequence
  source 1..921: mol_type = other DNA
atgtggaggagcctgggcctggccctggccctgtgcctgctgcccagcggcggcacagagagccaggaccagagcagcctgtgcaagcagcccccagcctggagcatccgggaccaggaccccatgctgaacagcaatggatctgtgacagtggtggccctgctgcaggccagcctgtgcatcctgcaggccagcaagctggaggacctgcgggtgaagctgaagaaggagggctacagcaacatctcctacatcgtggtgaaccaccagggcatcagcagccggctgaagtacacccacctgaagaacaaggtgtctgagcacatccctgtgtaccagcaggaggagaaccagacagatgtgtggaccctgctgaatggcagcaaggatgacttcctgatctatgacagatgtggccgcctggtgtaccacctgggcctgcccttctccttcctgaccttcccctacgtggaggaggccatcaagatcgcctactgtgagaagaagtgtggcaactgcagcctgaccaccctgaaggatgaggacttctgcaagagggtgtccctggccaccgtggacaagacagtggagacccccagcccccactaccaccacgagcaccaccacaaccacggccaccagcacctgggcagcagcgagctgtctgagaaccagcagcccggggccccaaatgcccccacccacccagcccctcctggcctgcaccaccaccacaagcacaagggccagcaccggcagggccacccagaaaatagagacatgcctgccagcgaggacctgcaggacctgcagaagaagctgtgcaggaagcgctgcatcaaccagctgctgtgcaagctgcccacagattctgagctggccccccgctgctgccactgccgccacctgatctttgaatag

SEQ ID NO: 169104 - DNA, 1086 bp, synthetic construct; identical to SEQ ID NO: 169100
  misc_feature 1..1086: note = Description of Artificial Sequence: Synthetic coding sequence
  source 1..1086: mol_type = other DNA

SEQ ID NO: 169105 - DNA, 258 bp, synthetic construct
  misc_feature 1..258: note = Description of Artificial Sequence: Synthetic coding sequence
  source 1..258: mol_type = other DNA
atggccctggccgtgcgggtggtgtactgtggggcctacaagagcaagtacctgcagctgaagaagaagctggaggatgagttccctggccgcctggacatctgtggggagggcaccccccaggccaccggcttctttgaggtgatggtggccggcaagctgatccacagcaagaagaagggagatggctacgtggacacagagagcaagttcctgaagctggtggccgccatcaaggccgccctggcccagggctag

SEQ ID NO: 169106 - DNA, 267 bp, synthetic construct
  misc_feature 1..267: note = Description of Artificial Sequence: Synthetic coding sequence
  source 1..267: mol_type = other DNA
atggccctggccgtgcgggtggtgtactgctgcggggccggcggctacaagagcaagtacctgcagctgaagaagaagctggaggatgagttccctggccgcctggacatctgtggggagggcaccccccaggccaccggcttctttgaggtgatggtggccggcaagctgatccacagcaagaagaagggagatggctacgtggacacagagagcaagttcctgaagctggtggccgccatcaaggccgccctggcccagggctag

SEQ ID NO: 169107 - DNA, 345 bp, synthetic construct
  misc_feature 1..345: note = Description of Artificial Sequence: Synthetic coding sequence
  source 1..345: mol_type = other DNA
atgtccttctgcagcttctttggaggagaggtgttccagaaccactttgagcccggggtgtatgtgtgtgccaagtgtggctatgagctgttcagcagccgcagcaaatatgcccacagcagcccctggccagccttcacagagaccatccacgccgacagcgtggccaagaggcctgagcacaacagaagtgaggccctgaaggtgtcctgtgggaaatgtggaaatggcctgggccacgagttcctgaatgatggccccaagccaggccagagccgcttcttcagcagcagcctgaagtttgtgcccaagggcaaggagaccagcgccagccagggccactag

SEQ ID NO: 169108 - DNA, 681 bp, synthetic construct
  misc_feature 1..681: note = Description of Artificial Sequence: Synthetic coding sequence
  source 1..681: mol_type = other DNA
atgtccttctgcagcttctttggaggagaggtgttccagaaccactttgagcccggggtgtatgtgtgtgccaagtgtggctatgagctgttcagcagccgcagcaaatatgcccacagcagcccctggccagccttcacagagaccatccacgccgacagcgtggccaagaggcctgagcacaacagaagtgaggccctgaaggtgcggggccaccggggcggcggcggcaccggggccgcccgggagagccgggagcctgtgccccccagcagcctgtgcctgccccacagcagccggggcctggaggccagcatccctggcctgctgcccctgcccggcagctgccacccccggctgtctggagagcccggcctgctggtgcagatgtgggagaccggccaggtgtcctgcaccggcagcaggaccaaggtgaacctgctgtgccgccgcagcgcctgggagattggagtgtgggaggagacccccagcgccagccccagcaagggcctgcactgcggctgcatcatggcccggagcagccccagctgcctggtgatcttccctggggtgctgtggcaggtgtggcagtgggtgggcccccgggtgcctgagcggcggccccaggccggggctgtgcccatcctgaacatccagcagctggccgaggtgtgcccctag

SEQ ID NO: 169109 - DNA, 2328 bp, synthetic construct
  misc_feature 1..2328: note = Description of Artificial Sequence: Synthetic coding sequence
  source 1..2328: mol_type = other DNA
atggccagcgctggccacatcatcaccctgctgctgtggggctacctgctggagctgtggacaggaggccacacagctgacaccacccacccccggctgcggctgagccacaaggagctgctgaacctgaacagaaccagcatcttccacagccccttcggcttcctggacctgcacaccatgctgctggatgagtaccaggagcggctgtttgtgggcggccgggacctggtgtacagcctgagcctggagcgcatcagtgatggctacaaggagatccactggcccagcacagccctgaagatggaggagtgcatcatgaagggcaaggatgctggggagtgtgccaactacgtgcgggtgctgcaccactacaacagaacccacctgctgacctgtggcactggagcctttgatcctgtgtgtgccttcatccgggtgggctaccacctggaggaccccctcttccacctggagagccccaggtctgagcggggccggggccgctgcccctttgaccccagcagcagcttcatcagcaccctgattggcagcgagctgtttgctggcctgtacagcgactactggagcagagatgctgccatcttccgctccatgggccgcctggcccacatcagaacagaacatgatgatgagcggctgctgaaggagcccaagtttgtgggcagctacatgatcccagacaatgaagatagagatgacaacaaggtgtacttcttcttcacagagaaggccctggaggccgagaacaatgcccacgccatctacaccagggtgggccgcctgtgtgtgaatgatgtgggcggccagaggatcctggtgaacaagtggagcaccttcctgaaggcccggctggtgtgcagcgtgcccggcatgaatggcatcgacacctactttgatgagctggaggatgtgttcctgctgcccacccgggaccacaagaaccctgtgatcttcggcctcttcaacaccaccagcaacatcttccggggccacgccatctgtgtgtaccacatgagcagcatccgggccgccttcaacggcccctatgcccacaaggagggccctgagtaccactggagcgtgtatgagggcaaggtgccctaccccaggcctggcagctgtgccagcaaggtgaatggaggccgctatggcaccaccaaggactacccagatgatgccatccgctttgcccggagccaccccctgatgtaccaggccatcaagccagcccacaagaagcccatcctggtgaagacagatggcaagtacaacctgaagcagattgctgtggacagagtggaggccgaggatggccagtatgatgtgctcttcatcggcacagacaatggaattgtgctgaaggtgatcaccatctacaaccaggagatggagagcatggaggaggtgatcctggaggagctgcagatcttcaaggaccctgtgcccatcatctccatggagatcagcagcaagaggcagcagctgtacatcggcagcgccagcgctgtggcccaggtgcgcttccaccactgtgacatgtatggcagcgcctgtgccgactgctgcctggcccgggacccctactgtgcctgggatggcatcagctgcagccgctactaccccaccggcacccacgccaagaggcgcttccggcggcaggatgtgagacatggaaatgctgcccagcagtgcttcggccagcagtttgtgggagatgccctggacaagacagaggagcacctggcctatggaattgagaacaacagcaccctgctggagtgcacccccaggagcctgcaggccaaggtgatctggtttgtgcagaagggccgggagaccaggaaggaggaggtgaagacagatgacagagtggtgaagatggacctgggcctgctcttcctgcggctgcacaagagtgatgctggcacctacttctgccagacagtggagcacagctttgtgcacacagtgaggaagatcaccctggaggtggtggaggaggagaaggtggaggacatgttcaacaaggatgatgaggaggacagacaccacaggatgccctgcccagcccagagcagcatcagccagggcgccaagccctggtacaaggagttcctgcagctgattggctacagcaacttccagagggtggaggagtactgtgagaaggtgtggtgcacagacaggaagaggaagaagctgaagatgagccccagcaagtggaagtatgccaacccccaggagaagaagctgcggagcaagccagagcactaccgcctgcccaggcacaccctggacagctag

SEQ ID NO: 169110 - DNA, 2148 bp, synthetic construct
  misc_feature 1..2148: note = Description of Artificial Sequence: Synthetic coding sequence
  source 1..2148: mol_type = other DNA
atgctgctggatgagtaccaggagcggctgtttgtgggcggccgggacctggtgtacagcctgagcctggagcgcatcagtgatggctacaaggagatccactggcccagcacagccctgaagatggaggagtgcatcatgaagggcaaggatgctggggagtgtgccaactacgtgcgggtgctgcaccactacaacagaacccacctgctgacctgtggcactggagcctttgatcctgtgtgtgccttcatccgggtgggctaccacctggaggaccccctcttccacctggagagccccaggtctgagcggggccggggccgctgcccctttgaccccagcagcagcttcatcagcaccctgattggcagcgagctgtttgctggcctgtacagcgactactggagcagagatgctgccatcttccgctccatgggccgcctggcccacatcagaacagaacatgatgatgagcggctgctgaaggagcccaagtttgtgggcagctacatgatcccagacaatgaagatagagatgacaacaaggtgtacttcttcttcacagagaaggccctggaggccgagaacaatgcccacgccatctacaccagggtgggccgcctgtgtgtgaatgatgtgggcggccagaggatcctggtgaacaagtggagcaccttcctgaaggcccggctggtgtgcagcgtgcccggcatgaatggcatcgacacctactttgatgagctggaggatgtgttcctgctgcccacccgggaccacaagaaccctgtgatcttcggcctcttcaacaccaccagcaacatcttccggggccacgccatctgtgtgtaccacatgagcagcatccgggccgccttcaacggcccctatgcccacaaggagggccctgagtaccactggagcgtgtatgagggcaaggtgccctaccccaggcctggcagctgtgccagcaaggtgaatggaggccgctatggcaccaccaaggactacccagatgatgccatccgctttgcccggagccaccccctgatgtaccaggccatcaagccagcccacaagaagcccatcctggtgaagacagatggcaagtacaacctgaagcagattgctgtggacagagtggaggccgaggatggccagtatgatgtgctcttcatcggcacagacaatggaattgtgctgaaggtgatcaccatctacaaccaggagatggagagcatggaggaggtgatcctggaggagctgcagatcttcaaggaccctgtgcccatcatctccatggagatcagcagcaagaggcagcagctgtacatcggcagcgccagcgctgtggcccaggtgcgcttccaccactgtgacatgtatggcagcgcctgtgccgactgctgcctggcccgggacccctactgtgcctgggatggcatcagctgcagccgctactaccccaccggcacccacgccaagaggcgcttccggcggcaggatgtgagacatggaaatgctgcccagcagtgcttcggccagcagtttgtgggagatgccctggacaagacagaggagcacctggcctatggaattgagaacaacagcaccctgctggagtgcacccccaggagcctgcaggccaaggtgatctggtttgtgcagaagggccgggagaccaggaaggaggaggtgaagacagatgacagagtggtgaagatggacctgggcctgctcttcctgcggctgcacaagagtgatgctggcacctacttctgccagacagtggagcacagctttgtgcacacagtgaggaagatcaccctggaggtggtggaggaggagaaggtggaggacatgttcaacaaggatgatgaggaggacagacaccacaggatgccctgcccagcccagagcagcatcagccagggcgccaagccctggtacaaggagttcctgcagctgattggctacagcaacttccagagggtggaggagtactgtgagaaggtgtggtgcacagacaggaagaggaagaagctgaagatgagccccagcaagtggaagtatgccaacccccaggagaagaagctgcggagcaagccagagcactaccgcctgcccaggcacaccctggacagctag

SEQ ID NO: 169111 - DNA, 2301 bp, synthetic construct
  misc_feature 1..2301: note = Description of Artificial Sequence: Synthetic coding sequence
  source 1..2301: mol_type = other DNA
atggccagcgctggccacatcatcaccctgctgctgtggggctacctgctggagctgtggacaggaggccacacagctgacaccacccacccccggctgcggctgagccacaaggagctgctgaacctgaacagaaccagcatcttccacagccccttcggcttcctggacctgcacaccatgctgctggatgagtaccaggagcggctgtttgtgggcggccgggacctggtgtacagcctgagcctggagcgcatcagtgatggctacaaggagatccactggcccagcacagccctgaagatggaggagtgcatcatgaagggcaaggatgctggggagtgtgccaactacgtgcgggtgctgcaccactacaacagaacccacctgctgacctgtggcactggagcctttgatcctgtgtgtgccttcatccgggtgggctaccacctggaggaccccctcttccacctggagagccccaggtctgagcggggccggggccgctgcccctttgaccccagcagcagcttcatcagcaccctgattggcagcgagctgtttgctggcctgtacagcgactactggagcagagatgctgccatcttccgctccatgggccgcctggcccacatcagaacagaacatgatgatgagcggctgctgaaggagcccaagtttgtgggcagctacatgatcccagacaatgaagatagagatgacaacaaggtgtacttcttcttcacagagaaggccctggaggccgagaacaatgcccacgccatctacaccagggtgggccgcctgtgtgtgaatgatgtgggcggccagaggatcctggtgaacaagtggagcaccttcctgaaggcccggctggtgtgcagcgtgcccggcatgaatggcatcgacacctactttgatgagctggaggatgtgttcctgctgcccacccgggaccacaagaaccctgtgatcttcggcctcttcaacaccaccagcaacatcttccggggccacgccatctgtgtgtaccacatgagcagcatccgggccgccttcaacggcccctatgcccacaaggagggccctgagtaccactggagcgtgtatgagggcaaggtgccctaccccaggcctggcagctgtgccagcaaggtgaatggaggccgctatggcaccaccaaggactacccagatgatgccatccgctttgcccggagccaccccctgatgtaccaggccatcaagccagcccacaagaagcccatcctggtgaagacagatggcaagtacaacctgaagcagattgctgtggacagagtggaggccgaggatggccagtatgatgtgctcttcatcggcacagacaatggaattgtgctgaaggtgatcaccatctacaaccaggagatggagagcatggaggaggtgatcctggaggagctgcagatcttcaaggaccctgtgcccatcatctccatggagatcagcagcaagaggcagcagctgtacatcggcagcgccagcgctgtggcccaggtgcgcttccaccactgtgacatgtatggcagcgcctgtgccgactgctgcctggcccgggacccctactgtgcctgggatggcatcagctgcagccgctactaccccaccggcacccacgccaagaggcgcttccggcggcaggatgtgagacatggaaatgctgcccagcagtgcttcggccagcagtttgtgggagatgccctggacaagacagaggagcacctggcctatggaattgagaacaacagcaccctgctggagtgcacccccaggagcctgcaggccaaggtgatctggtttgtgcagaagggccgggagaccaggaaggaggaggtgaagacagatgacagagtggtgaagatggacctgggcctgctcttcctgcggctgcacaagagtgatgctggcacctacttctgccagacagtggagcacagctttgtgcacacagtgaggaagatcaccctggaggtggtggaggaggagaaggtggaggacatgttcaacaaggatgatgaggaggacagacaccacaggatgccctgcccagcccagagcagcatcagccagggcgccaagccctggtacaaggagttcctgcagctgattggctacagcaacttccagagggtggaggagtactgtgagaaggtgtggtgcacagacaggaagaggaagaagctgaagatgagccccagcaagtggaagtatgccaacccccagcactaccgcctgcccaggcacaccctggacagctag

SEQ ID NO: 169112 - DNA, 2286 bp, synthetic construct
  misc_feature 1..2286: note = Description of Artificial Sequence: Synthetic coding sequence
  source 1..2286: mol_type = other DNA
atggccctgcctgccctgggcctggacccctggagcctgctgggcctcttcctgttccagctgctgcagctgctgctgcccaccaccacagctgggggcggcggccagggccccatgccccgggtgcgctactatgctggagatgagcggcgggccctgtccttcttccaccagaagggcctgcaggactttgacaccctgctgctgtctggagatggcaacaccctgtatgtgggcgcccgggaggccatcctggccctggacatccaggaccccggggtgccccggctgaagaacatgatcccctggccagccagtgacaggaagaagtcagaatgtgccttcaagaagaagagcaatgagacccagtgcttcaacttcatccgggtgctggtgtcctacaacgtgacccacctgtacacctgtggcacctttgccttctccccagcctgcaccttcatcgagctgcaggacagctacctgctgcccatcagcgaggacaaggtgatggagggcaagggccagagcccctttgatcctgcccacaagcacacagctgtgctggtggatggcatgctgtacagcggcaccatgaacaacttcctgggcagcgagcccatcctgatgaggaccctgggcagccagcctgtgctgaagacagacaacttcctgcgctggctgcaccatgatgccagctttgtggccgccatccccagcacccaggtggtgtacttcttctttgaggagacagccagcgagtttgacttctttgagcggctgcacaccagccgggtggcccgggtgtgcaagaatgatgtgggcggggagaagctgctgcagaagaagtggaccaccttcctgaaggcccagctgctgtgcacccagcccggccagctgcccttcaacgtcatcagacatgctgtgctgctgcctgctgacagccccacagccccccacatctatgctgtgttcaccagccagtggcaggtgggcggcaccaggagcagcgctgtgtgtgccttcagcctgctggacatcgagagggtcttcaagggcaagtacaaggagctgaacaaggagaccagccgctggaccacctaccggggccctgagaccaacccccggcccggcagctgcagcgtgggccccagcagtgacaaggccctgaccttcatgaaggaccacttcctgatggatgagcaggtggtgggcacccccctgctggtgaagtctggagtggagtacacccggctggccgtggagacagcccagggcctggatggccacagccacctggtgatgtacctgggcaccaccaccggcagcctgcacaaggctgtggtgtctggggacagcagcgcccacctggtggaggagatccagctgttcccagaccctgagcctgtgaggaacctgcagctggcccccacccagggcgctgtgtttgtgggcttcagcggcggcgtgtggagggtgccccgggccaactgcagcgtgtatgagagctgtgtggactgtgtgctggcccgggacccccactgtgcctgggaccctgagagcaggacctgctgcctgctgagcgcccccaacctgaacagctggaagcaggacatggagcggggcaaccctgagtgggcctgtgccagcggccccatgagccgcagcctgcggccccagagccggccccagatcatcaaggaggtgctggccgtgcccaacagcatcctggagctgccctgcccccacctgagcgccctggccagctactactggagccacggccctgctgctgtgcctgaggccagcagcacagtgtacaacggcagcctgctgctgattgtgcaggatggagtgggcggcctgtaccagtgctgggccacagaaaatggcttctcctaccctgtgatctcctactgggtggacagccaggaccagaccctggccctggaccctgagctggccggcatcccccgggagcacgtgaaggtgcccctgaccagggtgtctggaggagctgccctggccgcccagcagagctactggccccactttgtgacagtgacagtgctgtttgccctggtgctgagcggggccctgatcatcctggtggccagccccctgcgggccctgcgggcccggggcaaggtgcagggctgtgagaccctgcggcctggagagaaggcccccctgagccgggagcagcacctgcagagccccaaggaatgtaggaccagcgccagtgatgtggatgctgacaacaactgcctgggcacagaggtggcctag

SEQ ID NO: 169113 - DNA, 2286 bp, synthetic construct; identical to SEQ ID NO: 169112
  misc_feature 1..2286: note = Description of Artificial Sequence: Synthetic coding sequence
  source 1..2286: mol_type = other DNA

SEQ ID NO: 169114 - DNA, 2172 bp, synthetic construct
  misc_feature 1..2172: note = Description of Artificial Sequence: Synthetic coding sequence
  source 1..2172: mol_type = other DNA
atgccccgggtgcgctactatgctggagatgagcggcgggccctgtccttcttccaccagaagggcctgcaggactttgacaccctgctgctgtctggagatggcaacaccctgtatgtgggcgcccgggaggccatcctggccctggacatccaggaccccggggtgccccggctgaagaacatgatcccctggccagccagtgacaggaagaagtcagaatgtgccttcaagaagaagagcaatgagacccagtgcttcaacttcatccgggtgctggtgtcctacaacgtgacccacctgtacacctgtggcacctttgccttctccccagcctgcaccttcatcgagctgcaggacagctacctgctgcccatcagcgaggacaaggtgatggagggcaagggccagagcccctttgatcctgcccacaagcacacagctgtgctggtggatggcatgctgtacagcggcaccatgaacaacttcctgggcagcgagcccatcctgatgaggaccctgggcagccagcctgtgctgaagacagacaacttcctgcgctggctgcaccatgatgccagctttgtggccgccatccccagcacccaggtggtgtacttcttctttgaggagacagccagcgagtttgacttctttgagcggctgcacaccagccgggtggcccgggtgtgcaagaatgatgtgggcggggagaagctgctgcagaagaagtggaccaccttcctgaaggcccagctgctgtgcacccagcccggccagctgcccttcaacgtcatcagacatgctgtgctgctgcctgctgacagccccacagccccccacatctatgctgtgttcaccagccagtggcaggtgggcggcaccaggagcagcgctgtgtgtgccttcagcctgctggacatcgagagggtcttcaagggcaagtacaaggagctgaacaaggagaccagccgctggaccacctaccggggccctgagaccaacccccggcccggcagctgcagcgtgggccccagcagtgacaaggccctgaccttcatgaaggaccacttcctgatggatgagcaggtggtgggcacccccctgctggtgaagtctggagtggagtacacccggctggccgtggagacagcccagggcctggatggccacagccacctggtgatgtacctgggcaccaccaccggcagcctgcacaaggctgtggtgtctggggacagcagcgcccacctggtggaggagatccagctgttcccagaccctgagcctgtgaggaacctgcagctggcccccacccagggcgctgtgtttgtgggcttcagcggcggcgtgtggagggtgccccgggccaactgcagcgtgtatgagagctgtgtggactgtgtgctggcccgggacccccactgtgcctgggaccctgagagcaggacctgctgcctgctgagcgcccccaacctgaacagctggaagcaggacatggagcggggcaaccctgagtgggcctgtgccagcggccccatgagccgcagcctgcggccccagagccggccccagatcatcaaggaggtgctggccgtgcccaacagcatcctggagctgccctgcccccacctgagcgccctggccagctactactggagccacggccctgctgctgtgcctgaggccagcagcacagtgtacaacggcagcctgctgctgattgtgcaggatggagtgggcggcctgtaccagtgctgggccacagaaaatggcttctcctaccctgtgatctcctactgggtggacagccaggaccagaccctggccctggaccctgagctggccggcatcccccgggagcacgtgaaggtgcccctgaccagggtgtctggaggagctgccctggccgcccagcagagctactggccccactttgtgacagtgacagtgctgtttgccctggtgctgagcggggccctgatcatcctggtggccagccccctgcgggccctgcgggcccggggcaaggtgcagggctgtgagaccctgcggcctggagagaaggcccccctgagccgggagcagcacctgcagagccccaaggaatgtaggaccagcgccagtgatgtggatgctgacaacaactgcctgggcacagaggtggcctag

SEQ ID NO: 169115 - DNA, 1890 bp, synthetic construct
  misc_feature 1..1890: note = Description of Artificial Sequence: Synthetic coding sequence
  source 1..1890: mol_type = other DNA
atgatcccctggccagccagtgacaggaagaagtcagaatgtgccttcaagaagaagagcaatgaggagctgcaggacagctacctgctgcccatcagcgaggacaaggtgatggagggcaagggccagagcccctttgatcctgcccacaagcacacagctgtgctggtggatggcatgctgtacagcggcaccatgaacaacttcctgggcagcgagcccatcctgatgaggaccctgggcagccagcctgtgctgaagacagacaacttcctgcgctggctgcaccatgatgccagctttgtggccgccatccccagcacccaggtggtgtacttcttctttgaggagacagccagcgagtttgacttctttgagcggctgcacaccagccgggtggcccgggtgtgcaagaatgatgtgggcggggagaagctgctgcagaagaagtggaccaccttcctgaaggcccagctgctgtgcacccagcccggccagctgcccttcaacgtcatcagacatgctgtgctgctgcctgctgacagccccacagccccccacatctatgctgtgttcaccagccagtggcaggtgggcggcaccaggagcagcgctgtgtgtgccttcagcctgctggacatcgagagggtcttcaagggcaagtacaaggagctgaacaaggagaccagccgctggaccacctaccggggccctgagaccaacccccggcccggcagctgcagcgtgggccccagcagtgacaaggccctgaccttcatgaaggaccacttcctgatggatgagcaggtggtgggcacccccctgctggtgaagtctggagtggagtacacccggctggccgtggagacagcccagggcctggatggccacagccacctggtgatgtacctgggcaccaccaccggcagcctgcacaaggctgtggtgtctggggacagcagcgcccacctggtggaggagatccagctgttcccagaccctgagcctgtgaggaacctgcagctggcccccacccagggcgctgtgtttgtgggcttcagcggcggcgtgtggagggtgccccgggccaactgcagcgtgtatgagagctgtgtggactgtgtgctggcccgggacccccactgtgcctgggaccctgagagcaggacctgctgcctgctgagcgcccccaacctgaacagctggaagcaggacatggagcggggcaaccctgagtgggcctgtgccagcggccccatgagccgcagcctgcggccccagagccggccccagatcatcaaggaggtgctggccgtgcccaacagcatcctggagctgccctgcccccacctgagcgccctggccagctactactggagccacggccctgctgctgtgcctgaggccagcagcacagtgtacaacggcagcctgctgctgattgtgcaggatggagtgggcggcctgtaccagtgctgggccacagaaaatggcttctcctaccctgtgatctcctactgggtggacagccaggaccagaccctggccctggaccctgagctggccggcatcccccgggagcacgtgaaggtgcccctgaccagggtgtctggaggagctgccctggccgcccagcagagctactggccccactttgtgacagtgacagtgctgtttgccctggtgctgagcggggccctgatcatcctggtggccagccccctgcgggccctgcgggcccggggcaaggtgcagggctgtgagaccctgcggcctggagagaaggcccccctgagccgggagcagcacctgcagagccccaaggaatgtaggaccagcgccagtgatgtggatgctgacaacaactgcctgggcacagaggtggcctag

SEQ ID NO: 169116 - DNA, 2286 bp, synthetic construct; identical to SEQ ID NO: 169112
  misc_feature 1..2286: note = Description of Artificial Sequence: Synthetic coding sequence
  source 1..2286: mol_type = other DNA

SEQ ID NO: 169117 - DNA, 1890 bp, synthetic construct; identical to SEQ ID NO: 169115
  misc_feature 1..1890: note = Description of Artificial Sequence: Synthetic coding sequence
  source 1..1890: mol_type = other DNA

SEQ ID NO: 169118 - DNA, 663 bp, synthetic construct
  misc_feature 1..663: note = Description of Artificial Sequence: Synthetic coding sequence
  source 1..663: mol_type = other DNA
atgatcccctggccagccagtgacaggaagaagtcagaatgtgccttcaagaagaagagcaatgagacccagtgcttcaacttcatccgggtgctggtgtcctacaacgtgacccacctgtacacctgtggcacctttgccttcagccctgcctgcaccttcatcgagctgcaggacagctacctgctgcccatcagcgaggacaaggtgatggagggcaagggccagagcccctttgatcctgcccacaagcacacagctgtgctggtggatggcatgctgtacagcggcaccatgaacaacttcctgggcagcgagcccatcctgatgaggaccctgggcagccagcctgtgctgaagacagacaacttcctgcgctggctgcaccatgatgccagctttgtggccgccatccccagcacccaggtggtgtacttcttctttgaggagacagccagcgagtttgacttctttgagcggctgcacaccagccgggtggcccgggtgtgcaagaatgatgtgggcggggagaagctgctgcagaagaagtggaccaccttcctgaaggcccagctgctgtgcacccagcccggccagctgcccttcaacgtcatcagacatgctgtgctgctgcctgctgacagccccacagccccccactag

SEQ ID NO: 169119 - DNA, 966 bp, synthetic construct
  misc_feature 1..966: note = Description of Artificial Sequence: Synthetic coding sequence
  source 1..966: mol_type = other DNA
atggccctgcctgccctgggcctggacccctggagcctgctgggcctcttcctgttccagctgctgcagctgctgctgcccaccaccacagctgggggcggcggccagggccccatgccccgggtgcgctactatgctggagatgagcggcgggccctgtccttcttccaccagaagggcctgcaggactttgacaccctgctgctgtctggagatggcaacaccctgtatgtgggcgcccgggaggccatcctggccctggacatccaggaccccggggtgccccggctgaagaacatgatcccctggccagccagtgacaggaagaagtcagaatgtgccttcaagaagaagagcaatgagacccagtgcttcaacttcatccgggtgctggtgtcctacaacgtgacccacctgtacacctgtggcacctttgccttctccccagcctgcaccttcatcgagctgcaggacagctacctgctgcccatcagcgaggacaaggtgatggagggcaagggccagagcccctttgatcctgcccacaagcacacagctgtgctggtggatggcatgctgtacagcggcaccatgaacaacttcctgggcagcgagcccatcctgatgaggaccctgggcagccagcctgtgctgaagacagacaacttcctgcgctggctgcaccatgatgccagctttgtggccgccatccccagcacccaggtggtgtacttcttctttgaggagacagccagcgagtttgacttctttgagcggctgcacaccagccgggtggcccgggtgtgcaagaatgatgtgggcggggagaagctgctgcagaagaagtggaccaccttcctgaaggcccagctgctgtgcacccagcccggccagctgcccttcaacgtcatcagacatgctgtgctgctgcctgctgacagccccacagccccccacatctactag

SEQ ID NO: 169120 - DNA, 711 bp, synthetic construct
  misc_feature 1..711: note = Description of Artificial Sequence: Synthetic coding sequence
  source 1..711: mol_type = other DNA
atggccctgcctgccctgggcctggacccctggagcctgctgggcctcttcctgttccagctgctgcagctgctgctgcccaccaccacagctgggggcggcggccagggccccatgccccgggtgcgctactatgctggagatgagcggcgggccctgtccttcttccaccagaagggcctgcaggactttgacaccctgctgctgtctggagatggcaacaccctgtatgtgggcgcccgggaggccatcctggccctggacatccaggaccccggggtgccccggctgaagaacatgatcccctggccagccagtgacaggaagaagtcagaatgtgccttcaagaagaagagcaatgaggagctgcaggacagctacctgctgcccatcagcgaggacaaggtgatggagggcaagggccagagcccctttgatcctgcccacaagcacacagctgtgctggtggatggcatgctgtacagcggcaccatgaacaacttcctgggcagcgagcccatcctgatgaggaccctgggcagccagcctgtgctgaagacagacaacttcctgcgctggctgcaccatgatgccagctttgtggccgccatccccagcacccaggtggtgtacttcttctttgaggagacagccagcgagtttgacttctttgagcggctgcacaccagccgggtggcccgggtgtgctag

SEQ ID NO: 169121 - DNA, 2172 bp, synthetic construct; identical to SEQ ID NO: 169114
  misc_feature 1..2172: note = Description of Artificial Sequence: Synthetic coding sequence
  source 1..2172: mol_type = other DNA

SEQ ID NO: 169122 - DNA, 3225 bp, synthetic construct
  misc_feature 1..3225: note = Description of Artificial Sequence: Synthetic coding sequence
  source 1..3225: mol_type = other DNA
atgaagggcacctgtgtgattgcctggctgttcagcagcctgggcctgtggaggctggcccaccctgaggcccagggcaccacccagtgccagaggacagagcaccctgtgatctcctacaaggagatcggcccctggctgcgggagttccgggccaagaatgctgtggacttcagccagctgacctttgatcctggccagaaggagctggtggtgggcgccaggaactacctgttccggctgcagctggaggacctgagcctcatccaggccgtggagtgggagtgtgatgaggccaccaagaaggcctgctacagcaagggcaagagcaaggaggagtgccagaactacatccgggtgctgctggtgggcggggacaggctcttcacctgtggcaccaatgccttcacccctgtgtgcaccaacagaagcctgagcaacctgacagagatccatgaccagatcagcggcatggcccgctgcccctacagcccccagcacaacagcacagccctgctgacagctggaggagagctgtatgctgccacagccatggacttccctggccgggaccctgccatctaccgcagcctgggcatcctgccccccctgaggacagcccagtacaacagcaagtggctgaatgagcccaactttgtgagcagctatgacatcggcaacttcacctacttcttcttcagagaaaatgctgtggagcatgactgtgggaagacagtgttcagccgggccgcccgggtgtgcaagaatgacatcggcggccgcttcctgctggaggacacctggaccaccttcatgaaggcccggctgaactgcagcaggcctggagaggtgcccttctactacaatgagctgcagagcaccttcttcctgcctgagctggacctgatctacggcatcttcaccaccaacgtgaacagcattgctgccagcgctgtgtgtgtgttcaacctgagcgccatcgcccaggccttcagcggccccttcaagtaccaggagaacagccgcagcgcctggctgccctaccccaaccccaacccccacttccagtgtggcaccgtggaccagggcctgtatgtgaacctgacagaaagaaacctgcaggatgcccagaagttcatcctgatgcatgaggtggtgcagcctgtgaccaccgtgcccagcttcatggaggacaacagccgcttcagccacgtggccgtggatgtggtgcagggccgggaggccctggtgcacatcatctacctggccacagattatggcaccatcaagaaggtgcgggtgcccctgaaccagaccagcagcagctgcctgctggaggagattgagctgtttcctgagaggagaagagagcccatccgcagcctgcagatcctgcacagccagagcgtgctgtttgtgggcctgcgggagcacgtggtgaagatccccctgaagcgctgccagttctaccgcaccaggagcacctgcattggagcccaggacccctactgcggctgggatgtggtgatgaagaagtgcaccagcctggaggagagcctgtccatgacccagtgggagcagagcatcagcgcctgccccaccaggaacctgactgtggatggccactttggagtgtggagcccctggaccccctgcacccacacagatggcagcgctgtgggcagctgcctgtgcaggaccaggagctgtgacagccctgccccccagtgtggcggctggcagtgtgagggccctggcatggagatcgccaactgcagcagaaatggaggctggaccccctggacctcctggagcccctgcagcaccacctgtggcatcggcttccaggtgcggcagaggagctgcagcaaccccacccccaggcatggaggccgggtgtgtgtgggccagaaccgggaggagcgctactgcaatgagcacctgctgtgccccccccacatgttctggacaggctggggcccctgggagcgctgcacagcccagtgtggcggcggcatccaggcccggcggcgcatctgtgaaaatggaccagactgtgccggctgcaatgtggagtaccagagctgcaacaccaacccctgcccagagctgaagaagaccaccccctggaccccctggacccctgtgaacatcagtgacaatggaggccactatgagcagcgcttccgctacacctgcaaggcccggctggccgaccccaacctgctggaggtgggccggcagagaattgagatgagatactgcagcagtgatggcaccagcggctgcagcacagatggcctgagcggggacttcctgcgggccggccgctacagcgcccacacagtgaatggagcctggagcgcctggacctcctggagccagtgcagccgggactgcagccggggcatccggaacaggaagagggtgtgcaacaaccctgagcccaagtatggaggcatgccctgcctgggccccagcctggagtaccaggagtgcaacatcctgccctgccctgtggatggagtgtggagctgctggagcccctggaccaagtgcagcgccacctgtggcggcggccactacatgaggaccaggagctgcagcaacccagccccagcctatggaggagacatctgcctgggcctgcacacagaggaggccctgtgcaacacccagccctgcccagagagctggagcgagtggagcgactggagcgaatgtgaggccagcggcgtgcaggtgcgggcccggcagtgcatcctgctcttccccatgggcagccagtgcagcggcaacaccacagagagccggccctgtgtgtttgacagcaacttcatccctgaggtgtctgtggcccggagcagctctgtggaggagaagagatgtggggagttcaacatgttccacatgattgctgtgggcctgagcagcagcatcctgggctgcctgctgaccctgctggtgtacacctactgccagcgctaccagcagcagagccatgatgccaccgtcatccaccctgtgtccccagcccccctgaacaccagcatcaccaaccacatcaacaagctggacaagtatgacagcgtggaggccatcaaggccttcaacaagaacaacctgatcctggaggagaggaacaagtacttcaacccccacctgaccgggaagacctacagcaatgcctacttcacagacctgaacaactatgatgagtactag

SEQ ID NO: 169123 - DNA, 765 bp, synthetic construct
  misc_feature 1..765: note = Description of Artificial Sequence: Synthetic coding sequence
  source 1..765: mol_type = other DNA
atgaagggcacctgtgtgattgcctggctgttcagcagcctgggcctgtggaggctggcccaccctgaggcccagggcaccacccagtgccagaggacagagcaccctgtgatctcctacaaggagatcggcccctggctgcgggagttccgggccaagaatgctgtggacttcagccagctgacctttgatcctggccagaaggagctggtggtgggcgccaggaactacctgttccggctgcagctggaggacctgagcctcatccaggccgtggagtgggagtgtgatgaggccaccaagaaggcctgctacagcaagggcaagagcaaggaggagtgccagaactacatccgggtgctgctggtgggcggggacaggctcttcacctgtggcaccaatgccttcacccctgtgtgcaccaacagaagcctgagcaacctgacagagatccatgaccagatcagcggcatggcccgctgcccctacagcccccagcacaacagcacagccctgctgacagctggaggagagctgtatgctgccacagccatggacttccctggccgggaccctgccatctaccgcagcctgggcatcctgccccccctgaggacagcccagtacaacagcaagtggctgaatgagcccaactttgtgagcagctatgacatcggcaacttcacctacttcttcttcagagaaaatgctgtggagcatgactgtgggaagacagtgttcagccgggccgcccgggtgtgctag

SEQ ID NO: 169124 - DNA, 2001 bp, synthetic construct
  misc_feature 1..2001: note = Description of Artificial Sequence: Synthetic coding sequence
  source 1..2001: mol_type = other DNA
atgaccccacctcctcctggccgggccgcccccagcgccccccgggcccgggtgcccggccccccagcccggctgggcctgcccctgcggctgcggctgctgctgctgctgtgggccgctgctgccagcgcccagggccacctgcggagcggcccccgcatctttgctgtgtggaagggccacgtgggccaggacagagtggactttggccagacagagccccacacagtgctcttccacgagcccggcagcagctctgtgtgggtgggcggccggggcaaggtgtacctgtttgacttccctgagggcaagaatgcctctgtgaggacagtgaacatcggcagcaccaagggcagctgcctggacaagagggactgtgagaactacatcaccctgctggagaggagaagtgagggcctgctggcctgtggcaccaatgcccggcaccccagctgctggaacctggtgaatggaacagtggtgcccctgggggagatgaggggctacgcccccttctccccagatgagaacagcctggtgctgtttgaaggagatgaggtgtacagcaccatcaggaagcaggagtacaacgggaagatcccccgcttccgccgcatccggggggagagcgagctgtacaccagtgacacagtgatgcagaacccccagttcatcaaggccaccatcgtgcaccaggaccaggcctatgatgacaagatctactacttcttccgggaggacaacccagacaagaaccctgaggcccccctgaatgtgtcccgggtggcccagctgtgccgcggggaccagggcggggagagcagcctgtctgtgtccaagtggaacaccttcctgaaggccatgctggtgtgcagtgatgctgccaccaacaagaacttcaaccggctgcaggatgtgttcctgctgcctgaccccagcggccagtggagggacaccagggtgtatggagtcttcagcaacccctggaactacagcgctgtgtgtgtgtacagcctgggggacatcgacaaggtgttccgcaccagcagcctgaagggctaccacagcagcctgcccaaccccaggcctgggaagtgcctgcctgaccagcagcccatccccacagagaccttccaggtggccgacagacaccctgaggtggcccagagggtggagcccatgggccccctgaagacccccctcttccacagcaagtaccactaccagaaggtggccgtgcacaggatgcaggccagccacggggagaccttccacgtgctgtacctgaccacagaccggggcaccatccacaaggtggtggagcccggggagcaggagcacagctttgccttcaacatcatggagatccagcccttccggcgggctgctgccatccagaccatgagcctggatgctgagaggaggaagctgtatgtgagcagccagtgggaggtgtcccaggtgcccctggacctgtgtgaggtgtatggaggcggctgccacggctgcctgatgagccgggacccctactgcggctgggaccagggccgctgcatcagcatctacagcagcgagaggtctgtgctgcagagcatcaacccagctgagccccacaaggagtgccccaaccccaagccagacaaggcccccctgcagaaggtgtccctggcccccaacagccgctactacctgagctgccccatggagagcagacatgccacctacagctggaggcacaaggaaaatgtggagcagagctgtgagcccggccaccagagccccaactgcatcctcttcatcgagaacctgacagcccagcagtatggccactacttctgtgaggcccaggagggcagctacttccgggaggcccagcactggcagctgctgcctgaagatggcatcatggccgagcacctgctgggccacgcctgtgccctggccgccagcctgtggctgggcgtgctgcccaccctgaccctgggcctgctggtgcactag

SEQ ID NO: 169125 - DNA, 1506 bp, synthetic construct
  misc_feature 1..1506: note = Description of Artificial Sequence: Synthetic coding sequence
  source 1..1506: mol_type = other DNA
atgaggggctacgcccccttctccccagatgagaacagcctggtgctgtttgaaggagatgaggtgtacagcaccatcaggaagcaggagtacaacgggaagatcccccgcttccgccgcatccggggggagagcgagctgtacaccagtgacacagtgatgcagaacccccagttcatcaaggccaccatcgtgcaccaggaccaggcctatgatgacaagatctactacttcttccgggaggacaacccagacaagaaccctgaggcccccctgaatgtgtcccgggtggcccagctgtgccgcggggaccagggcggggagagcagcctgtctgtgtccaagtggaacaccttcctgaaggccatgctggtgtgcagtgatgctgccaccaacaagaacttcaaccggctgcaggatgtgttcctgctgcctgaccccagcggccagtggagggacaccagggtgtatggagtcttcagcaacccctggaactacagcgctgtgtgtgtgtacagcctgggggacatcgacaaggtgttccgcaccagcagcctgaagggctaccacagcagcctgcccaaccccaggcctgggaagtgcctgcctgaccagcagcccatccccacagagaccttccaggtggccgacagacaccctgaggtggcccagagggtggagcccatgggccccctgaagacccccctcttccacagcaagtaccactaccagaaggtggccgtgcacaggatgcaggccagccatggagagaccttccacgtgctgtacctgaccacagaccggggcaccatccacaaggtggtggagcctggagagcaggagcacagctttgccttcaacatcatggagatccagcccttcagaagagctgctgccatccagaccatgagcctggatgctgagaggaggaagctgtatgtgagcagccagtgggaggtgtcccaggtgcccctggacctgtgtgaggtgtatggaggcggctgccacggctgcctgatgagccgggacccctactgcggctgggaccagggccgctgcatcagcatctacagcagcgagaggtctgtgctgcagagcatcaacccagctgagccccacaaggaatgtcccaaccccaagccagacaaggcccccctgcagaaggtgtccctggcccccaacagccgctactacctgagctgccccatggagagcagacatgccacctacagctggaggcacaaggaaaatgtggagcagagctgtgagcccggccaccagagccccaactgcatcctcttcatcgagaacctgacagcccagcagtatggccactacttctgtgaggcccaggagggcagctacttccgggaggcccagcactggcagctgctgcctgaagatggcatcatggccgagcacctgctgggccacgcctgtgccctggccgccagcctgtggctgggcgtgctgcccaccctgaccctgggcctgctggtgcactag

SEQ ID NO: 169126 - DNA, 1959 bp, synthetic construct
  misc_feature 1..1959: note = Description of Artificial Sequence: Synthetic coding sequence
  source 1..1959: mol_type = other DNA
atgaccccacctcctcctggccgggccgcccccagcgccccccgggcccgggtgcccggccccccagcccggctgggcctgcccctgcggctgcggctgctgctgctgctgtgggccgctgctgccagcgcccagggccacctgcggagcggcccccgcatctttgctgtgtggaagggccacgtgggccaggacagagtggactttggccagacagagccccacacagtgctcttccacgagcccggcagcagctctgtgtgggtgggcggccggggcaaggtgtacctgtttgacttccctgagggcaagaatgcctctgtgaggacagactgtgagaactacatcaccctgctggagaggagaagtgagggcctgctggcctgtggcaccaatgcccggcaccccagctgctggaacctggtgaatggaacagtggtgcccctgggggagatgaggggctacgcccccttctccccagatgagaacagcctggtgctgtttgaaggagatgaggtgtacagcaccatcaggaagcaggagtacaacgggaagatcccccgcttccgccgcatccggggggagagcgagctgtacaccagtgacacagtgatgcagaacccccagttcatcaaggccaccatcgtgcaccaggaccaggcctatgatgacaagatctactacttcttccgggaggacaacccagacaagaaccctgaggcccccctgaatgtgtcccgggtggcccagctgtgccgcggggaccagggcggggagagcagcctgtctgtgtccaagtggaacaccttcctgaaggccatgctggtgtgcagtgatgctgccaccaacaagaacttcaaccggctgcaggatgtgttcctgctgcctgaccccagcggccagtggagggacaccagggtgtatggagtcttcagcaacccctggaactacagcgctgtgtgtgtgtacagcctgggggacatcgacaaggtgttccgcaccagcagcctgaagggctaccacagcagcctgcccaaccccaggcctgggaagtgcctgcctgaccagcagcccatccccacagagaccttccaggtggccgacagacaccctgaggtggcccagagggtggagcccatgggccccctgaagacccccctcttccacagcaagtaccactaccagaaggtggccgtgcacaggatgcaggccagccacggggagaccttccacgtgctgtacctgaccacagaccggggcaccatccacaaggtggtggagcccggggagcaggagcacagctttgccttcaacatcatggagatccagcccttccggcgggctgctgccatccagaccatgagcctggatgctgagaggaggaagctgtatgtgagcagccagtgggaggtgtcccaggtgcccctggacctgtgtgaggtgtatggaggcggctgccacggctgcctgatgagccgggacccctactgcggctgggaccagggccgctgcatcagcatctacagcagcgagaggtctgtgctgcagagcatcaacccagctgagccccacaaggagtgccccaaccccaagccagacaaggcccccctgcagaaggtgtccctggcccccaacagccgctactacctgagctgccccatggagagcagacatgccacctacagctggaggcacaaggaaaatgtggagcagagctgtgagcccggccaccagagccccaactgcatcctcttcatcgagaacctgacagcccagcagtatggccactacttctgtgaggcccaggagggcagctacttccgggaggcccagcactggcagctgctgcctgaagatggcatcatggccgagcacctgctgggccacgcctgtgccctggccgccagcctgtggctgggcgtgctgcccaccctgaccctgggcctgctggtgcactag

SEQ ID NO: 169127 - DNA, 1209 bp, synthetic construct
  misc_feature 1..1209: note = Description of Artificial Sequence: Synthetic coding sequence
  source 1..1209: mol_type = other DNA
atgaagcccaacatcatctttgtgctgagcctgctgctgatcctggagaagcaggccgctgtgatgggccagaagggcggcagcaagggccgcctgcccagcgagttcagccagttcccccacggccagaagggccagcactacagcggccagaagggcaagcagcagacagagagcaagggcagcttcagcatccagtacacctaccacgtggatgccaatgaccatgaccagagcaggaagagccagcagtatgacctgaatgccctgcacaagaccaccaagagccagaggcacctgggcggcagccagcagctgctgcacaacaagcaggagggccgggaccatgacaagagcaagggccacttccaccgggtggtgatccaccacaagggcggcaaggcccaccggggcacccagaaccccagccaggaccagggcaacagccccagcggcaagggcatcagcagccagtacagcaacacagaggagcggctgtgggtgcacggcctgagcaaggagcagacctctgtgtctggggcccagaagggcaggaagcagggcggcagccagagcagctatgtgctgcagacagaggagctggtggccaacaagcagcagcgggagaccaagaacagccaccagaacaagggccactaccagaatgtggtggaggtgcgggaggagcacagcagcaaggtgcagaccagcctgtgcccagcccaccaggacaagctgcagcacggcagcaaggacatcttcagcacccaggatgagctgctggtgtacaacaagaaccagcaccagaccaagaacctgaaccaggaccagcagcacggcaggaaggccaacaagatctcctaccagagcagcagcacagaggagcggcggctgcactacggggagaatggagtgcagaaggatgtgtcccagaggagcatctacagccagacagagaagctggtggccggcaagagccagatccaggcccccaaccccaagcaggagccctggcatggagaaaatgccaagggggagagcggccagagcaccaaccgggagcaggacctgctgagccatgagcagaagggccgccaccagcacggcagccatggaggcctggacatcgtcatcatcgagcaggaggatgacagcgacagacacctggcccagcacctgaacaatgacaggaaccccctcttcacctag

SEQ ID NO: 169128 - DNA, 1389 bp, synthetic construct
  misc_feature 1..1389: note = Description of Artificial Sequence: Synthetic coding sequence
  source 1..1389: mol_type = other DNA
atgaagcccaacatcatctttgtgctgagcctgctgctgatcctggagaagcaggccgctgtgatgggccagaagggcggcagcaagggccgcctgcccagcgagttcagccagttcccccacggccagaagggccagcactacagcggccagaagggcaagcagcagacagagagcaagggcagcttcagcatccagtacacctaccacgtggatgccaatgaccatgaccagagcaggaagagccagcagtatgacctgaatgccctgcacaagaccaccaagagccagaggcacctgggcggcagccagcagctgctgcacaacaagcaggagggccgggaccatgacaagagcaagggccacttccaccgggtggtgatccaccacaagggcggcaaggcccaccggggcacccagaaccccagccaggaccagggcaacagccccagcggcaagggcatcagcagccagtacagcaacacagaggagcggctgtgggtgcacggcctgagcaaggagcagacctctgtgtctggggcccagaagggcaggaagcagggcggcagccagagcagctatgtgctgcagacagaggagctggtggccaacaagcagcagcgggagaccaagaacagccaccagaacaagggccactaccagaatgtggtggaggtgcgggaggagcacagcagcaaggtgcagaccagcctgtgcccagcccaccaggacaagctgcagcacggcagcaaggacatcttcagcacccaggatgagctgctggtgtacaacaagaaccagcaccagaccaagaacctgaaccaggaccagcagcacggcaggaaggccaacaagatctcctaccagagcagcagcacagaggagcggcggctgcactacggggagaatggagtgcagaaggatgtgtcccagagcagcatctacagccagacagaggagaaggcccagggcaagagccagaagcagatcaccatccccagccaggagcaggagcacagccagaaggccaacaagatctcctaccagagcagcagcacagaggagcggcggctgcactacggggagaatggagtgcagaaggatgtgtcccagaggagcatctacagccagacagagaagctggtggccggcaagagccagatccaggcccccaaccccaagcaggagccctggcatggagaaaatgccaagggggagagcggccagagcaccaaccgggagcaggacctgctgagccatgagcagaagggccgccaccagcacggcagccatggaggcctggacatcgtcatcatcgagcaggaggatgacagcgacagacacctggcccagcacctgaacaatgacaggaaccccctcttcacctag

SEQ ID NO: 169129 - DNA, 1749 bp, synthetic construct
  misc_feature 1..1749: note = Description of Artificial Sequence: Synthetic coding sequence
  source 1..1749: mol_type = other DNA
atgaagagcatcatcctgtttgtgctgagcctgctgctgatcctggagaagcaggccgctgtgatgggccagaagggcggcagcaagggccagctgcccagcggcagcagccagttcccccacggccagaagggccagcactacttcggccagaaggaccagcagcacaccaagagcaagggcagcttcagcatccagcacacctaccacgtggacatcaatgaccatgactggaccaggaagagccagcagtatgacctgaatgccctgcacaaggccaccaagagcaagcagcacctgggcggcagccagcagctgctgaactacaagcaggagggccgggaccatgacaagagcaagggccacttccacatgatcgtcatccaccacaagggcggccaggcccaccacggcacccagaaccccagccaggaccagggcaacagccccagcggcaagggcctgagcagccagtgcagcaacacagagaagaggctgtgggtgcacggcctgagcaaggagcaggccagcgccagcggggcccagaagggccgcacccagggcggcagccagagcagctatgtgctgcagacagaggagctggtggtgaacaagcagcagcgggagaccaagaacagccaccagaacaagggccactaccagaatgtggtggatgtgcgggaggagcacagcagcaagctgcagaccagcctgcacccagcccaccaggaccggctgcagcacggccccaaggacatcttcaccacccaggatgagctgctggtgtacaacaagaaccagcaccagaccaagaacctgagccaggaccaggagcacggcaggaaggcccacaagatctcctaccccagcagcaggacagaggagcggcagctgcaccacggggagaagtctgtgcagaaggatgtgtccaagggcagcatcagcatccagacagaggagaagatccacggcaagagccagaaccaggtgaccatccacagccaggaccaggagcacggccacaaggagaacaagatctcctaccagagcagcagcacagaggagcggcacctgaactgtggggagaagggcatccagaagggcgtgtccaagggcagcatcagcatccagacagaggagcagatccacggcaagagccagaaccaggtgcgcatccccagccaggcccaggagtatggccacaaggagaacaagatctcctaccagagcagcagcacagaggagcggcggctgaacagcggggagaaggatgtgcagaagggcgtgtccaagggcagcatcagcatccagacagaggagaagatccacggcaagagccagaaccaggtgaccatccccagccaggaccaggagcacggccacaaggagaacaagatgagctaccagagcagcagcacagaggagcggcggctgaactacggcggcaagagcacccagaaggatgtgtcccagagcagcatctccttccagatcgagaagctggtggagggcaagagccagatccagacccccaaccccaaccaggaccagtggagcggccagaatgccaagggcaagagcggccagagcgctgacagcaagcaggacctgctgagccatgagcagaagggccgctacaagcaggagagcagcgagagccacaacatcgtcatcacagaacatgaggtggcccaggatgaccacctgacccagcagtacaatgaagatagaaaccccatcagcacctag

SEQ ID NO: 169130 - DNA, 447 bp, synthetic construct
  misc_feature 1..447: note = Description of Artificial Sequence: Synthetic coding sequence
  source 1..447: mol_type = other DNA
atggccgagagtgactgggacacagtgacagtgctgaggaagaagggccccacagctgcccaggccaagagcaagcaggccatcctggccgcccagaggagaggagaagatgtggagaccagcaagaagtgggccgccggccagaacaagcagcacagcatcaccaagaacacagccaagctggaccgggagacagaggagctgcaccacgacagagtgaccctggaggtgggcaaggtgatccagcagggccggcagagcaagggcctgacccagaaggacctggccaccaagatcaatgagaagccccaggtgattgctgactatgaaagtggccgggccatccccaacaaccaggtgctgggcaagattgaaagagccatcggcctgaagctgcggggcaaggacatcggcaagcccatcgagaagggcccccgggccaagtag

SEQ ID NO: 169131 - DNA, 8121 bp, synthetic construct
  misc_feature 1..8121: note = Description of Artificial Sequence: Synthetic coding sequence
  source 1..8121: mol_type = other DNA
atgagcacctgctgctggtgcaccccaggaggagccagcaccatcgacttcctgaagagatatgccagcaacaccccatctggagagttccagacagcagatgaggacctgtgctactgcctggagtgtgtggccgagtaccacaaggccagagatgagctgcccttcctgcacgaggtgctgtgggagctggagaccctgcggctcatcaaccactttgagaagtccatgaaggccgagattggagatgatgatgagctgtacatcgtggacaacaatggagagatgcccctgtttgacatcaccggccaggactttgagaacaagctgcgggtgcccctgctggagatcctgaagtacccctacctgctgctgcacgagcgggtgaatgagctgtgtgtggaggccctgtgcaggatggagcaggccaactgcagcttccaggtgtttgacaagcaccctggcatctacctgttcctggtgcaccccaatgagatggtgcggcgctgggccatcctgacagccaggaacctgggcaaggtggacagagatgactactatgacctgcaggaggtgctgctgtgcctcttcaaggtgattgagctgggcctgctggagagcccagacatctacaccagctctgtgctggagaagggcaagctgatcctgctgcccagccacatgtatgacaccaccaactacaagagctactggctgggcatctgcatgctgctgaccatcctggaggagcaggccatggacagcctgctgctgggcagtgacaagcagaatgacttcatgcagagcatcctgcacaccatggagcgggaggctgatgatgacagcgtggaccccttctggccagccctgcactgcttcatggtgatcctggaccggctgggcagcaaggtgtggggccagctgatggaccccatcgtggccttccagaccatcatcaacaatgccagctacaaccgggagatccgccacatccggaacagctctgtgaggaccaagctggagcctgagagctacctggatgacatggtgacctgcagccagatcgtgtacaactacaaccctgagaagaccaagaaggacagcggctggaggacagccatctgcccagactactgccccaacatgtatgaggagatggagaccctggcctctgtgctgcagagcgacatcggccaggacatgagggtgcacaacagcaccttcctgtggttcatcccctttgtgcagagcctgatggacctgaaggacctgggcgtggcctacatcgcccaggtggtgaaccacctgtacagcgaggtgaaggaggtgctgaaccagacagatgctgtgtgtgacaaggtgacagagttcttcctgctgatcctggtgtctgtcatcgagctgcacaggaacaagaagtgcctgcacctgctgtgggtgagcagccagcagtgggtggaggccgtggtgaagtgtgccaagctgcccaccacagccttcaccaggagcagcgagaagagcagcggcaactgcagcaaaggaacagccatgatcagcagcctgagcctgcacagcatgcccagcaacagcgtgcagctggcctacgtgcagctgatccgcagcctgctgaaggagggctaccagctgggccagcagagcctgtgcaagcgcttctgggacaagctgaacctcttcctgcggggcaacctgagcctgggctggcagctgaccagccaggagacccatgagctgcagagctgcctgaagcagatcatccggaacatcaagttcaaggccccaccctgcaacacctttgtggacctgaccagcgcctgcaagatcagccctgccagctacaacaaggaggagagcgagcagatgggcaagaccagcaggaaggacatgcactgcctggaggccagcagccccaccttcagcaaggagcccatgaaggtgcaggacagcgtgctgatcaaggctgacaacaccatcgagggggacaacaatgagcagaactacatcaaggatgtgaagctggaggaccacctgctggccggcagctgcctgaagcagagcagcaagaacatcttcacagaaagagctgaggaccagatcaagatcagcaccaggaagcagaagtctgtgaaggagatcagcagctacacccccaaggactgcaccagcagaaatggacctgagcggggctgtgaccggggcatcatcgtgtccacccggctgctgacagacagcagcacagatgccctggagaaggtgtccaccagcaatgaagacttcagcctgaaggatgatgccctggccaagaccagcaagaggaagaccaaggtgcagaaggatgagatctgtgccaagctgagccacgtgatcaagaagcagcacaggaagagcaccctggtggacaacaccatcaacctggatgagaacctgactgtgagcaacatcgagagcttctacagcaggaaggacacaggagtgcagaagggagatggcttcatccacaacctgagcctggaccccagcggcgtgctggatgacaagaatggagagcagaagagccagaacaacgtgctgcccaaggagaagcagctgaagaatgaggagctggtgatcttctccttccacgagaacaactgcaagatccaggagttccacgtggatggcaaggagctgatccccttcacagagatgaccaatgccagcgagaagaagagcagccccttcaaggacctgatgacagtgcctgagagcagagatgaggagatgagcaacagcaccagcgtcatctacagcaacctgacccgggagcaggccccagacatcagccccaagagtgacaccctgacagacagccagattgaccgggacctgcacaagctgagcctgctggcccaggccagcgtcatcaccttccccagcgacagcccccagaacagcagccagctgcagaggaaggtgaaggaggacaagcgctgcttcaccgccaaccagaacaacgtgggggacaccagccggggccaggtgatcatcatcagtgacagtgatgatgatgatgatgagcgcatcctgagcctggagaagctgaccaagcaggacaagatctgcctggagcgggagcaccctgagcagcacgtgtccacagtgaacagcaaggaggagaagaaccctgtgaaggaggagaagacagagaccctcttccagtttgaggagagtgacagccagtgctttgaatttgagagcagcagcgaggtgttttctgtgtggcaggaccacccagatgacaacaacagcgtgcaggatggagagaagaagtgcctggcccccatcgccaacaccaccaacggccagggctgcacagattatgtgtctgaggtggtgaagaagggagctgagggcatcgaggagcacacccggcccaggagcatctctgtggaggagttctgtgaaattgaggtgaagaagcccaagaggaagaggtctgagaagcccatggctgaagatcctgtgcggcccagcagctctgtgagaaatgaaggccagagcgacaccaacaagagggacctggtgggcaatgacttcaagagcattgacaggaggaccagcacccccaacagccgcatccagagggccaccaccgtgtcccagaagaagagcagcaagctgtgcacctgcacagagcccatcaggaaggtgcctgtgtccaagacccccaagaagacccacagtgatgccaagaagggccagaacagaagcagcaactacctgagctgcaggaccaccccagccatcgtgccccccaagaagttccggcagtgcccagagcccaccagcacagctgagaagctgggcctgaagaagggccccaggaaggcctatgagctgagccagaggagcctggactatgtggcccagctgcgggaccacggcaagacagtgggcgtggtggacaccaggaagaagaccaagctgatcagcccccagaacctgtctgtgaggaacaacaagaagctgctgaccagccaggagctgcagatgcagaggcagatccggcccaagagccagaagaacagaagaaggctgagtgactgtgagagcacagatgtgaagagagctggcagccacacagcccagaacagcgacatctttgtgcctgagagtgacagaagtgactacaactgcacaggaggaacagaggtgctggccaacagcaacaggaagcagctgatcaagtgcatgcccagcgagcctgagaccatcaaggccaagcacggcagccctgccacagatgatgcctgccccctgaaccagtgtgacagcgtggtgctgaatggcaccgtgcccaccaatgaggtgattgtgtccaccagcgaggaccccctgggcggcggggaccccacagcccggcacatcgagatggccgccctgaaggagggggagccagacagcagcagtgatgctgaggaggacaacctcttcctgacccagaatgaccctgaggacatggacctgtgcagccagatggagaatgacaactacaagctgattgagctgatccacggcaaggacacagtggaggtggaggaggacagcgtgtcccggccccagctggagagcctgagcggcaccaagtgcaagtacaaggactgcctggagaccaccaagaaccagggcgagtactgccccaagcacagcgaggtgaaggccgcagatgaagatgtgttcaggaagccaggcctgcccccaccagccagcaagcccctgcggcccaccaccaagatcttcagcagcaagagcaccagcagaattgctggcctgagcaagagcctggagaccagcagcgccctgagccccagcctgaagaacaagagcaagggcatccagagcatcctgaaggtgccccagcctgtgcccctcatcgcccagaagcctgtgggggagatgaagaacagctgcaatgtgctgcacccccagagccccaacaacagcaaccggcagggctgcaaggtgccctttggagagagcaagtacttccccagcagcagccctgtgaacatcctgctgagcagccagagcgtgtctgacacctttgtgaaggaggtgctgaagtggaagtatgagatgttcctgaactttggccagtgtggccccccagccagcctgtgccagagcatcagcaggcctgtgcctgtgcgcttccacaactacggggactacttcaacgtgttcttccccctgatggtgctgaacacctttgagaccgtggcccaggagtggctgaacagccccaaccgggagaacttctaccagctgcaggtgaggaagtttcctgctgactacatcaagtactgggagtttgctgtgtacctggaggagtgtgagctggccaagcagctgtaccccaaggaaaatgacctggtgttcctggcccctgagcgcatcaatgaggagaagaaggacacagaaagaaatgacatccaggacctgcacgagtaccacagcggctacgtgcacaagttccggaggacctctgtgatgagaaatggcaagacagagtgctacctgagcatccagacccaggagaacttccctgccaacctgaatgagctggtgaactgcatcgtcatcagcagcctggtgaccacccagaggaagctgaaggccatgagcctgctgggcagcaggaaccagctggcccgggctgtgctgaaccccaaccccatggacttctgcaccaaggacctgctgaccaccaccagcgagcgcatcatcgcctacctgcgggacttcaatgaagaccagaagaaggccatcgagacagcctatgccatggtgaagcacagccccagcgtggccaagatctgcctgatccacggccccccaggcaccgggaagagcaagaccatcgtgggcctgctgtaccgcctgctgacagagaaccagaggaagggccacagtgatgagaacagcaatgccaagatcaagcagaacagagtgctggtgtgtgcccccagcaatgctgctgtggatgagctgatgaagaagatcatcctggagttcaaggagaagtgcaaggacaagaagaaccccctgggcaactgtggggacatcaacctggtgcggctgggccctgagaagagcatcaacagcgaggtgctgaagttcagcctggacagccaggtgaaccacaggatgaagaaggagctgcccagccacgtgcaggccatgcacaagaggaaggagttcctggactaccagctggatgagctgagccggcagagggccctgtgccggggcggccgggagatccagaggcaggagctggatgagaacatcagcaaggtgtccaaggagcggcaggagctggccagcaagatcaaggaggtgcagggccggccccagaagacccagagcatcatcatcctggagagccacatcatctgctgcaccctgagcaccagcggcggcctgctgctggagagcgccttccggggccagggcggcgtgcccttcagctgtgtgattgtggatgaagctggccagagctgtgaaattgagaccctgacccccctcatccaccgctgcaacaagctgatcctggtgggggaccccaagcagctgccccccaccgtcatctccatgaaggcccaggagtatggctatgaccagagcatgatggcccgcttctgccgcctgctggaggagaatgtggagcacaacatgatcagccggctgcccatcctgcagctgactgtgcagtacaggatgcacccagacatctgcctcttccccagcaactacgtgtacaacagaaacctgaagaccaaccggcagacagaggccatccgctgcagcagtgactggcccttccagccctacctggtgtttgatgtgggagatggcagcgagcggcgggacaatgacagctacatcaacgtgcaggagatcaagctggtgatggagatcatcaagctgatcaaggacaagaggaaggatgtgtccttcaggaacatcggcatcatcacccactacaaggcccagaagaccatgatccagaaggacctggacaaggagtttgacaggaagggccctgctgaggtggacacagtggatgccttccagggccggcagaaggactgtgtgattgtgacctgtgtgcgggccaacagcatccagggcagcatcggcttcctggccagcctgcagaggctgaatgtgaccatcacccgggccaagtacagcctcttcatcctgggccacctgcggaccctgatgcagctgctgcccaggagcttctgtgtgcacgtgaaccacagccccttcttcagccctgagcccaagtacctgcactgggccctgaaggagaaccagcactggaaccagctgatccaggatgcccagaagagaggagccatcatcaagacctgtgacaagaactacagacatgatgctgtgaagatcctgaagctgaagcctgtgctgcagaggagcctgacccacccccccaccatcgcccctgagggcagccggccccagggcggcctgcccagcagcaagctggacagcggctttgccaagacctctgtggccgccagcctgtaccacacccccagcgacagcaaggagatcaccctgactgtgaccagcaaggaccctgagaggcctcctgtgcatgaccagctgcaggacccccggctgctgaagaggatgggcatcgaggtgaagggcggcatcttcctgtgggacccccagcccagcagcccccagcaccctggggccaccccacccactggagagcccggcttccctgtggtgcaccaggacctgagccacatccagcagcctgctgctgtggtggccgccctgagcagccacaagccccctgtgcggggggagcccccagctgccagccctgaggccagcacctgccagagcaaatgtgatgatcctgaggaggagctgtgccacagaagagaggcccgggccttcagcgagggggagcaggagaagtgtggcagcgagacccaccacaccaggaggaacagccgctgggacaagaggaccctggagcaggaggacagcagcagcaagaagaggaagctgctgtag

SEQ ID NO: 169132 - DNA, 7935 bp, synthetic construct
  misc_feature 1..7935: note = Description of Artificial Sequence: Synthetic coding sequence
  source 1..7935: mol_type = other DNA
atgagcacctgctgctggtgcaccccaggaggagccagcaccatcgacttcctgaagagatatgccagcaacaccccatctggagagttccagacagcagatgaggacctgtgctactgcctggagtgtgtggccgagtaccacaaggccagagatgagctgcccttcctgcacgaggtgctgtgggagctggagaccctgcggctcatcaaccactttgagaagtccatgaaggccgagattggagatgatgatgagctgtacatcgtggacaacaatggagagatgcccctgtttgacatcaccggccaggactttgagaacaagctgcgggtgcccctgctggagatcctgaagtacccctacctgctgctgcacgagcgggtgaatgagctgtgtgtggaggccctgtgcaggatggagcaggccaactgcagcttccaggtgtttgacaagcaccctggcatctacctgttcctggtgcaccccaatgagatggtgcggcgctgggccatcctgacagccaggaacctgggcaaggtggacagagatgactactatgacctgcaggaggtgctgctgtgcctcttcaaggtgattgagctgggcctgctggagagcccagacatctacaccagctctgtgctggagaagggcaagctgatcctgctgcccagccacatgtatgacaccaccaactacaagagctactggctgggcatctgcatgctgctgaccatcctggaggagcaggccatggacagcctgctgctgggcagtgacaagcagaatgacttcatgcagagcatcctgcacaccatggagcgggaggctgatgatgacagcgtggaccccttctggccagccctgcactgcttcatggtgatcctggaccggctgggcagcaaggtgtggggccagctgatggaccccatcgtggccttccagaccatcatcaacaatgccagctacaaccgggagatccgccacatccggaacagctctgtgaggaccaagctggagcctgagagctacctggatgacatggtgacctgcagccagatcgtgtacaactacaaccctgagaagaccaagaaggacagcggctggaggacagccatctgcccagactactgccccaacatgtatgaggagatggagaccctggcctctgtgctgcagagcgacatcggccaggacatgagggtgcacaacagcaccttcctgtggttcatcccctttgtgcagagcctgatggacctgaaggacctgggcgtggcctacatcgcccaggtggtgaaccacctgtacagcgaggtgaaggaggtgctgaaccagacagatgctgtgtgtgacaaggtgacagagttcttcctgctgatcctggtgtctgtcatcgagctgcacaggaacaagaagtgcctgcacctgctgtgggtgagcagccagcagtgggtggaggccgtggtgaagtgtgccaagctgcccaccacagccttcaccaggagcagcgagaagagcagcggcaactgcagcaaaggaacagccatgatcagcagcctgagcctgcacagcatgcccagcaacagcgtgcagctggcctacgtgcagctgatccgcagcctgctgaaggagggctaccagctgggccagcagagcctgtgcaagcgcttctgggacaagctgaacctcttcctgcggggcaacctgagcctgggctggcagctgaccagccaggagacccatgagctgcagagctgcctgaagcagatcatccggaacatcaagttcaaggccccaccctgcaacacctttgtggacctgaccagcgcctgcaagatcagccctgccagctacaacaaggaggagagcgagcagatgggcaagaccagcaggaaggacatgcactgcctggaggccagcagccccaccttcagcaaggagcccatgaaggtgcaggacagcgtgctgatcaaggctgacaacaccatcgagggggacaacaatgagcagaactacatcaaggatgtgaagctggaggaccacctgctggccggcagctgcctgaagcagagcagcaagaacatcttcacagaaagagctgaggaccagatcaagatcagcaccaggaagcagaagtctgtgaaggagatcagcagctacacccccaaggactgcaccagcagaaatggacctgagcggggctgtgaccggggcatcatcgtgtccacccggctgctgacagacagcagcacagatgccctggagaaggtgtccaccagcaatgaagacttcagcctgaaggatgatgccctggccaagaccagcaagaggaagaccaaggtgcagaaggatgagatctgtgccaagctgagccacgtgatcaagaagcagcacaggaagagcaccctggtggacaacaccatcaacctggatgagaacctgactgtgagcaacatcgagagcttctacagcaggaaggacacaggagtgcagaagggagatggcttcatccacaacctgagcctggaccccagcggcgtgctggatgacaagaatggagagcagaagagccagaacaacgtgctgcccaaggagaagcagctgaagaatgaggagctggtgatcttctccttccacgagaacaactgcaagatccaggagttccacgtggatggcaaggagctgatccccttcacagagatgaccaatgccagcgagaagaagagcagccccttcaaggacctgatgacagtgcctgagagcagagatgaggagatgagcaacagcaccagcgtcatctacagcaacctgacccgggagcaggccccagacatcagccccaagagtgacaccctgacagacagccagattgaccgggacctgcacaagctgagcctgctggcccaggccagcgtcatcaccttccccagcgacagcccccagaacagcagccagctgcagaggaaggtgaaggaggacaagcgctgcttcaccgccaaccagaacaacgtgggggacaccagccggggccaggtgatcatcatcagtgacagtgatgatgatgatgatgagcgcatcctgagcctggagaagctgaccaagcaggacaagatctgcctggagcgggagcaccctgagcagcacgtgtccacagtgaacagcaaggaggagaagaaccctgtgaaggaggagaagacagagaccctcttccagtttgaggagagtgacagccagtgctttgaatttgagagcagcagcgaggtgttttctgtgtggcaggaccacccagatgacaacaacagcgtgcaggatggagagaagaagtgcctggcccccatcgccaacaccaccaacggccagggctgcacagattatgtgtctgaggtggtgaagaagggagctgagggcatcgaggagcacacccggcccaggagcatctctgtggaggagttctgtgaaattgaggtgaagaagcccaagaggaagaggtctgagaagcccatggctgaagatcctgtgcggcccagcagctctgtgagaaatgaaggccagagcgacaccaacaagagggacctggtgggcaatgacttcaagagcattgacaggaggaccagcacccccaacagccgcatccagagggccaccaccgtgtcccagaagaagagcagcaagctgtgcacctgcacagagcccatcaggaaggtgcctgtgtccaagacccccaagaagacccacagtgatgccaagaagggccagaacagaagcagcaactacctgagctgcaggaccaccccagccatcgtgccccccaagaagttccggcagtgcccagagcccaccagcacagctgagaagctgggcctgaagaagggccccaggaaggcctatgagctgagccagaggagcctggactatgtggcccagctgcgggaccacggcaagacagtgggcgtggtggacaccaggaagaagaccaagctgatcagcccccagaacctgtctgtgaggaacaacaagaagctgctgaccagccaggagctgcagatgcagaggcagatccggcccaagagccagaagaacagaagaaggctgagtgactgtgagagcacagatgtgaagagagctggcagccacacagcccagaacagcgacatctttgtgcctgagagtgacagaagtgactacaactgcacaggaggaacagaggtgctggccaacagcaacaggaagcagctgatcaagtgcatgcccagcgagcctgagaccatcaaggccaagcacggcagccctgccacagatgatgcctgccccctgaaccagtgtgacagcgtggtgctgaatggcaccgtgcccaccaatgaggtgattgtgtccaccagcgaggaccccctgggcggcggggaccccacagcccggcacatcgagatggccgccctgaaggagggggagccagacagcagcagtgatgctgaggaggacaacctcttcctgacccagaatgaccctgaggacatggacctgtgcagccagatggagaatgacaactacaagctgattgagctgatccacggcaaggacacagtggaggtggaggaggacagcgtgtcccggccccagctggagagcctgagcggcaccaagtgcaagtacaaggactgcctggagaccaccaagaaccagggcgagtactgccccaagcacagcgaggtgaaggccgcagatgaagatgtgttcaggaagccaggcctgcccccaccagccagcaagcccctgcggcccaccaccaagatcttcagcagcaagagcaccagcagaattgctggcctgagcaagagcctggagaccagcagcgccctgagccccagcctgaagaacaagagcaagggcatccagagcatcctgaaggtgccccagcctgtgcccctcatcgcccagaagcctgtgggggagatgaagaacagctgcaatgtgctgcacccccagagccccaacaacagcaaccggcagggctgcaaggtgccctttggagagagcaagtacttccccagcagcagccctgtgaacatcctgctgagcagccagagcgtgtctgacacctttgtgaaggaggtgctgaagtggaagtatgagatgttcctgaactttggccagtgtggccccccagccagcctgtgccagagcatcagcaggcctgtgcctgtgcgcttccacaactacggggactacttcaacgtgttcttccccctgatggtgctgaacacctttgagaccgtggcccaggagtggctgaacagccccaaccgggagaacttctaccagctgcaggtgaggaagtttcctgctgactacatcaagtactgggagtttgctgtgtacctggaggagtgtgagctggccaagcagctgtaccccaaggaaaatgacctggtgttcctggcccctgagcgcatcaatgaggagaagaaggacacagaaagaaatgacatccaggacctgcacgagtaccacagcggctacgtgcacaagttccggaggacctctgtgatgagaaatggcaagacagagtgctacctgagcatccagacccaggagaacttccctgccaacctgaatgagctggtgaactgcatcgtcatcagcagcctggtgaccacccagaggaagctgaaggccatgagcctgctgggcagcaggaaccagctggcccgggctgtgctgaaccccaaccccatggacttctgcaccaaggacctgctgaccaccaccagcgagcgcatcatcgcctacctgcgggacttcaatgaagaccagaagaaggccatcgagacagcctatgccatggtgaagcacagccccagcgtggccaagatctgcctgatccacggccccccaggcaccgggaagagcaagaccatcgtgggcctgctgtaccgcctgctgacagagaaccagaggaagggccacagtgatgagaacagcaatgccaagatcaagcagaacagagtgctggtgtgtgcccccagcaatgctgctgtggatgagctgatgaagaagatcatcctggagttcaaggagaagtgcaaggacaagaagaaccccctgggcaactgtggggacatcaacctggtgcggctgggccctgagaagagcatcaacagcgaggtgctgaagttcagcctggacagccaggtgaaccacaggatgaagaaggagctgcccagccacgtgcaggccatgcacaagaggaaggagttcctggactaccagctggatgagctgagccggcagagggccctgtgccggggcggccgggagatccagaggcaggagctggatgagaacatcagcaaggtgtccaaggagcggcaggagctggccagcaagatcaaggaggtgcagggccggccccagaagacccagagcatcatcatcctggagagccacatcatctgctgcaccctgagcaccagcggcggcctgctgctggagagcgccttccggggccagggcggcgtgcccttcagctgtgtgattgtggatgaagctggccagagctgtgaaattgagaccctgacccccctcatccaccgctgcaacaagctgatcctggtgggggaccccaagcagctgccccccaccgtcatctccatgaaggcccaggagtatggctatgaccagagcatgatggcccgcttctgccgcctgctggaggagaatgtggagcacaacatgatcagccggctgcccatcctgcagctgactgtgcagtacaggatgcacccagacatctgcctcttccccagcaactacgtgtacaacagaaacctgaagaccaaccggcagacagaggccatccgctgcagcagtgactggcccttccagccctacctggtgtttgatgtgggagatggcagcgagcggcgggacaatgacagctacatcaacgtgcaggagatcaagctggtgatggagatcatcaagctgatcaaggacaagaggaaggatgtgtccttcaggaacatcggcatcatcacccactacaaggcccagaagaccatgatccagaaggacctggacaaggagtttgacaggaagggcttcctggccagcctgcagaggctgaatgtgaccatcacccgggccaagtacagcctcttcatcctgggccacctgcggaccctgatggagaaccagcactggaaccagctgatccaggatgcccagaagagaggagccatcatcaagacctgtgacaagaactacagacatgatgctgtgaagatcctgaagctgaagcctgtgctgcagaggagcctgacccacccccccaccatcgcccctgagggcagccggccccagggcggcctgcccagcagcaagctggacagcggctttgccaagacctctgtggccgccagcctgtaccacacccccagcgacagcaaggagatcaccctgactgtgaccagcaaggaccctgagaggcctcctgtgcatgaccagctgcaggacccccggctgctgaagaggatgggcatcgaggtgaagggcggcatcttcctgtgggacccccagcccagcagcccccagcaccctggggccaccccacccactggagagcccggcttccctgtggtgcaccaggacctgagccacatccagcagcctgctgctgtggtggccgccctgagcagccacaagccccctgtgcggggggagcccccagctgccagccctgaggccagcacctgccagagcaaatgtgatgatcctgaggaggagctgtgccacagaagagaggcccgggccttcagcgagggggagcaggagaagtgtggcagcgagacccaccacaccaggaggaacagccgctgggacaagaggaccctggagcaggaggacagcagcagcaagaagaggaagctgctgtag

SEQ ID NO: 169133 - DNA, 2847 bp, synthetic construct
  misc_feature 1..2847: note = Description of Artificial Sequence: Synthetic coding sequence
  source 1..2847: mol_type = other DNA
gtggcccaggagtggctgaacagccccaaccgggagaacttctaccagctgcaggtgaggaagtttcctgctgactacatcaagtactgggagtttgctgtgtacctggaggagtgtgagctggccaagcagctgtaccccaaggaaaatgacctggtgttcctggcccctgagcgcatcaatgaggagaagaaggacacagaaagaaatgacatccaggacctgcacgagtaccacagcggctacgtgcacaagttccggaggacctctgtgatgagaaatggcaagacagagtgctacctgagcatccagacccaggagaacttccctgccaacctgaatgagctggtgaactgcatcgtcatcagcagcctggtgaccacccagaggaagctgaaggccatgagcctgctgggcagcaggaaccagctggcccgggctgtgctgaaccccaaccccatggacttctgcaccaaggacctgctgaccaccaccagcgagcgcatcatcgcctacctgcgggacttcaatgaagaccagaagaaggccatcgagacagcctatgccatggtgaagcacagccccagcgtggccaagatctgcctgatccacggccccccaggcaccgggaagagcaagaccatcgtgggcctgctgtaccgcctgctgacagagaaccagaggaagggccacagtgatgagaacagcaatgccaagatcaagcagaacagagtgctggtgtgtgcccccagcaatgctgctgtggatgagctgatgaagaagatcatcctggagttcaaggagaagtgcaaggacaagaagaaccccctgggcaactgtggggacatcaacctggtgcggctgggccctgagaagagcatcaacagcgaggtgctgaagttcagcctggacagccaggtgaaccacaggatgaagaaggagctgcccagccacgtgcaggccatgcacaagaggaaggagttcctggactaccagctggatgagctgagccggcagagggccctgtgccggggcggccgggagatccagaggcaggagctggatgagaacatcagcaaggtgtccaaggagcggcaggagctggccagcaagatcaaggaggtgcagggccggccccagaagacccagagcatcatcatcctggagagccacatcatctgctgcaccctgagcaccagcggcggcctgctgctggagagcgccttccggggccagggcggcgtgcccttcagctgtgtgattgtggatgaagctggccagagctgtgaaattgagaccctgacccccctcatccaccgctgcaacaagctgatcctggtgggggaccccaagcagctgccccccaccgtcatctccatgaaggcccaggagtatggctatgaccagagcatgatggcccgcttctgccgcctgctggaggagaatgtggagcacaacatgatcagccggctgcccatcctgcagctgactgtgcagtacaggatgcacccagacatctgcctcttccccagcaactacgtgtacaacagaaacctgaagaccaaccggcagacagaggccatccgctgcagcagtgactggcccttccagccctacctggtgtttgatgtgggagatggcagcgagcggcgggacaatgacagctacatcaacgtgcaggagatcaagctggtgatggagatcatcaagctgatcaaggacaagaggaaggatgtgtccttcaggaacatcggcatcatcacccactacaaggcccagaagaccatgatccagaaggacctggacaaggagtttgacaggaagggccctgctgaggtggacacagtggatgccttccagggccggcagaaggactgtgtgattgtgacctgtgtgcgggccaacagcatccagggcagcatcggcttcctggccagcctgcagaggctgaatgtgaccatcacccgggccaagtacagcctcttcatcctgggccacctgcggaccctgatgcagctgctgcccaggagcttctgtgtgcacgtgaaccacagccccttcttcagccctgagcccaagtacctgcactgggccctgaaggagaaccagcactggaaccagctgatccaggatgcccagaagagaggagccatcatcaagacctgtgacaagaactacagacatgatgctgtgaagatcctgaagctgaagcctgtgctgcagaggagcctgacccacccccccaccatcgcccctgagggcagccggccccagggcggcctgcccagcagcaagctggacagcggctttgccaagacctctgtggccgccagcctgtaccacacccccagcgacagcaaggagatcaccctgactgtgaccagcaaggaccctgagaggcctcctgtgcatgaccagctgcaggacccccggctgctgaagaggatgggcatcgaggtgaagggcggcatcttcctgtgggacccccagcccagcagcccccagcaccctggggccaccccacccactggagagcccggcttccctgtggtgcaccaggacctgagccacatccagcagcctgctgctgtggtggccgccctgagcagccacaagccccctgtgcggggggagcccccagctgccagccctgaggccagcacctgccagagcaaatgtgatgatcctgaggaggagctgtgccacagaagagaggcccgggccttcagcgagggggagcaggagaagtgtggcagcgagacccaccacaccaggaggaacagccgctgggacaagaggaccctggagcaggaggacagcagcagcaagaagaggaagctgctgtag

SEQ ID NO: 169134 - DNA, 1269 bp, synthetic construct
  misc_feature 1..1269: note = Description of Artificial Sequence: Synthetic coding sequence
  source 1..1269: mol_type = other DNA
atgagcaccagctatggctgcttctggaggcgcttcatccacggcatcggccgcagcggggacatctctgctgtgcagcccaaggccgccggcagcagcctgctgaacaagatcaccaacagcctggtgctggacatcatcaagctggccggcgtgcacacagtggccaactgctttgtggtgcccatggccaccggcatgagcctgaccctgtgcttcctgaccctgcggcacaagaggcccaaggccaagtacatcatctggcccagaattgaccagaagagctgcttcaagtccatgatcacagctggctttgagcctgtggtgattgaaaatgtgctggagggagatgagctgaggacagacctgaaggctgtggaggccaaggtgcaggagctgggccctgactgcatcctgtgcatccacagcaccaccagctgctttgccccccgggtgcctgaccggctggaggagctggccgtcatctgtgccaactatgacatcccccacatcgtgaacaatgcctacggcgtgcagagcagcaagtgcatgcacctgatccagcagggcgcccgggtgggcagaattgatgcctttgtgcagagcctggacaagaacttcatggtgcctgtgggcggggccatcatcgccggcttcaatgacagcttcatccaggagatcagcaagatgtacccaggccgggccagcgccagccccagcctggatgtgctgatcaccctgctgagcctgggcagcaatggctacaagaagctgctgaaggagaggaaggagatgttctcctacctgagcaaccagatcaagaagctgtctgaggcctacaatgaaaggctgctgcacaccccccacaaccccatcagcctggccatgaccctgaagaccctggatgagcaccgggacaaggctgtgacccagctgggctccatgctgttcacccggcaggtgtctggggcccgggtggtgcccctgggctccatgcagacagtgtctggctacaccttccggggcttcatgagccacaccaacaactacccctgtgcctacctgaatgctgccagcgccatcggcatgaagatgcaggatgtggacctcttcatcaagaggctggaccgctgcctgaaggctgtgaggaaggagaggagcaaggagagtgatgacaactatgacaagacagaagatgtggacatcgaggagatggccctgaagctggacaacgtgctgctggacacctaccaggatgccagcagctag

SEQ ID NO: 169135 - DNA, 1506 bp, synthetic construct
  misc_feature 1..1506: note = Description of Artificial Sequence: Synthetic coding sequence
  source 1..1506: mol_type = other DNA
atgaaccgggagagctttgctgctggggagcggctggtgtccccagcctacgtgcggcagggctgtgaggcccggcgcagccatgagcacctgatccggctgctgctggagaagggcaagtgcccagaaaatggctgggatgagagcaccctggagctgttcctgcacgagctggccatcatggacagcaacaacttcctgggcaactgtggggtgggggagcgggagggccgggtggccagcgccctggtggcccggcggcactaccgcttcatccatggaattggccgcagcggggacatctctgctgtgcagcccaaggctgctggcagcagcctgctgaacaagatcaccaacagcctggtgctggacatcatcaagctggccggcgtgcacacagtggccaactgctttgtggtgcccatggccaccggcatgagcctgaccctgtgcttcctgaccctgcggcacaagaggcccaaggccaagtacatcatctggcccagaattgaccagaagagctgcttcaagtccatgatcacagctggctttgagcctgtggtgattgaaaatgtgctggagggagatgagctgaggacagacctgaaggctgtggaggccaaggtgcaggagctgggccctgactgcatcctgtgcatccacagcaccaccagctgctttgccccccgggtgcctgaccggctggaggagctggccgtcatctgtgccaactatgacatcccccacatcgtgaacaatgcctatggagtgcagagcagcaagtgcatgcacctgatccagcagggcgcccgggtgggcagaattgatgcctttgtgcagagcctggacaagaacttcatggtgcctgtgggcggggccatcatcgccggcttcaatgacagcttcatccaggagatcagcaagatgtacccaggccgggccagcgccagccccagcctggatgtgctgatcaccctgctgagcctgggcagcaatggctacaagaagctgctgaaggagaggaaggagatgttctcctacctgagcaaccagatcaagaagctgtctgaggcctacaatgaaaggctgctgcacaccccccacaaccccatcagcctggccatgaccctgaagaccctggatgagcaccgggacaaggctgtgacccagctgggctccatgctgttcacccggcaggtgtctggggcccgggtggtgcccctgggctccatgcagacagtgtctggctacaccttccggggcttcatgagccacaccaacaactacccctgtgcctacctgaatgctgccagcgccatcggcatgaagatgcaggatgtggacctcttcatcaagaggctggaccgctgcctgaaggctgtgaggaaggagaggagcaaggagagtgatgacaactatgacaagacagaagatgtggacatcgaggagatggccctgaagctggacaacgtgctgctggacacctaccaggatgccagcagctag

SEQ ID NO: 169136 - DNA, 903 bp, synthetic construct
  misc_feature 1..903: note = Description of Artificial Sequence: Synthetic coding sequence
  source 1..903: mol_type = other DNA
atggagggcgtgctgtacaagtggaccaactacctgaccggctggcagccccgctggtttgtgctggacaatggcatcctgagctactatgacagccaggatgatgtgtgcaagggcagcaagggcagcatcaagatggctgtgtgtgagatcaaggtgcacagcgctgacaacaccaggatggagctgatcatccctggagagcagcacttctacatgaaggctgtgaatgctgctgagcggcagcgctggctggtggccctgggcagcagcaaggcctgcctgacagacaccaggaccaagaaggagaaggagatcagcgagaccagcgagagcctgaagaccaagatgtctgagctgcggctgtactgtgacctgctgatgcagcaggtgcacaccatccaggagtttgtgcaccatgatgagaaccacagcagccccagcgctgagaacatgaatgaggccagcagcctgctgagcgccacctgcaacaccttcatcaccaccctggaggagtgtgtgaagatcgccaatgccaagttcaagccagagatgttccagctgcaccacccagaccccctggtgtcccctgtgagccccagccctgtgcagatgatgaagaggtctgtgagccaccctggcagctgcagcagcgagaggagcagccacagcatcaaggagcctgtgtccaccctgcaccggctgagccagaggagaagaaggacctacagcgacacagacagctgcagcgacatccccctggaggaccctgacaggcctgtgcactgcagcaagaacaccctgaatggagacctggccagcgccaccatccctgaggagagccggctgatggccaagaagcagagcgagagcgaggacaccctgcccagcttcagcagctag

SEQ ID NO: 169137 - DNA, 1104 bp, synthetic construct
  misc_feature 1..1104: note = Description of Artificial Sequence: Synthetic coding sequence
  source 1..1104: mol_type = other DNA
atggacaaggagtatgtgggctttgctgccctgcccaaccagctgcacaggaagtctgtgaagaagggctttgacttcaccctgatggtggccggggagagcggcctgggcaagagcaccctcatcaacagcctcttcctgaccaacctgtatgaggaccggcaggtgcctgaggccagcgcccggctgacccagaccctggccattgaaagaagaggagtggagattgaggagggcggcgtgaaggtgaagctgaccctggtggacaccccaggctttggagacagcgtggactgcagcgactgctggctgcctgtggtgaagttcatcgaggagcagtttgagcagtacctgagagatgagagcggcctgaacaggaagaacatccaggacagccgggtgcactgctgcctgtacttcatcagccccttcggccggggcctgcggcccctggatgtggccttcctgcgggctgtgcatgagaaggtgaacatcatccctgtgattggcaaggcagatgccctgatgccccaggagacccaggccctgaagcagaagatccgggaccagctgaaggaggaggagatccacatctaccagttcccagaatgtgacagtgatgaagatgaggacttcaagaggcaggatgctgagatgaaggagagcatcccctttgctgtggtgggcagctgtgaggtggtgagagatggcggcaacagacctgtgcggggccgccgctacagctggggcaccgtggaggtggagaacccccaccactgtgacttcctgaacctgcggaggatgctggtgcagacccacctgcaggacctgaaggaggtgacccatgacctgctgtatgagggctaccgggcccgctgcctgcagagcctggcccggcctggggcccgggaccgggccagccgcagcaagctgagccggcagagcgccacagagatccccctgcccatgctgcccctggccgacacagagaagctgatccgggagaaggatgaggagctgcggaggatgcaggagatgctggagaagatgcaggcccagatgcagcagagccaggcccagggcgagcagagtgatgccctgtag

SEQ ID NO: 169138 - DNA, 1104 bp, synthetic construct; identical to SEQ ID NO: 169137
  misc_feature 1..1104: note = Description of Artificial Sequence: Synthetic coding sequence
  source 1..1104: mol_type = other DNA

SEQ ID NO: 169139 - DNA, 966 bp, synthetic construct
  misc_feature 1..966: note = Description of Artificial Sequence: Synthetic coding sequence
  source 1..966: mol_type = other DNA
atgatgaaccgctactaccagcccatcgtggactacattgatgcccagtttgaggcctacctgcaggaggagctgaagatcaagaggagcctcttcacctaccatgacagccgcatccacgtgtgcctgtacttcatcagccccaccggccacagcctgaagaccctggacctgctgaccatgaagaacctggacagcaaggtgaacatcatccctgtgattgccaaggctgacacagtgtccaagacagagctgcagaagttcaagatcaagctgatgtctgagctggtgtccaatggagtgcagatctaccagttccccacagatgatgacaccatcgccaaggtgaatgctgccatgaatggccagctgccctttgctgtggtgggctccatggatgaggtgaaggtgggcaacaagatggtgaaggcccggcagtacccctggggcgtggtgcaggtggagaatgaaaaccactgtgactttgtgaagctgcgggagatgctgatctgcaccaacatggaggacctgcgggagcagacccacaccaggcactatgagctgtaccgccgctgcaagctggaggagatgggcttcacagatgtgggccctgagaacaagcctgtgtctgtgcaggagacctatgaggccaagagacatgagttccatggagagcggcagaggaaggaggaggagatgaagcagatgtttgtgcagagggtgaaggagaaggaggccatcctgaaggaggccgagcgggagctgcaggccaagtttgagcacctgaagaggctgcaccaggaggagaggatgaagctggaggagaagaggcggctgctggaggaggagatcatcgccttcagcaagaagaaggccaccagcgagatcttccacagccagagcttcctggccaccggcagcaacctgaggaaggacaaggacaggaagaacagcaacttcctgtag

SEQ ID NO: 169140 - DNA, 954 bp, synthetic construct
  misc_feature 1..954: note = Description of Artificial Sequence: Synthetic coding sequence
  source 1..954: mol_type = other DNA
atgagcggccacgtgggctttgagagcctgcctgaccagctggtgaacagaagcatccagcagggcttctgcttcaacatcctgtgtgtgggggagactggaattggcaagagcaccctgattgacaccctcttcaacaccaactttgaggactatgagagcagccacttctgccccaacgtgaagctgaaggcccagacctatgagctgcaggagagcaatgtgcagctgaagctgaccatcgtgaacacagtgggctttggagaccagatcaacaaggaggagagctaccagcccatcgtggactacattgatgcccagtttgaggcctacctgcaggaggagctgaagatcaagaggagcctcttcacctaccatgacagccgcatccacgtgtgcctgtacttcatcagccccaccggccacagcctgaagaccctggacctgctgaccatgaagaacctggacagcaaggtgaacatcatccctgtgattgccaaggctgacacagtgtccaagacagagctgcagaagttcaagatcaagctgatgtctgagctggtgtccaatggagtgcagatctaccagttccccacagatgatgacaccatcgccaaggtgaatgctgccatgaatggccagctgccctttgctgtggtgggctccatggatgaggtgaaggtgggcaacaagatggtgaaggcccggcagtacccctggggcgtggtgcaggtggagaatgaaaaccactgtgactttgtgaagctgcgggagatgctgatctgcaccaacatggaggacctgcgggagcagacccacaccaggcactatgagctgtaccgccgctgcaagctggaggagatgggcttcacagatgtgggccctgagaacaagcctgtgtcctaccggcccaacctgagcaccctgcgggacttcaccaagaagcgggagtag

SEQ ID NO: 169141 - DNA, 1635 bp, synthetic construct
  misc_feature 1..1635: note = Description of Artificial Sequence: Synthetic coding sequence
  source 1..1635: mol_type = other DNA
atggccagcagcgaggtggcccggcacctgctcttccagagccacatggccaccaagaccacctgcatgagcagccagggcagtgatgatgagcagatcaagcgggagaacatccgcagcctgaccatgagcggccacgtgggctttgagagcctgcctgaccagctggtgaacagaagcatccagcagggcttctgcttcaacatcctgtgtgtgggggagactggaattggcaagagcaccctgattgacaccctcttcaacaccaactttgaggactatgagagcagccacttctgccccaacgtgaagctgaaggcccagacctatgagctgcaggagagcaatgtgcagctgaagctgaccatcgtgaacacagtgggctttggagaccagatcaacaaggaggagagctaccagcccatcgtggactacattgatgcccagtttgaggcctacctgcaggaggagctgaagatcaagaggagcctcttcacctaccatgacagccgcatccacgtgtgcctgtacttcatcagccccaccggccacagcctgaagaccctggacctgctgaccatgaagaacctggacagcaaggtgaacatcatccctgtgattgccaaggctgacacagtgtccaagacagagctgcagaagttcaagatcaagctgatgtctgagctggtgtccaatggagtgcagatctaccagttccccacagatgatgacaccatcgccaaggtgaatgctgccatgaatggccagctgccctttgctgtggtgggctccatggatgaggtgaaggtgggcaacaagatggtgaaggcccggcagtacccctggggcgtggtgcaggtggagaatgaaaaccactgtgactttgtgaagctgcgggagatgctgatctgcaccaacatggaggacctgcgggagcagacccacaccaggcactatgagctgtaccgccgctgcaagctggaggagatgggcttcacagatgtgggccctgagaacaagcctgtgtctgtgcaggagacctatgaggccaagagacatgagttccacggggagcggcagaggaaggaggaggagatgaagcagatgtttgtgcagagggtgaaggagaaggaggccatcctgaaggaggccgagcgggagctgcaggccaagtttgagcacctgaagaggctgcaccaggaggagaggatgaagctggaggagaagaggcggctgctggaggaggagatcatcgccttcagcaagaagaaggccaccagcgagatcttccacagccagagcttcctggccaccggcagcaacctgaggaaggacaaggacaggaagaaggagcccggctgccgctttgagctgctgtgcattgatgtgcgggcctgtgagaccaatggaggcaggaaggatgctgagaaggcccccatcttctgcaagacagaggtgcctgagcaccggcgcagcagcagccaggccaacttcatcaagaagaagctggaggtgtgctttgattttgctgtgatctgcttcatcaccagcatctttggagagcagccccagctgctgatcttcatggagaagtacttccaggtgcagggccagtacatcagccagagcgagtag

SEQ ID NO: 169142 - DNA, 1365 bp, synthetic construct
  misc_feature 1..1365: note = Description of Artificial Sequence: Synthetic coding sequence
  source 1..1365: mol_type = other DNA
atggccagcagcgaggtggcccggcacctgctcttccagagccacatggccaccaagaccacctgcatgagcagccagggcagtgatgatgagcagatcaagcgggagaacatccgcagcctgaccatgagcggccacgtgggctttgagagcctgcctgaccagctggtgaacagaagcatccagcagggcttctgcttcaacatcctgtgtgtgggggagactggaattggcaagagcaccctgattgacaccctcttcaacaccaactttgaggactatgagagcagccacttctgccccaacgtgaagctgaaggcccagacctatgagctgcaggagagcaatgtgcagctgaagctgaccatcgtgaacacagtgggctttggagaccagatcaacaaggaggagagctaccagcccatcgtggactacattgatgcccagtttgaggcctacctgcaggaggagctgaagatcaagaggagcctcttcacctaccatgacagccgcatccacgtgtgcctgtacttcatcagccccaccggccacagcctgaagaccctggacctgctgaccatgaagaacctggacagcaaggtgaacatcatccctgtgattgccaaggctgacacagtgtccaagacagagctgcagaagttcaagatcaagctgatgtctgagctggtgtccaatggagtgcagatctaccagttccccacagatgatgacaccatcgccaaggtgaatgctgccatgaatggccagctgccctttgctgtggtgggctccatggatgaggtgaaggtgggcaacaagatggtgaaggcccggcagtacccctggggcgtggtgcaggtggagaatgaaaaccactgtgactttgtgaagctgcgggagatgctgatctgcaccaacatggaggacctgcgggagcagacccacaccaggcactatgagctgtaccgccgctgcaagctggaggagatgggcttcacagatgtgggccctgagaacaagcctgtgtctgtgcaggagacctatgaggccaagagacatgagttccacggggagcggcagaggaaggaggaggagatgaagcagatgtttgtgcagagggtgaaggagaaggaggccatcctgaaggaggccgagcgggagctgcaggccaagtttgagcacctgaagaggctgcaccaggaggagaggatgaagctggaggagaagaggcggctgctggaggaggagatcatcgccttcagcaagaagaaggccaccagcgagatcttccacagccagagcttcctggccaccggcagcaacctgaggaaggacaaggacaggaagaacagcaacttcctgtag

SEQ ID NO: 169143 - DNA, 1296 bp, synthetic construct
  misc_feature 1..1296: note = Description of Artificial Sequence: Synthetic coding sequence
  source 1..1296: mol_type = other DNA
atggccagcagcgaggtggcccggcacctgaagcgggagaacatccgcagcctgaccatgagcggccacgtgggctttgagagcctgcctgaccagctggtgaacagaagcatccagcagggcttctgcttcaacatcctgtgtgtgggggagaccggcatcggcaagagcaccctgattgacaccctcttcaacaccaactttgaagattatgagagcagccacttctgccccaacgtgaagctgaaggcccagacctatgagctgcaggagagcaatgtgcagctgaagctgaccatcgtgaacacagtgggctttggagaccagatcaacaaggaggagagctaccagcccatcgtggactacattgatgcccagtttgaggcctacctgcaggaggagctgaagatcaagaggagcctcttcacctaccatgacagccgcatccacgtgtgcctgtacttcatcagccccaccggccacagcctgaagaccctggacctgctgaccatgaagaacctggacagcaaggtgaacatcatccctgtgattgccaaggctgacacagtgtccaagacagagctgcagaagttcaagatcaagctgatgtctgagctggtgtccaatggagtgcagatctaccagttccccacagatgatgacaccatcgccaaggtgaatgctgccatgaatggccagctgccctttgctgtggtgggctccatggatgaggtgaaggtgggcaacaagatggtgaaggcccggcagtacccctggggcgtggtgcaggtggagaatgaaaaccactgtgactttgtgaagctgcgggagatgctgatctgcaccaacatggaggacctgcgggagcagacccacaccaggcactatgagctgtaccgccgctgcaagctggaggagatgggcttcacagatgtgggccctgagaacaagcctgtgtctgtgcaggagacctatgaggccaagagacatgagttccatggagagcggcagaggaaggaggaggagatgaagcagatgtttgtgcagagggtgaaggagaaggaggccatcctgaaggaggccgagcgggagctgcaggccaagtttgagcacctgaagaggctgcaccaggaggagaggatgaagctggaggagaagaggcggctgctggaggaggagatcatcgccttcagcaagaagaaggccaccagcgagatcttccacagccagagcttcctggccaccggcagcaacctgaggaaggacaaggacaggaagaacagcaacttcctgtag

SEQ ID NO: 169144 - DNA, 1353 bp, synthetic construct
  misc_feature 1..1353: note = Description of Artificial Sequence: Synthetic coding sequence
  source 1..1353: mol_type = other DNA
atggccagcagcgaggtggcccggcacctgctcttccagagccacatggccaccaagaccacctgcatgagcagccagggcagtgatgatgagcagatcaagcgggagaacatccgcagcctgaccatgagcggccacgtgggctttgagagcctgcctgaccagctggtgaacagaagcatccagcagggcttctgcttcaacatcctgtgtgtgggggagactggaattggcaagagcaccctgattgacaccctcttcaacaccaactttgaggactatgagagcagccacttctgccccaacgtgaagctgaaggcccagacctatgagctgcaggagagcaatgtgcagctgaagctgaccatcgtgaacacagtgggctttggagaccagatcaacaaggaggagagctaccagcccatcgtggactacattgatgcccagtttgaggcctacctgcaggaggagctgaagatcaagaggagcctcttcacctaccatgacagccgcatccacgtgtgcctgtacttcatcagccccaccggccacagcctgaagaccctggacctgctgaccatgaagaacctggacagcaaggtgaacatcatccctgtgattgccaaggctgacacagtgtccaagacagagctgcagaagttcaagatcaagctgatgtctgagctggtgtccaatggagtgcagatctaccagttccccacagatgatgacaccatcgccaaggtgaatgctgccatgaatggccagctgccctttgctgtggtgggctccatggatgaggtgaaggtgggcaacaagatggtgaaggcccggcagtacccctggggcgtggtgcaggtggagaatgaaaaccactgtgactttgtgaagctgcgggagatgctgatctgcaccaacatggaggacctgcgggagcagacccacaccaggcactatgagctgtaccgccgctgcaagctggaggagatgggcttcacagatgtgggccctgagaacaagcctgtgtctgtgcaggagacctatgaggccaagagacatgagttccacggggagcggcagaggaaggaggaggagatgaagcagatgtttgtgcagagggtgaaggagaaggaggccatcctgaaggaggccgagcgggagctgcaggccaagtttgagcacctgaagaggctgcaccaggaggagaggatgaagctggaggagaagaggcggctgctggaggaggagatcatcgccttcagcaagaagaaggccaccagcgagatcttccacagccagagcttcctggccaccggcagcaacctgaggaaggacaaggacaggaagaagtag

SEQ ID NO: 169145 - DNA, 1422 bp, synthetic construct
  misc_feature 1..1422: note = Description of Artificial Sequence: Synthetic coding sequence
  source 1..1422: mol_type = other DNA
atggccaccaagaccacctgcatgagcagccagggcagtgatgatgagcagatcaagcgggagaacatccgcagcctgaccatgagcggccacgtgggctttgagagcctgcctgaccagctggtgaacagaagcatccagcagggcttctgcttcaacatcctgtgtgtgggggagaccggcatcggcaagagcaccctgattgacaccctcttcaacaccaactttgaagattatgagagcagccacttctgccccaacgtgaagctgaaggcccagacctatgagctgcaggagagcaatgtgcagctgaagctgaccatcgtgaacacagtgggctttggagaccagatcaacaaggaggagagctaccagcccatcgtggactacattgatgcccagtttgaggcctacctgcaggaggagctgaagatcaagaggagcctcttcacctaccatgacagccgcatccacgtgtgcctgtacttcatcagccccaccggccacagcctgaagaccctggacctgctgaccatgaagaacctggacagcaaggtgaacatcatccctgtgattgccaaggctgacacagtgtccaagacagagctgcagaagttcaagatcaagctgatgtctgagctggtgtccaatggagtgcagatctaccagttccccacagatgatgacaccatcgccaaggtgaatgctgccatgaatggccagctgccctttgctgtggtgggctccatggatgaggtgaaggtgggcaacaagatggtgaaggcccggcagtacccctggggcgtggtgcaggtggagaatgaaaaccactgtgactttgtgaagctgcgggagatgctgatctgcaccaacatggaggacctgcgggagcagacccacaccaggcactatgagctgtaccgccgctgcaagctggaggagatgggcttcacagatgtgggccctgagaacaagcctgtgtctgtgcaggagacctatgaggccaagagacatgagttccatggagagcggcagaggaaggaggaggagatgaagcagatgtttgtgcagagggtgaaggagaaggaggccatcctgaaggaggccgagcgggagctgcaggccaagtttgagcacctgaagaggctgcaccaggaggagaggatgaagctggaggagaagaggcggctgctggaggaggagatcatcgccttcagcaagaagaaggccaccagcgagatcttccacagccagagcttcctggccaccggcagcaacctgaggaaggacaaggacaggaagaaggagcccggctgccgctttgagctgctgtgcattgatgtgcgggcctgtgagaccaacggcggcaggaaggatgctgagaagggccgggagggccacagcgcccggggccagccctag

SEQ ID NO: 169146 - DNA, 852 bp, synthetic construct
  misc_feature 1..852: note = Description of Artificial Sequence: Synthetic coding sequence
  source 1..852: mol_type = other DNA
atggccagcagcgaggtggcccggcacctgctcttccagagccacatggccaccaagaccacctgcatgagcagccagggcagtgatgatgagcagatcgtgaacatcatccctgtgattgccaaggctgacacagtgtccaagacagagctgcagaagttcaagatcaagctgatgtctgagctggtgtccaatggagtgcagatctaccagttccccacagatgatgacaccatcgccaaggtgaatgctgccatgaatggccagctgccctttgctgtggtgggctccatggatgaggtgaaggtgggcaacaagatggtgaaggcccggcagtacccctggggcgtggtgcaggtggagaatgaaaaccactgtgactttgtgaagctgcgggagatgctgatctgcaccaacatggaggacctgcgggagcagacccacaccaggcactatgagctgtaccgccgctgcaagctggaggagatgggcttcacagatgtgggccctgagaacaagcctgtgtctgtgcaggagacctatgaggccaagagacatgagttccatggagagcggcagaggaaggaggaggagatgaagcagatgtttgtgcagagggtgaaggagaaggaggccatcctgaaggaggccgagcgggagctgcaggccaagtttgagcacctgaagaggctgcaccaggaggagaggatgaagctggaggagaagaggcggctgctggaggaggagatcatcgccttcagcaagaagaaggccaccagcgagatcttccacagccagagcttcctggccaccggcagcaacctgaggaaggacaaggacaggaagaagtag

SEQ ID NO: 169147 - DNA, 1290 bp, synthetic construct
  misc_feature 1..1290: note = Description of Artificial Sequence: Synthetic coding sequence
  source 1..1290: mol_type = other DNA
atggctgtggccgtgggccggcccagcaatgaggagctgaggaacctgagcctgagcggccacgtgggctttgacagcctgcctgaccagctggtgaacaagagcaccagccagggcttctgcttcaacatcctgtgtgtgggggagaccggcatcggcaagagcaccctgatggacaccctcttcaacaccaagtttgaaagtgaccctgccacccacaatgagcccggggtgcggctgaaggcccggagctatgagctgcaggagagcaatgtgcggctgaagctgaccatcgtggacacagtgggctttggagaccagatcaacaaggatgacagctacaagcccatcgtggagtacattgatgcccagtttgaggcctacctgcaggaggagctgaagatcaagaggagcctcttcaactaccatgacacccgcatccacgcctgcctgtacttcatcgcccccaccggccacagcctgaagagcctggacctggtgaccatgaagaagctggacagcaaggtgaacatcatccccatcatcgccaaggctgacaccatcgccaagaatgagctgcacaagttcaagagcaagatcatgtctgagctggtgtccaatggagtgcagatctaccagttccccacagatgaggagaccgtggccgagatcaatgccaccatgtctgtgcacctgccctttgctgtggtgggcagcacagaggaggtgaagattggcaacaagatggccaaggcccggcagtacccctggggcgtggtgcaggtggagaatgaaaaccactgtgactttgtgaagctgcgggagatgctgatccgggtgaacatggaggacctgcgggagcagacccacaccaggcactatgagctgtaccgccgctgcaagctggaggagatgggcttcaaggacacagatcctgacagcaagcccttcagcctgcaggagacctatgaggccaagagaaatgagttcctgggggagctgcagaagaaggaggaggagatgaggcagatgtttgtgatgagggtgaaggagaaggaggccgagctgaaggaggccgagaaggagctgcacgagaagtttgacctgctgaagaggacccaccaggaggagaagaagaaggtggaggacaagaagaaggagctggaggaggaggtgaacaacttccagaagaagaaggctgctgcccagctgctgcagagccaggcccagcagagcggggcccagcagaccaagaaggacaaggacaagaagaatgccagcttcacctag

SEQ ID NO: 169148 - DNA, 1278 bp, synthetic construct
  misc_feature 1..1278: note = Description of Artificial Sequence: Synthetic coding sequence
  source 1..1278: mol_type = other DNA
atggctgtggccgtgggccggcccagcaatgaggagctgaggaacctgagcctgagcggccacgtgggctttgacagcctgcctgaccagctggtgaacaagagcaccagccagggcttctgcttcaacatcctgtgtgtgggggagaccggcatcggcaagagcaccctgatggacaccctcttcaacaccaagtttgaaagtgaccctgccacccacaatgagcccggggtgcggctgaaggcccggagctatgagctgcaggagagcaatgtgcggctgaagctgaccatcgtggacacagtgggctttggagaccagatcaacaaggatgacagctacaagcccatcgtggagtacattgatgcccagtttgaggcctacctgcaggaggagctgaagatcaagaggagcctcttcaactaccatgacacccgcatccacgcctgcctgtacttcatcgcccccaccggccacagcctgaagagcctggacctggtgaccatgaagaagctggacagcaaggtgaacatcatccccatcatcgccaaggctgacaccatcgccaagaatgagctgcacaagttcaagagcaagatcatgtctgagctggtgtccaatggagtgcagatctaccagttccccacagatgaggagaccgtggccgagatcaatgccaccatgtctgtgcacctgccctttgctgtggtgggcagcacagaggaggtgaagattggcaacaagatggccaaggcccggcagtacccctggggcgtggtgcaggtggagaatgaaaaccactgtgactttgtgaagctgcgggagatgctgatccgggtgaacatggaggacctgcgggagcagacccacaccaggcactatgagctgtaccgccgctgcaagctggaggagatgggcttcaaggacacagatcctgacagcaagcccttcagcctgcaggagacctatgaggccaagagaaatgagttcctgggggagctgcagaagaaggaggaggagatgaggcagatgtttgtgatgagggtgaaggagaaggaggccgagctgaaggaggccgagaaggagctgcacgagaagtttgacctgctgaagaggacccaccaggaggagaagaagaaggtggaggacaagaagaaggagctggaggaggaggtgaacaacttccagaagaagaaggctgctgcccagctgctgcagagccaggcccagcagagcggggcccagcagaccaagaaggacaaggacaagaagaagtag

SEQ ID NO: 169149 - DNA, 1320 bp, synthetic construct
  misc_feature 1..1320: note = Description of Artificial Sequence: Synthetic coding sequence
  source 1..1320: mol_type = other DNA
atggaggagaggaagccagcccacgtgctgcggagcttcaagtatgctgccttcatgaatgaggagctgaggaacctgagcctgagcggccacgtgggctttgacagcctgcctgaccagctggtgaacaagagcaccagccagggcttctgcttcaacatcctgtgtgtgggggagaccggcatcggcaagagcaccctgatggacaccctcttcaacaccaagtttgaaagtgaccctgccacccacaatgagcccggggtgcggctgaaggcccggagctatgagctgcaggagagcaatgtgcggctgaagctgaccatcgtggacacagtgggctttggagaccagatcaacaaggatgacagctacaagcccatcgtggagtacattgatgcccagtttgaggcctacctgcaggaggagctgaagatcaagaggagcctcttcaactaccatgacacccgcatccacgcctgcctgtacttcatcgcccccaccggccacagcctgaagagcctggacctggtgaccatgaagaagctggacagcaaggtgaacatcatccccatcatcgccaaggctgacaccatcgccaagaatgagctgcacaagttcaagagcaagatcatgtctgagctggtgtccaatggagtgcagatctaccagttccccacagatgaggagaccgtggccgagatcaatgccaccatgtctgtgcacctgccctttgctgtggtgggcagcacagaggaggtgaagattggcaacaagatggccaaggcccggcagtacccctggggcgtggtgcaggtggagaatgaaaaccactgtgactttgtgaagctgcgggagatgctgatccgggtgaacatggaggacctgcgggagcagacccacaccaggcactatgagctgtaccgccgctgcaagctggaggagatgggcttcaaggacacagatcctgacagcaagcccttcagcctgcaggagacctatgaggccaagagaaatgagttcctgggggagctgcagaagaaggaggaggagatgaggcagatgtttgtgatgagggtgaaggagaaggaggccgagctgaaggaggccgagaaggagctgcacgagaagtttgacctgctgaagaggacccaccaggaggagaagaagaaggtggaggacaagaagaaggagctggaggaggaggtgaacaacttccagaagaagaaggctgctgcccagctgctgcagagccaggcccagcagagcggggcccagcagaccaagaaggacaaggacaagaagaatgccagcttcacctag

SEQ ID NO: 169150 - DNA, 1077 bp, synthetic construct
  misc_feature 1..1077: note = Description of Artificial Sequence: Synthetic coding sequence
  source 1..1077: mol_type = other DNA
atggaccccctgcggcgcagccccagcccctgcctgagcagccagcccagcagccccagcaccccaccctgtgagatgctgggccctgtgggcatcgaggccgtgctggaccagctgaagatcaaggccatgaagatgggctttgagttcaacatcatggtggtgggccagagcggcctgggcaagagcaccatggtgaacaccctcttcaagagcaaggtgtggaagagcaaccccccaggcctgggcgtgcccaccccccagaccctgcagctgcacagcctgacccacgtgattgaggagaagggcgtgaagctgaagctgactgtgacagacaccccaggctttggagaccagatcaacaatgacaactgctgggaccccatcctgggctacatcaatgagcagtatgagcagtacctgcaggaggagatcctgatcacccggcagaggcacatcccagacaccagggtgcactgctgcgtgtactttgtgccccccaccggccactgcctgcggcccctggacatcgagttcctgcagaggctgtgcaggacagtgaatgtggtgcctgtgattgcccgggctgacagcctgaccatggaggagcgggaggccttcagaagacgcatccagcagaacctgcggacccactgcattgatgtgtacccccagatgtgctttgatgaggacatcaatgacaagatcctgaacagcaagctgcgggaccgcatcccctttgctgtggtgggcgctgaccaggagcacctggtgaatggccgctgtgtgctgggcaggaagaccaagtggggcatcatcgaggtggagaacatggcccactgtgagttccccctgctgcgggacctgctgatccgcagccacctgcaggacctgaaggacatcacccacaacatccactatgagaactacagagtcatccggctgaatgaaagccacctgctgccccggggccctggctgggtgaacctggccccagccagccctggccagctgaccacccccaggaccttcaaggtgtgccgcggggcccatgatgacagtgatgatgagttctag

SEQ ID NO: 169151 - DNA, 939 bp, synthetic construct
  misc_feature 1..939: note = Description of Artificial Sequence: Synthetic coding sequence
  source 1..939: mol_type = other DNA
atggaccccctgcggcgcagccccagcccctgcctgagcagccagcccagcagccccagcaccccaccctgtgagatgctgggccctgtgggcatcgaggccgtgctggaccagctgaagatcaaggccatgaagatgggctttgagttcaacatcatggtggtgggccagagcggcctgggcaagagcaccatggtgaacaccctcttcaagagcaaggtgtggaagagcaaccccccaggcctgggcgtgcccaccccccagaccctgcagctgcacagcctgacccacgtgattgaggagaagggcgtgaagctgaagctgactgtgacagacaccccaggctttggagaccagatcaacaatgacaactgcctgcggcccctggacatcgagttcctgcagaggctgtgcaggacagtgaatgtggtgcctgtgattgcccgggctgacagcctgaccatggaggagcgggaggccttcagaagacgcatccagcagaacctgcggacccactgcattgatgtgtacccccagatgtgctttgatgaggacatcaatgacaagatcctgaacagcaagctgcgggaccgcatcccctttgctgtggtgggcgctgaccaggagcacctggtgaatggccgctgtgtgctgggcaggaagaccaagtggggcatcatcgaggtggagaacatggcccactgtgagttccccctgctgcgggacctgctgatccgcagccacctgcaggacctgaaggacatcacccacaacatccactatgagaactacagagtcatccggctgaatgaaagccacctgctgccccggggccctggctgggtgaacctggccccagccagccctggccagctgaccacccccaggaccttcaaggtgtgccgcggggcccatgatgacagtgatgatgagttctag

SEQ ID NO: 169152 - DNA, 1299 bp, synthetic construct
  misc_feature 1..1299: note = Description of Artificial Sequence: Synthetic coding sequence
  source 1..1299: mol_type = other DNA
atggccgagaggaccatggccatgcccacccagatcccagcagatggagacacccagaaggagaacaacatccgctgcctgaccaccatcggccactttggatttgagtgcctgcccaaccagctggtgagccgcagcatccggcagggcttcaccttcaacatcctgtgtgtgggggagactggaattggcaagagcaccctgattgacaccctcttcaacaccaacctgaaggacaacaagagcagccacttctacagcaatgtgggcctgcagatccagacctatgagctgcaggagagcaatgtgcagctgaagctgactgtggtggagaccgtgggctatggagaccagattgacaaggaggccagctaccagcccatcgtggactacattgatgcccagtttgaggcctacctgcaggaggagctgaagatcaagaggagcctgtttgagtaccatgacagccgggtgcacgtgtgcctgtacttcatcagccccaccggccacagcctgaagagcctggacctgctgaccatgaagaacctggacagcaaggtgaacatcatccccctgattgccaaggctgacaccatcagcaagaatgacctgcagaccttcaagaacaagatcatgtctgagctgatcagcaatggcatccagatctaccagctgcccacagatgaggagacagctgcccaggccaacagctctgtgtctggcctgctgccctttgctgtggtgggcagcacagatgaggtgaaggtgggcaagaggatggtgcggggccgccactacccctggggcgtgctgcaggtggagaatgaaaaccactgtgactttgtgaagctgcgggacatgctgctgtgcaccaacatggagaacctgaaggagaagacccacacccagcactatgagtgctaccgctaccagaagctgcagaagatgggcttcacagatgtgggccccaacaaccagcctgtgtccttccaggagatctttgaggccaagaggcaggagttctatgaccagtgccagcgggaggaggaggagctgaagcagcgcttcatgcagagggtgaaggagaaggaggccaccttcaaggaggccgagaaggagctgcaggacaagtttgagcacctgaagatgatccagcaggaggagatcaggaagctggaggaggagaagaagcagctggagggggagatcatcgacttctacaagatgaaggccgccagcgaggccctgcagacccagctgagcacagacaccaagaaggacaagcacaggaagaagtag

SEQ ID NO: 169153 - DNA, 1086 bp, synthetic construct
  misc_feature 1..1086: note = Description of Artificial Sequence: Synthetic coding sequence
  source 1..1086: mol_type = other DNA
atgagcaagcagcagcccacccagttcatcaaccctgagaccccaggctacgtgggctttgccaacctgcccaaccaggtgcacaggaagtctgtgaagaagggctttgagttcaccctgatggtggtgggggagagcggcctgggcaagagcaccctcatcaacagcctcttcctgacagacctgtacccagagagggtcatccctggagctgctgagaagattgaaagaacagtgcagatcgaggccagcacagtggagattgaggagcggggcgtgaagctgcggctgactgtggtggacaccccaggctatggagatgccatcaactgccgggactgcttcaagaccatcatctcctacattgatgagcagtttgagcgctacctgcatgatgagagcggcctgaacagaagacacatcatcgacaacagagtgcactgctgcttctacttcatcagccccttcggccacggcctgaagcccctggatgtggccttcatgaaggccatccacaacaaggtgaacatcgtgcctgtgattgccaaggctgacaccctgaccctgaaggagcgggagcggctgaagaagaggatcctggatgaaattgaggagcacaacatcaagatctaccacctgcctgatgctgagagtgatgaagatgaggacttcaaggagcagacccggctgctgaaggccagcatccccttctctgtggtgggcagcaaccagctgattgaggccaagggcaagaaggtgcggggccgcctgtacccctggggcgtggtggaggtggagaaccctgagcacaatgacttcctgaagctgcggaccatgctgatcacccacatgcaggacctgcaggaggtgacccaggacctgcactatgagaacttccgctctgagcggctgaagagaggaggcaggaaggtggagaatgaagacatgaacaaggaccagatcctgctggagaaggaggccgagctgcggaggatgcaggagatgattgccaggatgcaggcccagatgcagatgcagatgcagggcggagatggagatggaggagccctgggccaccacgtgtag

SEQ ID NO: 169154 - DNA, 1086 bp, synthetic construct; identical to SEQ ID NO: 169153
  misc_feature 1..1086: note = Description of Artificial Sequence: Synthetic coding sequence
  source 1..1086: mol_type = other DNA

SEQ ID NO: 169155 - DNA, 1191 bp, synthetic construct
  misc_feature 1..1191: note = Description of Artificial Sequence: Synthetic coding sequence
  source 1..1191: mol_type = other DNA
atgccctggatcagcgagggccgggccacccggccctgcctgcgggtgcccagcgccaggagaggagatgagggcctgcaccagagagatgaggccagccagaagatgagcaagcagcagcccacccagttcatcaaccctgagaccccaggctacgtgggctttgccaacctgcccaaccaggtgcacaggaagtctgtgaagaagggctttgagttcaccctgatggtggtgggggagagcggcctgggcaagagcaccctcatcaacagcctcttcctgacagacctgtacccagagagggtcatccctggagctgctgagaagattgaaagaacagtgcagatcgaggccagcacagtggagattgaggagcggggcgtgaagctgcggctgactgtggtggacaccccaggctatggagatgccatcaactgccgggactgcttcaagaccatcatctcctacattgatgagcagtttgagcgctacctgcatgatgaaagtggcctgaacagaagacacatcatcgacaacagagtgcactgctgcttctacttcatcagcccctttggacatggcctgaagcccctggatgtggccttcatgaaggccatccacaacaaggtgaacatcgtgcctgtgattgccaaggctgacaccctgaccctgaaggagcgggagcggctgaagaagaggatcctggatgaaattgaggagcacaacatcaagatctaccacctgcctgatgctgagagtgatgaagatgaggacttcaaggagcagacccggctgctgaaggccagcatccccttctctgtggtgggcagcaaccagctgattgaggccaagggcaagaaggtgcggggccgcctgtacccctggggcgtggtggaggtggagaaccctgagcacaatgacttcctgaagctgcggaccatgctgatcacccacatgcaggacctgcaggaggtgacccaggacctgcactatgagaacttccgctctgagcggctgaagaggggcggcaggaaggtggagaatgaagacatgaacaaggaccagatcctgctggagaaggaggccgagctgcggaggatgcaggagatgattgccaggatgcaggcccagatgcagatgcagatgcagggcggagatggagatggaggagccctgggccaccacgtgtag

SEQ ID NO: 169156 - DNA, 1086 bp, synthetic construct; identical to SEQ ID NO: 169153
  misc_feature 1..1086: note = Description of Artificial Sequence: Synthetic coding sequence
  source 1..1086: mol_type = other DNA

SEQ ID NO: 169157 - DNA, 1086 bp, synthetic construct; identical to SEQ ID NO: 169153
  misc_feature 1..1086: note = Description of Artificial Sequence: Synthetic coding sequence
  source 1..1086: mol_type = other DNA

SEQ ID NO: 169158 - DNA, 159 bp, synthetic construct
  misc_feature 1..159: note = Description of Artificial Sequence: Synthetic coding sequence
  source 1..159: mol_type = other DNA
atgagcaagcagcagcccacccagttcatcaaccctgagaccccaggctacgtgggctttgccaacctgcccaaccaggtgcacaggaagtctgtgaagaagggctttgagttcaccctgatggtggtgggggagagcggcctgggcaagagcacctag

SEQ ID NO: 169159 - DNA, 153 bp, synthetic construct
  misc_feature 1..153: note = Description of Artificial Sequence: Synthetic coding sequence
  source 1..153: mol_type = other DNA
atgagcaagcagcagcccacccagttcatcaaccctgagaccccaggctacgtgggctttgccaacctgcccaaccaggtgcacaggaagtctgtgaagaagggctttgagttcaccctgatggtggtgggggagagcggcctgggcaagtag

SEQ ID NO: 169160 - DNA, 72 bp, synthetic construct
  misc_feature 1..72: note = Description of Artificial Sequence: Synthetic coding sequence
  source 1..72: mol_type = other DNA
atgagcaagcagcagcccacccagttcatcaaccctgagaccccaggctacgtgggctttgccaacctgtag

SEQ ID NO: 169161 - DNA, 447 bp, synthetic construct
  misc_feature 1..447: note = Description of Artificial Sequence: Synthetic coding sequence
  source 1..447: mol_type = other DNA
atgagcaagcagcagcccacccagttcatcaaccctgagaccccaggctacgtgggctttgccaacctgcccaaccaggtgcacaggaagtctgtgaagaagggctttgagttcaccctgatggtggtgggggagagcggcctgggcaagagcaccctcatcaacagcctcttcctgacagacctgtacccagagagggtcatccctggagctgctgagaagattgaaagaacagtgcagatcgaggccagcacagtggagattgaggagcggggcgtgaagctgcggctgactgtggtggacaccccaggctatggagatgccatcaactgccgggactgcttcaagaccatcatctcctacattgatgagcagtttgagcgctacctgcatgatgagagcggcctgaacagaagacacatcatcgacaacagagtgcactgctag

SEQ ID NO: 169162 - DNA, 396 bp, synthetic construct
  misc_feature 1..396: note = Description of Artificial Sequence: Synthetic coding sequence
  source 1..396: mol_type = other DNA
atgagcaagcagcagcccacccagttcatcaaccctgagaccccaggctacgtgggctttgccaacctgcccaaccaggtgcacaggaagtctgtgaagaagggctttgagttcaccctgatggtggtgggggagagcggcctgggcaagagcaccctcatcaacagcctcttcctgacagacctgtacccagagagggtcatccctggagctgctgagaagattgaaagaacagtgcagatcgaggccagcacagtggagattgaggagcggggcgtgaagctgcggctgactgtggtggacaccccaggctatggagatgccatcaactgccgggactgcttcaagaccatcatctcctacattgatgagcagtttgagcgctacctgcactag

SEQ ID NO: 169163 - DNA, 219 bp, synthetic construct
  misc_feature 1..219: note = Description of Artificial Sequence: Synthetic coding sequence
  source 1..219: mol_type = other DNA
atgagcaagcagcagcccacccagttcatcaaccctgagaccccaggctacgtgggctttgccaacctgcccaaccaggtgcacaggaagtctgtgaagaagggctttgagttcaccctgatggtggtgggggagagcggcctgggcaagagcaccctcatcaacagcctcttcctgacagacctgtacccagagagggtcatccctggagctgcctag

SEQ ID NO: 169164 - DNA, 219 bp, synthetic construct; identical to SEQ ID NO: 169163
  misc_feature 1..219: note = Description of Artificial Sequence: Synthetic coding sequence
  source 1..219: mol_type = other DNA

SEQ ID NO: 169165 - DNA, 522 bp, synthetic construct
  misc_feature 1..522: note = Description of Artificial Sequence: Synthetic coding sequence
  source 1..522: mol_type = other DNA
atgagcaagcagcagcccacccagttcatcaaccctgagaccccaggctacgtgggctttgccaacctgcccaaccaggtgcacaggaagtctgtgaagaagggctttgagttcaccctgatggtggtgggggagagcggcctgggcaagagcaccctcatcaacagcctcttcctgacagacctgtacccagagagggtcatccctggagctgctgagaagattgaaagaacagtgcagatcgaggccagcacagtggagattgaggagcggggcgtgaagctgcggctgactgtggtggacaccccaggctatggagatgccatcaactgccgggactgcttcaagaccatcatctcctacattgatgagcagtttgagcgctacctgcatgatgagagcggcctgaacagaagacacatcatcgacaacagagtgcactgctgcttctacttcatcagccccttcggccacggcctgaagcccctggatgtggccttcatgaaggccatccacaactag

SEQ ID NO: 169166 - DNA, 90 bp, synthetic construct
  misc_feature 1..90: note = Description of Artificial Sequence: Synthetic coding sequence
  source 1..90: mol_type = other DNA
tgagaaatgattgccaggatgcaggcccagatgcagatgcagatgcagggcggagatggagatggaggagccctgggccaccacgtgtag

SEQ ID NO: 169167 - DNA, 861 bp, synthetic construct
  misc_feature 1..861: note = Description of Artificial Sequence: Synthetic coding sequence
  source 1..861: mol_type = other DNA
atgagcaagggccagagcggcctgggcaagagcaccctggtgaacaccctcttcaagagccaggtgtccaggaaggccagctcctggaaccgggaggagaagatccccaagacagtggagatcaaggccatcggccacgtgattgaggagggcggcgtgaagatgaagctgaccgtcatcgacaccccaggctttggagaccagatcaacaatgaaaactgctgggagcccatcgagaagtacatcaatgagcagtatgagaagttcctgaaggaggaggtgaacatcgccaggaagaagaggatcccagacaccagggtgcactgctgcctgtacttcatcagccccaccggccacagcctgcggcccctggacctggagttcatgaagcacctgagcaaggtggtgaacatcatccctgtgattgccaaggctgacaccatgaccctggaggagaagtctgagttcaagcagagggtgaggaaggagctggaggtgaatggaattgagttctacccccagaaggagtttgatgaggacctggaggacaagacagaaaatgacaagatccggcaggagagcatgccctttgctgtggtgggcagtgacaaggagtaccaggtgaatggcaagagggtgctgggcaggaagaccccctggggcatcatcgaggtggagaacctgaaccactgtgaatttgccctgctgcgggactttgtgatccgcacccacctgcaggacctgaaggaggtgacccacaacatccactatgagacctaccgggccaagaggctgaatgacaatggaggcctgccccctgtgtctgtggacacagaggagagccatgacagcaacccctag

SEQ ID NO: 169168 - DNA, 252 bp, synthetic construct
  misc_feature 1..252: note = Description of Artificial Sequence: Synthetic coding sequence
  source 1..252: mol_type = other DNA
atgagcaagggcctgcctgagaccaggacagatgctgccatgtctgagctggtgcctgagccccggcccaagccagctgtgcccatgaagcccatgagcatcaacagcaacctgctgggctacatcggcatcgacaccatcatcgagcagatgaggaagaagaccatgaagacaggctttgacttcaacatcatggtggtggccggcagccccctgcggagcacctccatgagcagcaccaggagcagctag

SEQ ID NO: 169169 - DNA, 1053 bp, synthetic construct
  misc_feature 1..1053: note = Description of Artificial Sequence: Synthetic coding sequence
  source 1..1053: mol_type = other DNA
atgagcaagggcctgcctgagaccaggacagatgctgccatgtctgagctggtgcctgagccccggcccaagccagctgtgcccatgaagcccatgagcatcaacagcaacctgctgggctacatcggcatcgacaccatcatcgagcagatgaggaagaagaccatgaagacaggctttgacttcaacatcatggtggtgggccagagcggcctgggcaagagcaccctggtgaacaccctcttcaagagccaggtgtccaggaaggccagctcctggaaccgggaggagaagatccccaagacagtggagatcaaggccatcggccacgtgattgaggagggcggcgtgaagatgaagctgaccgtcatcgacaccccaggctttggagaccagatcaacaatgaaaactgctgggagcccatcgagaagtacatcaatgagcagtatgagaagttcctgaaggaggaggtgaacatcgccaggaagaagaggatcccagacaccagggtgcactgctgcctgtacttcatcagccccaccggccacagcctgcggcccctggacctggagttcatgaagcacctgagcaaggtggtgaacatcatccctgtgattgccaaggctgacaccatgaccctggaggagaagtctgagttcaagcagagggtgaggaaggagctggaggtgaatggaattgagttctacccccagaaggagtttgatgaggacctggaggacaagacagaaaatgacaagatccggcaggagagcatgccctttgctgtggtgggcagtgacaaggagtaccaggtgaatggcaagagggtgctgggcaggaagaccccctggggcatcatcgaggtggagaacctgaaccactgtgaatttgccctgctgcgggactttgtgatccgcacccacctgcaggacctgaaggaggtgacccacaacatccactatgagacctaccgggccaagaggctgaatgacaatggaggcctgccccctgtgtctgtggacacagaggagagccatgacagcaacccctag

SEQ ID NO: 169170 - DNA, 1077 bp, synthetic construct
  misc_feature 1..1077: note = Description of Artificial Sequence: Synthetic coding sequence
  source 1..1077: mol_type = other DNA
atgagcaagggcctgcctgagaccaggacagatgctgccatgtctgagctggtgcctgagccccggcccaagccagctgtgcccatgaagcccatgagcatcaacagcaacctgctgggctacatcggcatcgacaccatcatcgagcagatgaggaagaagaccatgaagacaggctttgacttcaacatcatggtggtgggccagagcggcctgggcaagagcaccctggtgaacaccctcttcaagagccaggtgtccaggaaggccagctcctggaaccgggaggagaagatccccaagacagtggagatcaaggccatcggccacgtgattgaggagggcggcgtgaagatgaagctgaccgtcatcgacaccccaggctttggagaccagatcaacaatgaaaactgctgggagcccatcgagaagtacatcaatgagcagtatgagaagttcctgaaggaggaggtgaacatcgccaggaagaagaggatcccagacaccagggtgcactgctgcctgtacttcatcagccccaccggccacagcctgcggcccctggacctggagttcatgaagcacctgagcaaggtggtgaacatcatccctgtgattgccaaggctgacaccatgaccctggaggagaagtctgagttcaagcagagggtgaggaaggagctggaggtgaatggaattgagttctacccccagaaggagtttgatgaggacctggaggacaagacagaaaatgacaagatccggcaggagagcatgccctttgctgtggtgggcagtgacaaggagtaccaggtgaatggcaagagggtgctgggcaggaagaccccctggggcatcatcgaggtggagaacctgaaccactgtgaatttgccctgctgcgggactttgtgatccgcacccacctgcaggacctgaaggaggtgacccacaacatccactatgagacctaccgggccaagaggctgaatgacaatggaggcctgcccccaggagagggcctgctgggcaccgtgctgccccctgtgcctgccaccccctgccccacagctgagtag

SEQ ID NO: 169171 - DNA, 885 bp, synthetic construct
  misc_feature 1..885: note = Description of Artificial Sequence: Synthetic coding sequence
  source 1..885: mol_type = other DNA
atgagcaagggccagagcggcctgggcaagagcaccctggtgaacaccctcttcaagagccaggtgtccaggaaggccagctcctggaaccgggaggagaagatccccaagacagtggagatcaaggccatcggccacgtgattgaggagggcggcgtgaagatgaagctgaccgtcatcgacaccccaggctttggagaccagatcaacaatgaaaactgctgggagcccatcgagaagtacatcaatgagcagtatgagaagttcctgaaggaggaggtgaacatcgccaggaagaagaggatcccagacaccagggtgcactgctgcctgtacttcatcagccccaccggccacagcctgcggcccctggacctggagttcatgaagcacctgagcaaggtggtgaacatcatccctgtgattgccaaggctgacaccatgaccctggaggagaagtctgagttcaagcagagggtgaggaaggagctggaggtgaatggaattgagttctacccccagaaggagtttgatgaggacctggaggacaagacagaaaatgacaagatccggcaggagagcatgccctttgctgtggtgggcagtgacaaggagtaccaggtgaatggcaagagggtgctgggcaggaagaccccctggggcatcatcgaggtggagaacctgaaccactgtgaatttgccctgctgcgggactttgtgatccgcacccacctgcaggacctgaaggaggtgacccacaacatccactatgagacctaccgggccaagaggctgaatgacaatggaggcctgcccccaggagagggcctgctgggcaccgtgctgccccctgtgcctgccaccccctgccccacagctgagtag

SEQ ID NO: 169172 - DNA, 537 bp, synthetic construct
  misc_feature 1..537: note = Description of Artificial Sequence: Synthetic coding sequence
  source 1..537: mol_type = other DNA
atgtctgagctggtgcctgagccccggcccaagccagctgtgcccatgaagcccatgagcatcaacagcaacctgctgggctacatcggcatcgacaccatcatcgagcagatgaggaagaagaccatgaagacaggctttgacttcaacatcatggtggtgggccagagcggcctgggcaagagcaccctggtgaacaccctcttcaagagccaggtgtccaggaaggccagctcctggaaccgggaggagaagatccccaagacagtggagatcaaggccatcggccacgtgattgaggagggcggcgtgaagatgaagctgactgtgattgacaccccaggctttggagaccagatcaacaatgaaaactgctgggagcccatcgagaagtacatcaatgagcagtatgagaagttcctgaaggaggaggtgaacatcgccaggaagaagaggatcccagacaccagggtgcactgctgcctgtacttcatcagccccaccggccacagcctgcggcccctggacctggagtag

SEQ ID NO: 169173 - DNA, 1137 bp, synthetic construct
  misc_feature 1..1137: note = Description of Artificial Sequence: Synthetic coding sequence
  source 1..1137: mol_type = other DNA
atggacagcctggccgccccccaggaccggctggtggagcagctgctgagccccaggacccaggcccagaggcggctgaaggacatcgacaagcagtatgtgggctttgccaccctgcccaaccaggtgcacaggaagtctgtgaagaagggctttgacttcaccctgatggtggccggggagagcggcctgggcaagagcaccctggtgcacagcctcttcctgacagacctgtacaaggacaggaagctgctgtctgctgaggagcgcatcagccagacagtggagatcctgaagcacacagtggacatcgaggagaagggcgtgaagctgaagctgaccatcgtggacaccccaggctttggagatgctgtgaacaacacagagtgctggaagcccatcacagattatgtggaccagcagtttgagcagtacttcagagatgagagcggcctgaacaggaagaacatccaggacaacagagtgcactgctgcctgtacttcatcagccccttcggccacggcctgcggcctgtggatgtgggcttcatgaaggccctgcacgagaaggtgaacatcgtgcccctgattgccaaggctgactgcctggtgcccagcgagatcaggaagctgaaggagcgcatccgggaggagattgacaagtttggcatccacgtgtaccagttcccagaatgtgacagtgatgaagatgaggacttcaagcagcaggaccgggagctgaaggagagcgccccctttgctgtgattggcagcaacacagtggtggaggccaagggccagagggtgcggggccgcctgtacccctggggcatcgtggaggtggagaaccaggcccactgtgactttgtgaagctgaggaacatgctgatccgcacccacatgcatgacctgaaggatgtgacctgtgatgtgcactatgagaactaccgggcccactgcatccagcagatgaccagcaagctgacccaggacagcaggatggagagccccatccccatcctgcccctgcccaccccagatgctgagacagagaagctgatccgcatgaaggatgaggagctgcggaggatgcaggagatgctgcagaggatgaagcagcagatgcaggaccagtag

SEQ ID NO: 169174 - DNA, 969 bp, synthetic construct
  misc_feature 1..969: note = Description of Artificial Sequence: Synthetic coding sequence
  source 1..969: mol_type = other DNA
atggtggccggggagagcggcctgggcaagagcaccctggtgcacagcctcttcctgacagacctgtacaaggacaggaagctgctgtctgctgaggagcgcatcagccagacagtggagatcctgaagcacacagtggacatcgaggagaagggcgtgaagctgaagctgaccatcgtggacaccccaggctttggagatgctgtgaacaacacagagtgctggaagcccatcacagattatgtggaccagcagtttgagcagtacttcagagatgagagcggcctgaacaggaagaacatccaggacaacagagtgcactgctgcctgtacttcatcagccccttcggccacggcctgcggcctgtggatgtgggcttcatgaaggccctgcacgagaaggtgaacatcgtgcccctgattgccaaggctgactgcctggtgcccagcgagatcaggaagctgaaggagcgcatccgggaggagattgacaagtttggcatccacgtgtaccagttcccagaatgtgacagtgatgaagatgaggacttcaagcagcaggaccgggagctgaaggagagcgccccctttgctgtgattggcagcaacacagtggtggaggccaagggccagagggtgcggggccgcctgtacccctggggcatcgtggaggtggagaaccaggcccactgtgactttgtgaagctgaggaacatgctgatccgcacccacatgcatgacctgaaggatgtgacctgtgatgtgcactatgagaactaccgggcccactgcatccagcagatgaccagcaagctgacccaggacagcaggatggagagccccatccccatcctgcccctgcccaccccagatgctgagacagagaagctgatccgcatgaaggatgaggagctgcggaggatgcaggagatgctgcagaggatgaagcagcagatgcaggaccagtag

SEQ ID NO: 169175 - DNA, 1041 bp, synthetic construct
  misc_feature 1..1041: note = Description of Artificial Sequence: Synthetic coding sequence
  source 1..1041: mol_type = other DNA
atggacagcctggccgccccccaggaccggctggtggagcagctgctgagccccaggacccaggcccagaggcggctgaaggacatcgacaagcagtatgtgggctttgccaccctgcccaaccaggtgcacaggaagtctgtgaagaagggctttgacttcaccctgatggtggccggggagagcggcctgggcaagagcaccctggtgcacagcctcttcctgacagacctgtacaaggacaggaagctgctgtctgctgaggagcgcatcagccagacagtggagatcctgaagcacacagtggacatcgaggagaagggcgtgaagctgaagctgaccatcgtggacaccccaggctttggagatgctgtgaacaacacagagtgctggaagcccatcacagattatgtggaccagcagtttgagcagtacttcagagatgagagcggcctgaacaggaagaacatccaggacaacagagtgcactgctgcctgtacttcatcagccccttcggccacggcctgcggcctgtggatgtgggcttcatgaaggccctgcacgagaaggtgaacatcgtgcccctgattgccaaggctgactgcctggtgcccagcgagatcaggaagctgaaggagcgcatccgggaggagattgacaagtttggcatccacgtgtaccagttcccagaatgtgacagtgatgaagatgaggacttcaagcagcaggaccgggagctgaaggagagcgccccctttgctgtgattggcagcaacacagtggtggaggccaagggccagagggtgcggggccgcctgtacccctggggcatcgtggagggcgccctgcggctgcgggaggccgcccagcacgcccacccccacgcctatgcccggccccagggcagagatgtgcggcgggccctgcgggagctgccccgggccctgcacccagcagatgaccagcagacagaccccggccagccccacggggagccccacccagaccctgctgctgcccaccctggccggcgggactag

SEQ ID NO: 169176 - DNA, 450 bp, synthetic construct
  misc_feature 1..450: note = Description of Artificial Sequence: Synthetic coding sequence
  source 1..450: mol_type = other DNA
ctgcccaaccaggtgcacaggaagtctgtgaagaagggctttgacttcaccctgatggtggccggggagagcggcctgggcaagagcaccctggtgcacagcctcttcctgacagacctgtacaaggacaggaagctgctgtctgctgaggagcgcatcagccagacagtggagatcctgaagcacacagtggacatcgaggagaagggcgtgaagctgaagctgaccatcgtggacaccccaggctttggagatgctgtgaacaacacagagtgctggaagcccatcacagattatgtggaccagcagtttgagcagtacttcagagatgagagcggcctgaacaggaagaacatccaggacaacagagtgcactgctgcctgtacttcatcagccccttcggccacggcctgcggcctgtggatggcttccacgagggcatcgcctag

SEQ ID NO: 169177 - DNA, 1110 bp, synthetic construct
  misc_feature 1..1110: note = Description of Artificial Sequence: Synthetic coding sequence
  source 1..1110: mol_type = other DNA
atgagcacaggcctgcgctacaagagcaagctggccaccccagaggacaagcaggacatcgacaagcagtatgtgggctttgccaccctgcccaaccaggtgcacaggaagtctgtgaagaagggctttgacttcaccctgatggtggccggggagagcggcctgggcaagagcaccctggtgcacagcctcttcctgacagacctgtacaaggacaggaagctgctgtctgctgaggagcgcatcagccagacagtggagatcctgaagcacacagtggacatcgaggagaagggcgtgaagctgaagctgaccatcgtggacaccccaggctttggagatgctgtgaacaacacagagtgctggaagcccatcacagattatgtggaccagcagtttgagcagtacttcagagatgaaagtggcctgaacaggaagaacatccaggacaacagagtgcactgctgcctgtacttcatcagcccctttggacatggcctgcggcctgtggatgtgggcttcatgaaggccctgcacgagaaggtgaacatcgtgcccctcatcgccaaggctgactgcctggtgcccagcgagatcaggaagctgaaggagcgcatccgggaggagattgacaagtttggcatccacgtgtaccagtttcctgaatgtgacagtgatgaagatgaggacttcaagcagcaggaccgggagctgaaggagagcgccccctttgctgtgattggcagcaacacagtggtggaggccaagggccagagggtgcggggccgcctgtacccctggggcatcgtggaggtggagaaccaggcccactgtgactttgtgaagctgaggaacatgctgatccgcacccacatgcatgacctgaaggatgtgacctgtgatgtgcactatgagaactaccgggcccactgcatccagcagatgaccagcaagctgacccaggacagcaggatggagagccccatccccatcctgcccctgcccaccccagatgctgagacagagaagctgatccgcatgaaggatgaggagctgcggaggatgcaggagatgctgcagaggatgaagcagcagatgcaggaccagtag

SEQ ID NO: 169178 - DNA, 1137 bp, synthetic construct; identical to SEQ ID NO: 169173
  misc_feature 1..1137: note = Description of Artificial Sequence: Synthetic coding sequence
  source 1..1137: mol_type = other DNA

SEQ ID NO: 169179 - DNA, 1305 bp, synthetic construct
  misc_feature 1..1305: note = Description of Artificial Sequence: Synthetic coding sequence
  source 1..1305: mol_type = other DNA
atggccgccacagacatcgcccggcaggtgggggagggctgcaggacagtgcccctggccggccacgtgggctttgacagcctgcctgaccagctggtgaacaagtctgtgtcccagggcttctgcttcaacatcctgtgtgtgggggagaccggcctgggcaagagcaccctgatggacaccctcttcaacaccaagtttgaaggagagcccgccacccacacccagcccggggtgcagctgcagagcaacacctatgacctgcaggagagcaatgtgcggctgaagctgaccatcgtgtccacagtgggctttggagaccagatcaacaaggaggacagctacaagcccatcgtggagttcattgatgcccagtttgaggcctacctgcaggaggagctgaagatcagaagagtgctgcacacctaccatgacagccgcatccacgtgtgcctgtacttcatcgcccccaccggccacagcctgaagagcctggacctggtgaccatgaagaagctggacagcaaggtgaacatcatccccatcatcgccaaggcagatgccatcagcaagtctgagctgaccaagttcaagatcaagatcaccagcgagctggtgtccaatggagtgcagatctaccagttccccacagatgatgaatctgtggccgagatcaatggcaccatgaatgcccacctgccctttgctgtgattggcagcacagaggagctgaagattggcaacaagatgatgagggcccggcagtacccctggggcaccgtgcaggtggagaatgaggcccactgtgactttgtgaagctgcgggagatgctgatccgggtgaacatggaggacctgcgggagcagacccacaccaggcactatgagctgtaccgccgctgcaagctggaggagatgggcttcaaggacacagatcctgacagcaagcccttcagcctgcaggagacctatgaggccaagagaaatgagttcctgggggagctgcagaagaaggaggaggagatgaggcagatgtttgtgcagagggtgaaggagaaggaggccgagctgaaggaggccgagaaggagctgcacgagaagtttgaccggctgaagaagctgcaccaggatgagaagaagaagctggaggacaagaagaagagcctggatgatgaggtgaatgccttcaagcagaggaagacagctgctgagctgctgcagagccagggcagccaggccggcggcagccagaccctgaagagggacaaggagaagaagaacaacccctggctgtgcacagaatag

SEQ ID NO: 169180 - DNA, 1290 bp, synthetic construct
  misc_feature 1..1290: note = Description of Artificial Sequence: Synthetic coding sequence
  source 1..1290: mol_type = other DNA
atggccgccacagacatcgcccggcaggtgggggagggctgcaggacagtgcccctggccggccacgtgggctttgacagcctgcctgaccagctggtgaacaagtctgtgtcccagggcttctgcttcaacatcctgtgtgtgggggagaccggcctgggcaagagcaccctgatggacaccctcttcaacaccaagtttgaaggagagcccgccacccacacccagcccggggtgcagctgcagagcaacacctatgacctgcaggagagcaatgtgcggctgaagctgaccatcgtgtccacagtgggctttggagaccagatcaacaaggaggacagctacaagcccatcgtggagttcattgatgcccagtttgaggcctacctgcaggaggagctgaagatcagaagagtgctgcacacctaccatgacagccgcatccacgtgtgcctgtacttcatcgcccccaccggccacagcctgaagagcctggacctggtgaccatgaagaagctggacagcaaggtgaacatcatccccatcatcgccaaggcagatgccatcagcaagtctgagctgaccaagttcaagatcaagatcaccagcgagctggtgtccaatggagtgcagatctaccagttccccacagatgatgaatctgtggccgagatcaatggcaccatgaatgcccacctgccctttgctgtgattggcagcacagaggagctgaagattggcaacaagatgatgagggcccggcagtacccctggggcaccgtgcaggtggagaatgaggcccactgtgactttgtgaagctgcgggagatgctgatccgggtgaacatggaggacctgcgggagcagacccacaccaggcactatgagctgtaccgccgctgcaagctggaggagatgggcttcaaggacacagatcctgacagcaagcccttcagcctgcaggagacctatgaggccaagagaaatgagttcctgggggagctgcagaagaaggaggaggagatgaggcagatgtttgtgcagagggtgaaggagaaggaggccgagctgaaggaggccgagaaggagctgcacgagaagtttgaccggctgaagaagctgcaccaggatgagaagaagaagctggaggacaagaagaagagcctggatgatgaggtgaatgccttcaagcagaggaagacagctgctgagctgctgcagagccagggcagccaggccggcggcagccagaccctgaagagggacaaggagaagaagaacttcttctag

SEQ ID NO: 169181 - DNA, 1296 bp, synthetic construct
  misc_feature 1..1296: note = Description of Artificial Sequence: Synthetic coding sequence
  source 1..1296: mol_type = other DNA
atggccgccacagacatcgcccggcaggtgggggagggctgcaggacagtgcccctggccggccacgtgggctttgacagcctgcctgaccagctggtgaacaagtctgtgtcccagggcttctgcttcaacatcctgtgtgtgggggagaccggcctgggcaagagcaccctgatggacaccctcttcaacaccaagtttgaaggagagcccgccacccacacccagcccggggtgcagctgcagagcaacacctatgacctgcaggagagcaatgtgcggctgaagctgaccatcgtgtccacagtgggctttggagaccagatcaacaaggaggacagctacaagcccatcgtggagttcattgatgcccagtttgaggcctacctgcaggaggagctgaagatcagaagagtgctgcacacctaccatgacagccgcatccacgtgtgcctgtacttcatcgcccccaccggccacagcctgaagagcctggacctggtgaccatgaagaagctggacagcaaggtgaacatcatccccatcatcgccaaggcagatgccatcagcaagtctgagctgaccaagttcaagatcaagatcaccagcgagctggtgtccaatggagtgcagatctaccagttccccacagatgatgaatctgtggccgagatcaatggcaccatgaatgcccacctgccctttgctgtgattggcagcacagaggagctgaagattggcaacaagatgatgagggcccggcagtacccctggggcaccgtgcaggtggagaatgaggcccactgtgactttgtgaagctgcgggagatgctgatccgggtgaacatggaggacctgcgggagcagacccacaccaggcactatgagctgtaccgccgctgcaagctggaggagatgggcttcaaggacacagatcctgacagcaagcccttcagcctgcaggagacctatgaggccaagagaaatgagttcctgggggagctgcagaagaaggaggaggagatgaggcagatgtttgtgcagagggtgaaggagaaggaggccgagctgaaggaggccgagaaggagctgcacgagaagtttgaccggctgaagaagctgcaccaggatgagaagaagaagctggaggacaagaagaagagcctggatgatgaggtgaatgccttcaagcagaggaagacagctgctgagctgctgcagagccagggcagccaggccggcggcagccagaccctgaagagggacaaggagaagaagaacctgggcttcctgtag

SEQ ID NO: 169182 - DNA, 1284 bp, synthetic construct
  misc_feature 1..1284: note = Description of Artificial Sequence: Synthetic coding sequence
  source 1..1284: mol_type = other DNA
atggccgccacagacatcgcccggcaggtgggggagggctgcaggacagtgcccctggccggccacgtgggctttgacagcctgcctgaccagctggtgaacaagtctgtgtcccagggcttctgcttcaacatcctgtgtgtgggggagaccggcctgggcaagagcaccctgatggacaccctcttcaacaccaagtttgaaggagagcccgccacccacacccagcccggggtgcagctgcagagcaacacctatgacctgcaggagagcaatgtgcggctgaagctgaccatcgtgtccacagtgggctttggagaccagatcaacaaggaggacagctacaagcccatcgtggagttcattgatgcccagtttgaggcctacctgcaggaggagctgaagatcagaagagtgctgcacacctaccatgacagccgcatccacgtgtgcctgtacttcatcgcccccaccggccacagcctgaagagcctggacctggtgaccatgaagaagctggacagcaaggtgaacatcatccccatcatcgccaaggcagatgccatcagcaagtctgagctgaccaagttcaagatcaagatcaccagcgagctggtgtccaatggagtgcagatctaccagttccccacagatgatgaatctgtggccgagatcaatggcaccatgaatgcccacctgccctttgctgtgattggcagcacagaggagctgaagattggcaacaagatgatgagggcccggcagtacccctggggcaccgtgcaggtggagaatgaggcccactgtgactttgtgaagctgcgggagatgctgatccgggtgaacatggaggacctgcgggagcagacccacaccaggcactatgagctgtaccgccgctgcaagctggaggagatgggcttcaaggacacagatcctgacagcaagcccttcagcctgcaggagacctatgaggccaagagaaatgagttcctgggggagctgcagaagaaggaggaggagatgaggcagatgtttgtgcagagggtgaaggagaaggaggccgagctgaaggaggccgagaaggagctgcacgagaagtttgaccggctgaagaagctgcaccaggatgagaagaagaagctggaggacaagaagaagagcctggatgatgaggtgaatgccttcaagcagaggaagacagctgctgagctgctgcagagccagggcagccaggccggcggcagccagaccctgaagagggacaaggagaagaagaactag

SEQ ID NO: 169183 - DNA, 1284 bp, synthetic construct; identical to SEQ ID NO: 169182
  misc_feature 1..1284: note = Description of Artificial Sequence: Synthetic coding sequence
  source 1..1284: mol_type = other DNA

SEQ ID NO: 169184 - DNA, 1110 bp, synthetic construct
  misc_feature 1..1110: note = Description of Artificial Sequence: Synthetic coding sequence
  source 1..1110: mol_type = other DNA
atggacaccctcttcaacaccaagtttgaaggagagcccgccacccacacccagcccggggtgcagctgcagagcaacacctatgacctgcaggagagcaatgtgcggctgaagctgaccatcgtgtccacagtgggctttggagaccagatcaacaaggaggacagctacaagcccatcgtggagttcattgatgcccagtttgaggcctacctgcaggaggagctgaagatcagaagagtgctgcacacctaccatgacagccgcatccacgtgtgcctgtacttcatcgcccccaccggccacagcctgaagagcctggacctggtgaccatgaagaagctggacagcaaggtgaacatcatccccatcatcgccaaggcagatgccatcagcaagtctgagctgaccaagttcaagatcaagatcaccagcgagctggtgtccaatggagtgcagatctaccagttccccacagatgatgaatctgtggccgagatcaatggcaccatgaatgcccacctgccctttgctgtgattggcagcacagaggagctgaagattggcaacaagatgatgagggcccggcagtacccctggggcaccgtgcaggtggagaatgaggcccactgtgactttgtgaagctgcgggagatgctgatccgggtgaacatggaggacctgcgggagcagacccacaccaggcactatgagctgtaccgccgctgcaagctggaggagatgggcttcaaggacacagatcctgacagcaagcccttcagcctgcaggagacctatgaggccaagagaaatgagttcctgggggagctgcagaagaaggaggaggagatgaggcagatgtttgtgcagagggtgaaggagaaggaggccgagctgaaggaggccgagaaggagctgcacgagaagtttgaccggctgaagaagctgcaccaggatgagaagaagaagctggaggacaagaagaagagcctggatgatgaggtgaatgccttcaagcagaggaagacagctgctgagctgctgcagagccagggcagccaggccggcggcagccagaccctgaagagggacaaggagaagaagaagtag

SEQ ID NO: 169185 - DNA, 1374 bp, synthetic construct
  misc_feature 1..1374: note = Description of Artificial Sequence: Synthetic coding sequence
  source 1..1374: mol_type = other DNA
atggccgccacagacatcgcccggcaggtgtttggaagaagaaggctgctgctgctgggctttgaaacagtgggcttctctgctgcctgcacagaggagggcggccacatgctgcggcggggggagggctgcaggacagtgcccctggccggccacgtgggctttgacagcctgcctgaccagctggtgaacaagtctgtgtcccagggcttctgcttcaacatcctgtgtgtgggggagaccggcctgggcaagagcaccctgatggacaccctcttcaacaccaagtttgaaggagagcccgccacccacacccagcccggggtgcagctgcagagcaacacctatgacctgcaggagagcaatgtgcggctgaagctgaccatcgtgtccacagtgggctttggagaccagatcaacaaggaggacagctacaagcccatcgtggagttcattgatgcccagtttgaggcctacctgcaggaggagctgaagatcagaagagtgctgcacacctaccatgacagccgcatccacgtgtgcctgtacttcatcgcccccaccggccacagcctgaagagcctggacctggtgaccatgaagaagctggacagcaaggtgaacatcatccccatcatcgccaaggcagatgccatcagcaagtctgagctgaccaagttcaagatcaagatcaccagcgagctggtgtccaatggagtgcagatctaccagttccccacagatgatgaatctgtggccgagatcaatggcaccatgaatgcccacctgccctttgctgtgattggcagcacagaggagctgaagattggcaacaagatgatgagggcccggcagtacccctggggcaccgtgcaggtggagaatgaggcccactgtgactttgtgaagctgcgggagatgctgatccgggtgaacatggaggacctgcgggagcagacccacaccaggcactatgagctgtaccgccgctgcaagctggaggagatgggcttcaaggacacagatcctgacagcaagcccttcagcctgcaggagacctatgaggccaagagaaatgagttcctgggggagctgcagaagaaggaggaggagatgaggcagatgtttgtgcagagggtgaaggagaaggaggccgagctgaaggaggccgagaaggagctgcacgagaagtttgaccggctgaagaagctgcaccaggatgagaagaagaagctggaggacaagaagaagagcctggatgatgaggtgaatgccttcaagcagaggaagacagctgctgagctgctgcagagccagggcagccaggccggcggcagccagaccctgaagagggacaaggagaagaagaagtag

SEQ ID NO: 169186 - DNA, 1284 bp, synthetic construct; identical to SEQ ID NO: 169182
  misc_feature 1..1284: note = Description of Artificial Sequence: Synthetic coding sequence
  source 1..1284: mol_type = other DNA

SEQ ID NO: 169187 - DNA, 804 bp, synthetic construct
  misc_feature 1..804: note = Description of Artificial Sequence: Synthetic coding sequence
  source 1..804: mol_type = other DNA
atggccgccacagacatcgcccggcaggtgggggagggctgcaggacagtgcccctggccggccacgtgggctttgacagcctgcctgaccagctggtgaacaagtctgtgtcccagggcttctgcttcaacatcctgtgtgtgggggagaccggcctgggcaagagcaccctgatggacaccctcttcaacaccaagtttgaaggagagcccgccacccacacccagcccggggtgcagctgcagagcaacacctatgacctgcaggagagcaatgtgcggctgaagctgaccatcgtgtccacagtgggctttggagaccagatcaacaaggaggacagctacaagcccatcgtggagttcattgatgcccagtttgaggcctacctgcaggaggagctgaagatcagaagagtgctgcacacctaccatgacagccgcatccacgtgtgcctgtacttcatcgcccccaccggccacagcctgaagagcctggacctggtgaccatgaagaagctggacagcaaggtgaacatcatccccatcatcgccaaggcagatgccatcagcaagtctgagctgaccaagttcaagatcaagatcaccagcgagctggtgtccaatggagtgcagatctaccagttccccacagatgatgaatctgtggccgagatcaatggcaccatgaatgcccacctgccctttgctgtgattggcagcacagaggagctgaagattggcaacaagatgatgagggcccggcagtacccctggggcaccgtgcagggcagcagccaggtgtag

SEQ ID NO: 169188 - DNA, 1452 bp, synthetic construct
  misc_feature 1..1452: note = Description of Artificial Sequence: Synthetic coding sequence
  source 1..1452: mol_type = other DNA
atggccgccacagacctggagcgcttcagcaatgctgagcctgagcccaggagcctgagcctgggcggccacgtgggctttgacagcctgcctgaccagctggtgtccaagtctgtgacccagggcttctccttcaacatcctgtgtgtgggggagactggaattggcaagagcaccctgatgaacaccctcttcaacaccacctttgaaacagaggaggccagccaccacgaggcctgtgtgcggctgcggccccagacctatgacctgcaggagagcaatgtgcagctgaagctgaccatcgtggatgctgtgggctttggagaccagatcaacaaggatgagagctaccggcccatcgtggactacattgatgcccagtttgagaactacctgcaggaggagctgaagatcagaagaagcctgtttgactaccatgacacccgcatccacgtgtgcctgtacttcatcacccccaccggccacagcctgaagagcctggacctggtgaccatgaagaagctggacagcaaggtgaacatcatccccatcatcgccaaggctgacaccatcagcaagtctgagctgcacaagttcaagatcaagatcatgggagagctggtgtccaatggagtgcagatctaccagttccccacagatgatgaagctgtggccgagatcaatgctgtgatgaatgcccacctgccctttgctgtggtgggcagcacagaggaggtgaaggtgggcaacaagctggtgcgggcccggcagtacccctggggcgtggtgcaggtggagaatgaaaaccactgtgactttgtgaagctgcgggagatgctgatccgggtgaacatggaggacctgcgggagcagacccacagccgccactatgagctgtaccgccgctgcaagctggaggagatgggcttccaggacagtgatggagacagccagcccttcagcctgcaggagacctatgaggccaagaggaaggagttcctgtctgagctgcagaggaaggaggaggagatgaggcagatgtttgtgaacaaggtgaaggagacagagctggagctgaaggagaaggagcgggagctgcacgagaagtttgagcacctgaagagggtgcaccaggaggagaagaggaaggtggaggagaagaggcgggagctggaggaggagaccaatgccttcaacagaaggaaggctgctgtggaggccctgcagagccaggccctgcacgccaccagccagcagcccctgaggaaggacaaggacaagaagaacagaagtgacattggagcccaccagcccggcatgagcctgagcagcagcaaggtgatgatgaccaaggcctctgtggagcccctgaactgcagctcctggtggccagccatccagtgctgcagctgcctggtgagagatgccacctggagggagggcttcctgtag

SEQ ID NO: 169189 - DNA, 1110 bp, synthetic construct
  misc_feature 1..1110: note = Description of Artificial Sequence: Synthetic coding sequence
  source 1..1110: mol_type = other DNA
atgaacaccctcttcaacaccacctttgaaacagaggaggccagccaccacgaggcctgtgtgcggctgcggccccagacctatgacctgcaggagagcaatgtgcagctgaagctgaccatcgtggatgctgtgggctttggagaccagatcaacaaggatgagagctaccggcccatcgtggactacattgatgcccagtttgagaactacctgcaggaggagctgaagatcagaagaagcctgtttgactaccatgacacccgcatccacgtgtgcctgtacttcatcacccccaccggccacagcctgaagagcctggacctggtgaccatgaagaagctggacagcaaggtgaacatcatccccatcatcgccaaggctgacaccatcagcaagtctgagctgcacaagttcaagatcaagatcatgggagagctggtgtccaatggagtgcagatctaccagttccccacagatgatgaagctgtggccgagatcaatgctgtgatgaatgcccacctgccctttgctgtggtgggcagcacagaggaggtgaaggtgggcaacaagctggtgcgggcccggcagtacccctggggcgtggtgcaggtggagaatgaaaaccactgtgactttgtgaagctgcgggagatgctgatccgggtgaacatggaggacctgcgggagcagacccacagccgccactatgagctgtaccgccgctgcaagctggaggagatgggcttccaggacagtgatggagacagccagcccttcagcctgcaggagacctatgaggccaagaggaaggagttcctgtctgagctgcagaggaaggaggaggagatgaggcagatgtttgtgaacaaggtgaaggagacagagctggagctgaaggagaaggagcgggagctgcacgagaagtttgagcacctgaagagggtgcaccaggaggagaagaggaaggtggaggagaagaggcgggagctggaggaggagaccaatgccttcaacagaaggaaggctgctgtggaggccctgcagagccaggccctgcacgccaccagccagcagcccctgaggaaggacaaggacaagaagaactag

SEQ ID NO: 169190 - DNA, 1290 bp, synthetic construct
  misc_feature 1..1290: note = Description of Artificial Sequence: Synthetic coding sequence
  source 1..1290: mol_type = other DNA
atggccgccacagacctggagcgcttcagcaatgctgagcctgagcccaggagcctgagcctgggcggccacgtgggctttgacagcctgcctgaccagctggtgtccaagtctgtgacccagggcttctccttcaacatcctgtgtgtgggggagactggaattggcaagagcaccctgatgaacaccctcttcaacaccacctttgaaacagaggaggccagccaccacgaggcctgtgtgcggctgcggccccagacctatgacctgcaggagagcaatgtgcagctgaagctgaccatcgtggatgctgtgggctttggagaccagatcaacaaggatgagagctaccggcccatcgtggactacattgatgcccagtttgagaactacctgcaggaggagctgaagatcagaagaagcctgtttgactaccatgacacccgcatccacgtgtgcctgtacttcatcacccccaccggccacagcctgaagagcctggacctggtgaccatgaagaagctggacagcaaggtgaacatcatccccatcatcgccaaggctgacaccatcagcaagtctgagctgcacaagttcaagatcaagatcatgggagagctggtgtccaatggagtgcagatctaccagttccccacagatgatgaagctgtggccgagatcaatgctgtgatgaatgcccacctgccctttgctgtggtgggcagcacagaggaggtgaaggtgggcaacaagctggtgcgggcccggcagtacccctggggcgtggtgcaggtggagaatgaaaaccactgtgactttgtgaagctgcgggagatgctgatccgggtgaacatggaggacctgcgggagcagacccacagccgccactatgagctgtaccgccgctgcaagctggaggagatgggcttccaggacagtgatggagacagccagcccttcagcctgcaggagacctatgaggccaagaggaaggagttcctgtctgagctgcagaggaaggaggaggagatgaggcagatgtttgtgaacaaggtgaaggagacagagctggagctgaaggagaaggagcgggagctgcacgagaagtttgagcacctgaagagggtgcaccaggaggagaagaggaaggtggaggagaagaggcgggagctggaggaggagaccaatgccttcaacagaaggaaggctgctgtggaggccctgcagagccaggccctgcacgccaccagccagcagcccctgaggaaggacaaggacaagaagaactag

SEQ ID NO: 169191 - DNA, 1329 bp, synthetic construct
  misc_feature 1..1329: note = Description of Artificial Sequence: Synthetic coding sequence
  source 1..1329: mol_type = other DNA
atggccgccacagacctggagcgcttcagcaatgctgagcctgagcccaggagcctgagcctgggcggccacgtgggctttgacagcctgcctgaccagctggtgtccaagtctgtgacccagggcttctccttcaacatcctgtgtgtgggggagactggaattggcaagagcaccctgatgaacaccctcttcaacaccacctttgaaacagaggaggccagccaccacgaggcctgtgtgcggctgcggccccagacctatgacctgcaggagagcaatgtgcagctgaagctgaccatcgtggatgctgtgggctttggagaccagatcaacaaggatgagagctaccggcccatcgtggactacattgatgcccagtttgagaactacctgcaggaggagctgaagatcagaagaagcctgtttgactaccatgacacccgcatccacgtgtgcctgtacttcatcacccccaccggccacagcctgaagagcctggacctggtgaccatgaagaagctggacagcaaggtgaacatcatccccatcatcgccaaggctgacaccatcagcaagtctgagctgcacaagttcaagatcaagatcatgggagagctggtgtccaatggagtgcagatctaccagttccccacagatgatgaagctgtggccgagatcaatgctgtgatgaatgcccacctgccctttgctgtggtgggcagcacagaggaggtgaaggtgggcaacaagctggtgcgggcccggcagtacccctggggcgtggtgcaggtggagaatgaaaaccactgtgactttgtgaagctgcgggagatgctgatccgggtgaacatggaggacctgcgggagcagacccacagccgccactatgagctgtaccgccgctgcaagctggaggagatgggcttccaggacagtgatggagacagccagcccttcagcctgcaggagacctatgaggccaagaggaaggagttcctgtctgagctgcagaggaaggaggaggagatgaggcagatgtttgtgaacaaggtgaaggagacagagctggagctgaaggagaaggagcgggagctgcacgagaagtttgagcacctgaagagggtgcaccaggaggagaagaggaaggtggaggagaagaggcgggagctggaggaggagaccaatgccttcaacagaaggaaggctgctgtggaggccctgcagagccaggccctgcacgccaccagccagcagcccctgaggaaggacaaggacaagaagaaggccagcggctggagcagcatctacagcgtgaccatcccctag

SEQ ID NO: 169192 - DNA, 1707 bp, synthetic construct
  misc_feature 1..1707: note = Description of Artificial Sequence: Synthetic coding sequence
  source 1..1707: mol_type = other DNA
atggagcgggaccgcatcagcgccctgaagaggagctttgaggtggaggaggtggagacccccaacagcaccccaccaagaagagtgcagacccccctgctgcgggccaccgtggccagcagcacccagaagttccaggacctgggcgtgaagaacagcgagcccagcgcccggcacgtggacagcctgagccagaggagccccaaggccagcctgcggcgggtggagctgagcggccccaaggctgctgagcctgtgtccagaagaacagagctgagcattgacatcagcagcaagcaggtggagaatgctggggccatcggccccagccgcttcggcctgaagagagctgaggtgctgggccacaagaccccagagcccgcccccaggagaacagagatcaccatcgtgaagccccaggagagcgcccacaggaggatggagcccccagccagcaaggtgcctgaggtgcccacagccccagccacagatgctgcccccaagagggtggagatccagatgcccaagccagctgaggcccccacagcccccagccctgcccagaccctggagaacagcgagcccgcccctgtgtcccagctgcagagccggctggagcccaagccccagccccctgtggccgaggccacccccaggagccaggaggccacagaggccgcccccagctgtgtgggggacatggctgacaccccaagagatgctggcctgaagcaggccccagccagcagaaatgagaaggcccctgtggactttggctacgtgggcatcgacagcatcctggagcagatgaggaggaaggccatgaagcagggctttgagttcaacatcatggtggtgggccagagcggcctgggcaagagcaccctcatcaacaccctcttcaagagcaagatcagcaggaagtctgtgcagcccaccagcgaggagcgcatccccaagaccatcgagatcaagagcatcacccatgacatcgaggagaagggcgtgaggatgaagctgactgtgattgacaccccaggctttggagaccacatcaacaatgaaaactgctggcagcccatcatgaagttcatcaatgaccagtatgagaagtacctgcaggaggaggtgaacatcaacaggaagaagaggatcccagacaccagggtgcactgctgcctgtacttcatcccagccaccggccacagcctgcggcccctggacatcgagttcatgaagaggctgagcaaggtggtgaacatcgtgcctgtgattgccaaggctgacaccctgaccctggaggagcgggtgcacttcaagcagaggatcacagctgacctgctgagcaatggaattgatgtgtacccccagaaggagtttgatgaggacagtgaagatcggctggtgaatgagaagttccgggagatgatcccctttgctgtggtgggcagtgaccacgagtaccaggtgaatggcaagaggatcctgggcaggaagaccaagtggggcaccatcgaggtggagaacaccacccactgtgaatttgcctacctgcgggacctgctgatccgcacccacatgcagaacatcaaggacatcaccagcagcatccactttgaggcctacagagtgaagaggctgaatgaaggcagcagcgccatggccaacggcatggaggagaaggagcctgaggcccctgagatgtag

SEQ ID NO: 169193 - DNA, 591 bp, synthetic construct
  misc_feature 1..591: note = Description of Artificial Sequence: Synthetic coding sequence
  source 1..591: mol_type = other DNA
atggctgacaccccaagagatgctggcctgaagcaggccccagccagcagaaatgagaaggcccctgtggactttggctacgtgggcatcgacagcatcctggagcagatgaggaggaaggccatgaagcagggctttgagttcaacatcatggtggtgggccagagcggcctgggcaagagcaccctcatcaacaccctcttcaagagcaagatcagcaggaagtctgtgcagcccaccagcgaggagcgcatccccaagaccatcgagatcaagagcatcacccatgacatcgaggagaagggcgtgaggatgaagctgaccgtcatcgacaccccaggctttggagaccacatcaacaatgaaaactgctggcagcccatcatgaagttcatcaatgaccagtatgagaagtacctgcaggaggaggtgaacatcaacaggaagaagaggatcccagacaccagggtgcactgctgcctgtacttcatcccagccaccggccacagcctgcccctgctggagcagaaggtgcccctgagccagcccagcgctgactgcctggcccgctgtggggaccggctggagtag

SEQ ID NO: 169194 - DNA, 1740 bp, synthetic construct
  misc_feature 1..1740: note = Description of Artificial Sequence: Synthetic coding sequence
  source 1..1740: mol_type = other DNA
atgtctgaccctgctgtgaatgcccagctggatggcatcatcagtgactttgaggccctgaagaggagctttgaggtggaggaggtggagacccccaacagcaccccaccccggcgggtgcagacccccctgctgcgggccaccgtggccagcagcacccagaagttccaggacctgggcgtgaagaacagcgagcccagcgcccggcacgtggacagcctgagccagaggagccccaaggccagcctgcggcgggtggagctgagcggccccaaggctgctgagcctgtgtccagaagaacagagctgagcattgacatcagcagcaagcaggtggagaatgctggggccatcggccccagcagatttggcctgaagagagctgaggtgctgggccacaagaccccagagcccgcccccaggagaacagagatcaccatcgtgaagccccaggagagcgcccacaggaggatggagcccccagccagcaaggtgcctgaggtgcccacagccccagccacagatgctgcccccaagagggtggagatccagatgcccaagccagctgaggcccccacagcccccagccctgcccagaccctggagaacagcgagcccgcccctgtgtcccagctgcagagccggctggagcccaagccccagccccctgtggccgaggccacccccaggagccaggaggccacagaagctgcccccagctgtgtgggggacatggctgacaccccaagagatgctggcctgaagcaggccccagccagcagaaatgagaaggcccctgtggactttggctacgtgggcatcgacagcatcctggagcagatgaggaggaaggccatgaagcagggctttgagttcaacatcatggtggtgggccagagcggcctgggcaagagcaccctcatcaacaccctcttcaagagcaagatcagcaggaagtctgtgcagcccaccagcgaggagcgcatccccaagaccatcgagatcaagagcatcacccatgacatcgaggagaagggcgtgaggatgaagctgaccgtcatcgacaccccaggctttggagaccacatcaacaatgaaaactgctggcagcccatcatgaagttcatcaatgaccagtatgagaagtacctgcaggaggaggtgaacatcaacaggaagaagaggatcccagacaccagggtgcactgctgcctgtacttcatcccagccaccggccacagcctgcggcccctggacatcgagttcatgaagaggctgagcaaggtggtgaacatcgtgcctgtgattgccaaggctgacaccctgaccctggaggagcgggtgcacttcaagcagaggatcacagctgacctgctgagcaatggaattgatgtgtacccccagaaggagtttgatgaagattctgaggaccggctggtgaatgagaagttccgggagatgatcccctttgctgtggtgggcagtgaccacgagtaccaggtgaatggcaagaggatcctgggcaggaagaccaagtggggcaccatcgaggtggagaacaccacccactgtgaatttgcctacctgcgggacctgctgatccgcacccacatgcagaacatcaaggacatcaccagcagcatccactttgaggcctacagagtgaagaggctgaatgaaggcagcagcgccatggccaacggcatggaggagaaggagcctgaggcccctgagatgtag

SEQ ID NO: 169195 - DNA, 1761 bp, synthetic construct
  misc_feature 1..1761: note = Description of Artificial Sequence: Synthetic coding sequence
  source 1..1761: mol_type = other DNA
atgaagaagagctacagcggcggcaccaggaccagcagcggccgcctgcggcggctgggggacagcagcggccctgccctgaagaggagctttgaggtggaggaggtggagacccccaacagcaccccaccaagaagagtgcagacccccctgctgcgggccaccgtggccagcagcacccagaagttccaggacctgggcgtgaagaacagcgagcccagcgcccggcacgtggacagcctgagccagaggagccccaaggccagcctgcggcgggtggagctgagcggccccaaggctgctgagcctgtgtccagaagaacagagctgagcattgacatcagcagcaagcaggtggagaatgctggggccatcggccccagccgcttcggcctgaagagagctgaggtgctgggccacaagaccccagagcccgcccccaggagaacagagatcaccatcgtgaagccccaggagagcgcccacaggaggatggagcccccagccagcaaggtgcctgaggtgcccacagccccagccacagatgctgcccccaagagggtggagatccagatgcccaagccagctgaggcccccacagcccccagccctgcccagaccctggagaacagcgagcccgcccctgtgtcccagctgcagagccggctggagcccaagccccagccccctgtggccgaggccacccccaggagccaggaggccacagaggccgcccccagctgtgtgggggacatggctgacaccccaagagatgctggcctgaagcaggccccagccagcagaaatgagaaggcccctgtggactttggctacgtgggcatcgacagcatcctggagcagatgaggaggaaggccatgaagcagggctttgagttcaacatcatggtggtgggccagagcggcctgggcaagagcaccctcatcaacaccctcttcaagagcaagatcagcaggaagtctgtgcagcccaccagcgaggagcgcatccccaagaccatcgagatcaagagcatcacccatgacatcgaggagaagggcgtgaggatgaagctgactgtgattgacaccccaggctttggagaccacatcaacaatgaaaactgctggcagcccatcatgaagttcatcaatgaccagtatgagaagtacctgcaggaggaggtgaacatcaacaggaagaagaggatcccagacaccagggtgcactgctgcctgtacttcatcccagccaccggccacagcctgcggcccctggacatcgagttcatgaagaggctgagcaaggtggtgaacatcgtgcctgtgattgccaaggctgacaccctgaccctggaggagcgggtgcacttcaagcagaggatcacagctgacctgctgagcaatggaattgatgtgtacccccagaaggagtttgatgaggacagtgaagatcggctggtgaatgagaagttccgggagatgatcccctttgctgtggtgggcagtgaccacgagtaccaggtgaatggcaagaggatcctgggcaggaagaccaagtggggcaccatcgaggtggagaacaccacccactgtgaatttgcctacctgcgggacctgctgatccgcacccacatgcagaacatcaaggacatcaccagcagcatccactttgaggcctacagagtgaagaggctgaatgaaggcagcagcgccatggccaacggcatggaggagaaggagcctgaggcccctgagatgtag

SEQ ID NO: 169196 - DNA, 1425 bp, synthetic construct
  misc_feature 1..1425: note = Description of Artificial Sequence: Synthetic coding sequence
  source 1..1425: mol_type = other DNA
atgggcagcagcttctgggagggcctgcaggtggccgtgggcctgccccagggctgctggccccagggcctggacagcggggagcctgctgagggcggccagctggaggccgcccctgtgtgcatcgtgacccggcagagcaaggagacagctggccccaccctgggccggggcggctggaggcagggcagcctgcggcggggcaagggcaccagctgccgctgccggcagctgagccctggccacggccctggccgcctgaccggctgtggggagtgccaccggctgccctgccggggcctggtgtctggcttcaccggcctgcggggccaggaggaggatgacctggccttctgcctggccaccatcggcagtgaccggcaggccacagaggccgcccccagctgtgtgggggacatggctgacaccccaagagatgctggcctgaagcaggccccagccagcagaaatgagaaggcccctgtggactttggctacgtgggcatcgacagcatcctggagcagatgaggaggaaggccatgaagcagggctttgagttcaacatcatggtggtgggccagagcggcctgggcaagagcaccctcatcaacaccctcttcaagagcaagatcagcaggaagtctgtgcagcccaccagcgaggagcgcatccccaagaccatcgagatcaagagcatcacccatgacatcgaggagaagggcgtgaggatgaagctgactgtgattgacaccccaggctttggagaccacatcaacaatgaaaactgctggcagcccatcatgaagttcatcaatgaccagtatgagaagtacctgcaggaggaggtgaacatcaacaggaagaagaggatcccagacaccagggtgcactgctgcctgtacttcatcccagccaccggccacagcctgcggcccctggacatcgagttcatgaagaggctgagcaaggtggtgaacatcgtgcctgtgattgccaaggctgacaccctgaccctggaggagcgggtgcacttcaagcagaggatcacagctgacctgctgagcaatggaattgatgtgtacccccagaaggagtttgatgaggacagtgaagatcggctggtgaatgagaagttccgggagatgatcccctttgctgtggtgggcagtgaccacgagtaccaggtgaatggcaagaggatcctgggcaggaagaccaagtggggcaccatcgaggtggagaacaccacccactgtgaatttgcctacctgcgggacctgctgatccgcacccacatgcagaacatcaaggacatcaccagcagcatccactttgaggcctacagagtgaagaggctgaatgaaggcagcagcgccatggccaacggcatggaggagaaggagcctgaggcccctgagatgtag

SEQ ID NO: 169197 - DNA, 1269 bp, synthetic construct
  misc_feature 1..1269: note = Description of Artificial Sequence: Synthetic coding sequence
  source 1..1269: mol_type = other DNA
atggagcccccagccagcaaggtgcctgaggtgcccacagccccagccacagatgctgcccccaagagggtggagatccagatgcccaagccagctgaggcccccacagcccccagccctgcccagaccctggagaacagcgagcccgcccctgtgtcccagctgcagagccggctggagcccaagccccagccccctgtggccgaggccacccccaggagccaggaggccacagaggccgcccccagctgtgtgggggacatggctgacaccccaagagatgctggcctgaagcaggccccagccagcagaaatgagaaggcccctgtggactttggctacgtgggcatcgacagcatcctggagcagatgaggaggaaggccatgaagcagggctttgagttcaacatcatggtggtgggccagagcggcctgggcaagagcaccctcatcaacaccctcttcaagagcaagatcagcaggaagtctgtgcagcccaccagcgaggagcgcatccccaagaccatcgagatcaagagcatcacccatgacatcgaggagaagggcgtgaggatgaagctgactgtgattgacaccccaggctttggagaccacatcaacaatgaaaactgctggcagcccatcatgaagttcatcaatgaccagtatgagaagtacctgcaggaggaggtgaacatcaacaggaagaagaggatcccagacaccagggtgcactgctgcctgtacttcatcccagccaccggccacagcctgcggcccctggacatcgagttcatgaagaggctgagcaaggtggtgaacatcgtgcctgtgattgccaaggctgacaccctgaccctggaggagcgggtgcacttcaagcagaggatcacagctgacctgctgagcaatggaattgatgtgtacccccagaaggagtttgatgaggacagtgaagatcggctggtgaatgagaagttccgggagatgatcccctttgctgtggtgggcagtgaccacgagtaccaggtgaatggcaagaggatcctgggcaggaagaccaagtggggcaccatcgaggtggagaacaccacccactgtgaatttgcctacctgcgggacctgctgatccgcacccacatgcagaacatcaaggacatcaccagcagcatccactttgaggcctacagagtgaagaggctgaatgaaggcagcagcgccatggccaacggcatggaggagaaggagcctgaggcccctgagatgtag

SEQ ID NO: 169198 - DNA, 1008 bp, synthetic construct
  misc_feature 1..1008: note = Description of Artificial Sequence: Synthetic coding sequence
  source 1..1008: mol_type = other DNA
atggctgacaccccaagagatgctggcctgaagcaggccccagccagcagaaatgagaaggcccctgtggactttggctacgtgggcatcgacagcatcctggagcagatgaggaggaaggccatgaagcagggctttgagttcaacatcatggtggtgggccagagcggcctgggcaagagcaccctcatcaacaccctcttcaagagcaagatcagcaggaagtctgtgcagcccaccagcgaggagcgcatccccaagaccatcgagatcaagagcatcacccatgacatcgaggagaagggcgtgaggatgaagctgaccgtcatcgacaccccaggctttggagaccacatcaacaatgaaaactgctggcagcccatcatgaagttcatcaatgaccagtatgagaagtacctgcaggaggaggtgaacatcaacaggaagaagaggatcccagacaccagggtgcactgctgcctgtacttcatcccagccaccggccacagcctgcggcccctggacatcgagttcatgaagaggctgagcaaggtggtgaacatcgtgcctgtgattgccaaggctgacaccctgaccctggaggagcgggtgcacttcaagcagaggatcacagctgacctgctgagcaatggaattgatgtgtacccccagaaggagtttgatgaagattctgaggaccggctggtgaatgagaagttccgggagatgatcccctttgctgtggtgggcagtgaccacgagtaccaggtgaatggcaagaggatcctgggcaggaagaccaagtggggcaccatcgaggtggagaacaccacccactgtgaatttgcctacctgcgggacctgctgatccgcacccacatgcagaacatcaaggacatcaccagcagcatccactttgaggcctacagagtgaagaggctgaatgaaggcagcagcgccatggccaacggcatggaggagaaggagcctgaggcccctgagatgtag

SEQ ID NO: 169199 - DNA, 1269 bp, synthetic construct; identical to SEQ ID NO: 169197
  misc_feature 1..1269: note = Description of Artificial Sequence: Synthetic coding sequence
  source 1..1269: mol_type = other DNA

SEQ ID NO: 169200 - DNA, 1089 bp, synthetic construct
  misc_feature 1..1089: note = Description of Artificial Sequence: Synthetic coding sequence
  source 1..1089: mol_type = other DNA
atggccggggccggctgcaccggcacctggagctggctgtggggcacagccacagaggccgcccccagctgtgtgggggacatggctgacaccccaagagatgctggcctgaagcaggccccagccagcagaaatgagaaggcccctgtggactttggctacgtgggcatcgacagcatcctggagcagatgaggaggaaggccatgaagcagggctttgagttcaacatcatggtggtgggccagagcggcctgggcaagagcaccctcatcaacaccctcttcaagagcaagatcagcaggaagtctgtgcagcccaccagcgaggagcgcatccccaagaccatcgagatcaagagcatcacccatgacatcgaggagaagggcgtgaggatgaagctgactgtgattgacaccccaggctttggagaccacatcaacaatgaaaactgctggcagcccatcatgaagttcatcaatgaccagtatgagaagtacctgcaggaggaggtgaacatcaacaggaagaagaggatcccagacaccagggtgcactgctgcctgtacttcatcccagccaccggccacagcctgcggcccctggacatcgagttcatgaagaggctgagcaaggtggtgaacatcgtgcctgtgattgccaaggctgacaccctgaccctggaggagcgggtgcacttcaagcagaggatcacagctgacctgctgagcaatggaattgatgtgtacccccagaaggagtttgatgaggacagtgaagatcggctggtgaatgagaagttccgggagatgatcccctttgctgtggtgggcagtgaccacgagtaccaggtgaatggcaagaggatcctgggcaggaagaccaagtggggcaccatcgaggtggagaacaccacccactgtgaatttgcctacctgcgggacctgctgatccgcacccacatgcagaacatcaaggacatcaccagcagcatccactttgaggcctacagagtgaagaggctgaatgaaggcagcagcgccatggccaacggcatggaggagaaggagcctgaggcccctgagatgtag

SEQ ID NO: 169201 - DNA, 582 bp, synthetic construct
  misc_feature 1..582: note = Description of Artificial Sequence: Synthetic coding sequence
  source 1..582: mol_type = other DNA
atgaccctgtgcccccaggcctggctgcctgagggcagcgaggagcagctgcgctgtgccgaccaccccagctgtggggtgctgtctgctggcccctggggcggcggccaggccagccacctgcagaggagccctgtgggctgcaccctgcccagcatccccatcggccctgtgccctggagcgtgtctgagcccagaggagagtgcagccccccaggggcccctggccccccagcccggcacatggtgtggcccagcctgagcccctacccctgcccagcccccaagggcaggaagctgcagggccccctgcccccaacagcccagcccctgcaggccccctggcagctgcccctgctggagcagaaggtgcccctgagccagcccagcgctgactgctggccagatgctggcaccggctggaatgaaggaggagtcttcatcagcctgcccagccccagccacgccaccccagcccccaccggcctgcaggtgctgctgatgcgctgggacctgattgaggacaagaaggagggggagatgacccccacccccagcagccccagctttgagaaggtgtag

SEQ ID NO: 169202 - DNA, 1071 bp, synthetic construct
  misc_feature 1..1071: note = Description of Artificial Sequence: Synthetic coding sequence
  source 1..1071: mol_type = other DNA
atggccatgtcctatgtgaaggatgacatcttccgcatctacatcaaggagaagaaggagtgccggcgggaccacaggcctccctgtgcccaggaggcccccaggaacatggtgcaccccaacgtcatctgtgatggctgcaatggacctgtggtgggcacccgctacaagtgcagcgtgtgcccagactatgacctgtgcagcgtgtgtgagggcaagggcctgcaccggggccacaccaagctggccttccccagccccttcggccacctgtctgagggcttcagccacagccgctggctgaggaaggtgaagcacggccacttcggctggccaggctgggagatgggccccccaggcaactggagcccccggccccccagggctggggaggcccggcccggccccacagctgagagcgccagcggccccagcgaggaccccagcgtgaacttcctgaagaatgtgggggagagcgtggccgccgccctgagccccctgggcatcgaggtggacattgatgtggagcacggcggcaagaggagccggctgacccctgtgtccccagagagcagcagcacagaggagaagagcagcagccagcccagcagctgctgcagcgaccccagcaagccaggcggcaatgtggagggcgccacccagagcctggccgagcagatgaggaagatcgccctggagagcgagggccggcctgaggagcagatggagagtgacaactgcagcggaggagatgatgactggacccacctgagcagcaaggaggtggaccccagcactggagagctgcagagcctgcagatgcctgagagcgagggccccagcagcctggaccccagccaggagggccccaccggcctgaaggaggccgccctgtacccccacctgcccccagaggccgacccccggctgattgagagcctgagccagatgctgtccatgggcttcagtgatgagggcggctggctgacccggctgctgcagaccaagaactatgacatcggggccgccctggacaccatccagtacagcaagcaccccccacccctgtag

SEQ ID NO: 169203 - DNA, 1071 bp, synthetic construct; identical to SEQ ID NO: 169202
  misc_feature 1..1071: note = Description of Artificial Sequence: Synthetic coding sequence
  source 1..1071: mol_type = other DNA

SEQ ID NO: 169204 - DNA, 1323 bp, synthetic construct
  misc_feature 1..1323: note = Description of Artificial Sequence: Synthetic coding sequence
  source 1..1323: mol_type = other DNA
atggccagcctgactgtgaaggcctacctgctgggcaaggaggatgctgcccgggagatccgccgcttctccttctgctgcagccctgagcctgaggccgaggccgaggccgctgctggccctggcccctgtgagcggctgctgagccgggtggccgccctcttccctgccctgcggcctgggggcttccaggcccactacagagatgaagatggagacctggtggccttcagcagtgatgaggagctgaccatggccatgtcctatgtgaaggatgacatcttccgcatctacatcaaggagaagaaggagtgccggcgggaccacaggcctccctgtgcccaggaggcccccaggaacatggtgcaccccaacgtcatctgtgatggctgcaatggacctgtggtgggcacccgctacaagtgcagcgtgtgcccagactatgacctgtgcagcgtgtgtgagggcaagggcctgcaccggggccacaccaagctggccttccccagccccttcggccacctgtctgagggcttcagccacagccgctggctgaggaaggtgaagcacggccacttcggctggccaggctgggagatgggccccccaggcaactggagcccccggccccccagggctggggaggcccggcccggccccacagctgagagcgccagcggccccagcgaggaccccagcgtgaacttcctgaagaatgtgggggagagcgtggccgccgccctgagccccctgggcatcgaggtggacattgatgtggagcacggcggcaagaggagccggctgacccctgtgtccccagagagcagcagcacagaggagaagagcagcagccagcccagcagctgctgcagcgaccccagcaagccaggcggcaatgtggagggcgccacccagagcctggccgagcagatgaggaagatcgccctggagagcgagggccggcctgaggagcagatggagagtgacaactgcagcggaggagatgatgactggacccacctgagcagcaaggaggtggaccccagcactggagagctgcagagcctgcagatgcctgagagcgagggccccagcagcctggaccccagccaggagggccccaccggcctgaaggaggccgccctgtacccccacctgcccccagaggccgacccccggctgattgagagcctgagccagatgctgtccatgggcttcagtgatgagggcggctggctgacccggctgctgcagaccaagaactatgacatcggggccgccctggacaccatccagtacagcaagcaccccccacccctgtag

SEQ ID NO: 169205 - DNA, 1071 bp, synthetic construct; identical to SEQ ID NO: 169202
  misc_feature 1..1071: note = Description of Artificial Sequence: Synthetic coding sequence
  source 1..1071: mol_type = other DNA

SEQ ID NO: 169206 - DNA, 423 bp, synthetic construct
  misc_feature 1..423: note = Description of Artificial Sequence: Synthetic coding sequence
  source 1..423: mol_type = other DNA
atggccatgtcctatgtgaaggatgacatcttccgcatctacatcaaggagaagaaggagtgccggcgggaccacaggcctccctgtgcccaggaggcccccaggaacatggtgcaccccaacgtcatctgtgatggctgcaatggacctgtggtgggcacccgctacaagtgcagcgtgtgcccagactatgacctgtgcagcgtgtgtgagggcaagggcctgcaccggggccacaccaagctggccttccccagccccttcggccacctgtctgagggcttcagccacagccgctggctgaggaaggtgaagcacggccacttcggctggccaggctgggagatgggccccccaggcaactggagcccccggccccccagggctggggaggcccggcccggccccacagctgagagctag

SEQ ID NO: 169207 - DNA, 891 bp, synthetic construct
  misc_feature 1..891: note = Description of Artificial Sequence: Synthetic coding sequence
  source 1..891: mol_type = other DNA
atgaccagcagcgagagcaccctgaagaggaagaagtctgctgggggcaccacagcccaccgggtgctgcggcggcggcccttcggccacctgtctgagggcttcagccacagccgctggctgaggaaggtgaagcacggccacttcggctggccaggctgggagatgggccccccaggcaactggagcccccggccccccagggctggggaggcccggcccggccccacagctgagagcgccagcggccccagcgaggaccccagcgtgaacttcctgaagaatgtgggggagagcgtggccgccgccctgagccccctgggcatcgaggtggacattgatgtggagcacggcggcaagaggagccggctgacccctgtgtccccagagagcagcagcacagaggagaagagcagcagccagcccagcagctgctgcagcgaccccagcaagccaggcggcaatgtggagggcgccacccagagcctggccgagcagatgaggaagatcgccctggagagcgagggccggcctgaggagcagatggagagtgacaactgcagcggaggagatgatgactggacccacctgagcagcaaggaggtggaccccagcactggagagctgcagagcctgcagatgcctgagagcgagggccccagcagcctggaccccagccaggagggccccaccggcctgaaggaggccgccctgtacccccacctgcccccagaggccgacccccggctgattgagagcctgagccagatgctgtccatgggcttcagtgatgagggcggctggctgacccggctgctgcagaccaagaactatgacatcggggccgccctggacaccatccagtacagcaagcaccccccacccctgtag

SEQ ID NO: 169208 - DNA, 504 bp, synthetic construct
  misc_feature 1..504: note = Description of Artificial Sequence: Synthetic coding sequence
  source 1..504: mol_type = other DNA
atggccatgtcctatgtgaaggatgacatcttccgcatctacatcaaggagaagaaggagtgccggcgggaccacaggcctccctgtgcccaggaggcccccaggaacatggtgcaccccaacgtcatctgtgatggctgcaatggacctgtggtgggcacccgctacaagtgcagcgtgtgcccagactatgacctgtgcagcgtgtgtgagggcaagggcctgcaccggggccacaccaagctggccttccccagccccttcggccacctgtctgagggcttcagccacagccgctggctgaggaaggtgaagcacggccacttcggctggccaggctgggagatgggccccccaggcaactggagcccccggccccccagggctggggaggcccggcccggccccacagctgagagcgccagcggccccagcgaggaccccagcgtgaacttcctgaagaatgtgggggagagcgtggccgccgccctgagccccctgtag

SEQ ID NO: 169209 - DNA, 477 bp, synthetic construct
  misc_feature 1..477: note = Description of Artificial Sequence: Synthetic coding sequence
  source 1..477: mol_type = other DNA
atgatgcagaagctgctgaagtgcagccggctggtgctggccctggccctgatcctggtgctggagagctctgtgcagggctaccccacccggcgggcccgctaccagtgggtgcgctgcaacccagacagcaacagcgccaactgcctggaggagaagggccccatgtttgagctgctgcctggagagagcaacaagatcccccggctgaggacagacctcttccccaagacccgcatccaggacctgaaccgcatcttccccctgtctgaggactacagcggcagcggcttcggcagcggcagcggcagcggcagcggcagcggcagcggcttcctgacagagatggagcaggactaccagctggtggatgaaagtgatgccttccatgacaacctgcggagcctggacaggaacctgcccagcgacagccaggacctgggccagcacggcctggaggaggacttcatgctgtag

SEQ ID NO: 169210 - DNA, 987 bp, synthetic construct
  misc_feature 1..987: note = Description of Artificial Sequence: Synthetic coding sequence
  source 1..987: mol_type = other DNA
atgatgtctggagagcccctgcacgtgaagacccccatccgggacagcatggccctgagcaagatggccggcacctctgtgtacctgaagatggattctgcccagcccagcggcagcttcaagatccggggcatcggccacttctgcaagcgctgggccaagcagggctgtgcccactttgtgtgcagcagcgctggaaatgccggcatggccgccgcctatgctgcccggcagctgggcgtgcctgccaccatcgtggtgcccagcaccaccccagccctgaccatcgagcggctgaagaatgaaggagccaccgtgaaggtggtgggggagctgctggatgaggcctttgagctggccaaggccctggccaagaacaaccctggctgggtgtacatccccccatttgatgaccccctcatctgggagggccacgccagcatcgtgaaggagctgaaggagaccctgtgggagaagccaggggccatcgccctgtctgtgggcggcggcggcctgctgtgtggggtggtgcagggcctgcaggaggtgggctggggagatgtgcctgtgattgccatggagaccttcggggcccacagcttccacgccgccaccacagctgggaagctggtgtccctgcccaagatcacctctgtggccaaggccctgggcgtgaagacagtgggcgcccaggccctgaagctgttccaggagcaccccatcttcagcgaggtgatcagtgaccaggaggccgtggccgccatcgagaagtttgtggatgatgagaagatcctggtggagcccgcctgtggggccgccctggccgctgtgtacagccacgtgatccagaagctgcagctggagggcaacctgcggacccccctgcccagcctggtggtgattgtgtgtggcggcagcaacatcagcctggcccagctgcgggccctgaaggagcagctgggcatgaccaaccggctgcccaagtag

SEQ ID NO: 169211 - DNA, 657 bp, synthetic construct
  misc_feature 1..657: note = Description of Artificial Sequence: Synthetic coding sequence
  source 1..657: mol_type = other DNA
atgatgtctggagagcccctgcacgtgaagacccccatccgggacagcatggccctgagcaagatggccggcacctctgtgtacctgaagatggattctgcccagcccagcggcagcttcaagatccggggcatcggccacttctgcaagcgctgggccaagcagggctgtgcccactttgtgtgcagcagcgctggaaatgccggcatggccgccgcctatgctgcccggcagctgggcgtgcctgccaccatcgtggtgcccagcaccaccccagccctgaccatcgagcggctgaagaatgaaggagccaccgtgaaggtggtgggggagctgctggatgaggcctttgagctggccaaggccctggccaagaacaaccctggctgggtgtacatccccccatttgatgaccccctcatctgggagggccacgccagcatcgtgaaggagctgaaggagaccctgtgggagaagccaggggccatcgccctgtctgtgggcggcggcggcctgctgtgtggggtggtgcagggcctgcaggaggtgggctggggagatgtgcctgtgattgccatggagaccttcggggcccacagcttccacgccgccaccacagctgggaagctggtgtccctgcccaagatcaccaggtag

SEQ ID NO: 169212 - DNA, 1452 bp, synthetic construct
  misc_feature 1..1452: note = Description of Artificial Sequence: Synthetic coding sequence
  source 1..1452: mol_type = other DNA
atgaccatgcctgtgaatggagcccacaaggatgctgacctgtggagcagccatgacaagatgctggcccagcccctgaaggacagtgatgtggaggtgtacaacatcatcaagaaggagagcaaccggcagagggtgggcctggagctgattgccagcgagaactttgccagcagagctgtgctggaggccctgggcagctgcctgaacaacaagtacagcgagggctacccaggccagcgctactatggaggaacagagttcattgatgagctggagaccctgtgccagaagagggccctgcaggcctacaagctggacccccagtgctggggcgtgaatgtgcagccctacagcggcagccctgccaactttgctgtgtacacagccctggtggagccccacggccgcatcatgggcctggacctgcctgatggcggccacctgacccacggcttcatgacagacaagaagaagatcagcgccaccagcatcttctttgagagcatgccctacaaggtgaacccagacaccggctacatcaactatgaccagctggaggagaatgcccggctcttccaccccaagctgatcatcgccggcaccagctgctacagcaggaacctggagtatgcccggctgaggaagattgctgatgaaaatggagcctacctgatggctgacatggcccacatcagcggcctggtggccgccggcgtggtgcccagcccctttgagcactgccacgtggtgaccaccaccacccacaagaccctgcggggctgccgggccggcatgatcttctacagaaaaggagtgaagtctgtggaccccaagacaggcaaggagatcctgtacaacctggagagcctcatcaacagcgctgtgtttcctggcctgcagggcggcccccacaaccacgccatcgccggcgtggccgtggccctgaagcaggccatgaccctggagttcaaggtgtaccagcaccaggtggtggccaactgccgggccctgtctgaggccctgacagagctgggctacaagatcgtgactggaggcagtgacaaccacctgatcctggtggacctgcggagcaagggcacagatggcggccgggcagagaaggtgctggaggcctgcagcatcgcctgcaacaagaacacctgccctggggacagaagtgccctgcggcccagcggcctgcggctgggcaccccagccctgaccagccggggcctgctggagaaggacttccagaaggtggcccacttcatccaccggggcatcgagctgaccctgcagatccagagcgacacaggagtgcgggccaccctgaaggagttcaaggagcggctggccggggacaagtaccaggccgctgtgcaggccctgcgggaggaggtggagagctttgccagcctcttccccctgcccggcctgcctgacttctag

SEQ ID NO: 169213 - DNA, 378 bp, synthetic construct
  misc_feature 1..378: note = Description of Artificial Sequence: Synthetic coding sequence
  source 1..378: mol_type = other DNA
atgagatacctgctgcaggtggcccagctggtgtggctgactgtggacagccggggcatcggcggcaccctggaccatgctggcttcagcatctgcatcttcaccgtgccccccctgtccttcttcggcctgtgtgaggcccagaccttcggcctgagcggcagcaagagccctgccctgcaccgctactacggcggcacagagttcattgatgagctggagaccctgtgccagaagagggccctgcaggcctacaagctggacccccagtgctggggcgtgaatgtgcccacccaggtgctggtgagcagcatctggccaggagctgccagcagctgtgccagccccagggctgacatgcaccaggaggagagctag

SEQ ID NO: 169214 - DNA, 1212 bp, synthetic construct
  misc_feature 1..1212: note = Description of Artificial Sequence: Synthetic coding sequence
  source 1..1212: mol_type = other DNA
atgaccatgcctgtgaatggagcccacaaggatgctgacctgtggagcagccatgacaagatgctggcccagcccctgaaggacagtgatgtggaggtgtacaacatcatcaagaaggagagcaaccggcagagggtgggcctggagctgattgccagcgagaactttgccagcagagctgtgctggaggccctgggcagctgcctgaacaacaagtacagcgagggctacccaggccagcgctactatggaggaacagagttcattgatgagctggagaccctgtgccagaagagggccctgcaggcctacaagctggacccccagtgctggggcgtgaatgtgcagccctacagcggcagccctgccaactttgctgtgtacacagccctggtggagccccacggccgcatcatgggcctggacctgcctgatggcggccacctgacccacggcttcatgacagacaagaagaagatcagcgccaccagcatcttctttgagagcatgccctacaaggtgaacccagacaccggctacatcaactatgaccagctggaggagaatgcccggctcttccaccccaagctgatcatcgccggcaccagctgctacagcaggaacctggagtatgcccggctgaggaagattgctgatgaaaatggagcctacctgatggctgacatggcccacatcagcggcctggtggccgccggcgtggtgcccagcccctttgagcactgccacgtggtgaccaccaccacccacaagaccctgcggggctgccgggccggcatgatcttctacagaaaaggaggcagtgacaaccacctgatcctggtggacctgcggagcaagggcacagatggcggccgggcagagaaggtgctggaggcctgcagcatcgcctgcaacaagaacacctgccctggggacagaagtgccctgcggcccagcggcctgcggctgggcaccccagccctgaccagccggggcctgctggagaaggacttccagaaggtggcccacttcatccaccggggcatcgagctgaccctgcagatccagagcgacacaggagtgcgggccaccctgaaggagttcaaggagcggctggccggggacaagtaccaggccgctgtgcaggccctgcgggaggaggtggagagctttgccagcctcttccccctgcccggcctgcctgacttctag

SEQ ID NO: 169215 - DNA, 1335 bp, synthetic construct
  misc_feature 1..1335: note = Description of Artificial Sequence: Synthetic coding sequence
  source 1..1335: mol_type = other DNA
atgaccatgcctgtgaatggagcccacaaggatgctgacctgtggagcagccatgacaagatgctggcccagcccctgaaggacagtgatgtggaggtgtacaacatcatcaagaaggagagcaaccggcagagggtgggcctggagctgattgccagcgagaactttgccagcagagctgtgctggaggccctgggcagctgcctgaacaacaagtacagcgagggctacccaggccagcgctactatggaggaacagagttcattgatgagctggagaccctgtgccagaagagggccctgcaggcctacaagctggacccccagtgctggggcgtgaatgtgcagccctacagcggcagccctgccaactttgctgtgtacacagccctggtggagccccacggccgcatcatgggcctggacctgcctgatggcggccacctgacccacggcttcatgacagacaagaagaagatcagcgccaccagcatcttctttgagagcatgccctacaaggtgaacccagacaccggctacatcaactatgaccagctggaggagaatgcccggctcttccaccccaagctgatcatcgccggcaccagctgctacagcaggaacctggagtatgcccggctgaggaagattgctgatgaaaatggagcctacctgatggctgacatggcccacatcagcggcctggtggccgccggcgtggtgcccagcccctttgagcactgccacgtggtgaccaccaccacccacaagaccctgcggggctgccgggccggcatgatcttctacagaaaaggagtggccgtggccctgaagcaggccatgaccctggagttcaaggtgtaccagcaccaggtggtggccaactgccgggccctgtctgaggccctgacagagctgggctacaagatcgtgactggaggcagtgacaaccacctgatcctggtggacctgcggagcaaaggaacagatggcggccgggcagagaaggtgctggaggcctgcagcatcgcctgcaacaagaacacctgccctggggacagaagtgccctgcggcccagcggcctgcggctgggcaccccagccctgaccagccggggcctgctggagaaggacttccagaaggtggcccacttcatccaccggggcatcgagctgaccctgcagatccagagcgacaccggggtgcgggccaccctgaaggagttcaaggagcggctggccggggacaagtaccaggccgctgtgcaggccctgcgggaggaggtggagagctttgccagcctcttccccctgcccggcctgcctgacttctag

SEQ ID NO: 169216 - DNA, 285 bp, synthetic construct
  misc_feature 1..285: note = Description of Artificial Sequence: Synthetic coding sequence
  source 1..285: mol_type = other DNA
atgaccatgcctgtgaatggagcccacaaggatgctgacctgtggagcagccatgacaagatgctggcccagcccctgaaggacagtgatgtggaggtgtacaacatcatcaagaaggagagcaaccggcagagggtgggcctggagctgattgccagcgagaactttgccagcagagctgtgctggaggccctgggcagctgcctgaacaacaagtacagcgagggctacccaggccagcgctacgtgaacatcttcaagggcctggtgctgacccagagctag

SEQ ID NO: 169217 - DNA, 777 bp, synthetic construct
  misc_feature 1..777: note = Description of Artificial Sequence: Synthetic coding sequence
  source 1..777: mol_type = other DNA
atggctgacatggcccacatcagcggcctggtggccgccggcgtggtgcccagcccctttgagcactgccacgtggtgaccaccaccacccacaagaccctgcggggctgcagagctggcatgatcttctacaggaagggcgtgaagtctgtggaccccaagacaggcaaggagatcctgtacaacctggagagcctcatcaacagcgctgtgtttcctggcctgcagggcggcccccacaaccacgccatcgccggcgtggccgtggccctgaagcaggccatgaccctggagttcaaggtgtaccagcaccaggtggtggccaactgccgggccctgtctgaggccctgacagagctgggctacaagatcgtgactggaggcagtgacaaccacctgatcctggtggacctgcggagcaaaggaacagatggcggccgggcagagaaggtgctggaggcctgcagcatcgcctgcaacaagaacacctgccctggggacagaagtgccctgcggcccagcggcctgcggctgggcaccccagccctgaccagccggggcctgctggagaaggacttccagaaggtggcccacttcatccaccggggcatcgagctgaccctgcagatccagagcgacaccggggtgcgggccaccctgaaggagttcaaggagcggctggccggggacaagtaccaggccgctgtgcaggccctgcgggaggaggtggagagctttgccagcctcttccccctgcccggcctgcctgacttctag

SEQ ID NO: 169218 - DNA, 1341 bp, synthetic construct
  misc_feature 1..1341: note = Description of Artificial Sequence: Synthetic coding sequence
  source 1..1341: mol_type = other DNA
atgaccatgcctgtgaatggagcccacaaggatgctgacctgtggagcagccatgacaagatgctggcccagcccctgaaggacagtgatgtggaggtgtacaacatcatcaagaaggagagcaaccggcagagggtgggcctggagctgattgccagcgagaactttgccagcagagctgtgctggaggccctgggcagctgcctgaacaacaagtacagcgagggctacccaggccagcgctactatggaggaacagagttcattgatgagctggagaccctgtgccagaagagggccctgcaggcctacaagctggacccccagtgctggggcgtgaatgtgcagccctacagcggcagccctgccaactttgctgtgtacacagccctggtggagccccacggccgcatcatgggcctggacctgcctgatggcggccacctgacccacggcttcatgacagacaagaagaagatcagcgccaccagcatcttctttgagagcatgccctacaaggtgaacccagacaccggctacatcaactatgaccagctggaggagaatgcccggctcttccaccccaagctgatcatcgccggcaccagctgctacagcaggaacctggagtatgcccggctgaggaagattgctgatgaaaatggagcctacctgatggctgacatggcccacatcagcggcctggtggccgccggcgtggtgcccagcccctttgagcactgccacgtggtgaccaccaccacccacaagaccctgcggggctgccgggccggcatgatcttctacagaaaaggagtgaagtctgtggaccccaagacaggcaaggagatcctgtacaacctggagagcctcatcaacagcgctgtgtttcctggcctgcagggcggcccccacaaccacgccatcgccggcgtggccgtggccctgaagcaggccatgaccctggagttcaaggtgtaccagcaccaggtggtggccaactgccgggccctgtctgaggccctgacagagctgggctacaagatcgtgactggaggcagtgacaaccacctgatcctggtggacctgcggagcaagggcacagatggcggccgggcagagaaggtgctggaggcctgcagcatcgcctgcaacaagaacacctgccccggcatcgagctgaccctgcagatccagagcgacaccggggtgcgggccaccctgaaggagttcaaggagcggctggccggggacaagtaccaggccgctgtgcaggccctgcgggaggaggtggagagctttgccagcctcttccccctgcccggcctgcctgacttctag

SEQ ID NO: 169219 - DNA, 1038 bp, synthetic construct
  misc_feature 1..1038: note = Description of Artificial Sequence: Synthetic coding sequence
  source 1..1038: mol_type = other DNA
atgggcctggacctgcctgatggcggccacctgacccacggcttcatgacagacaagaagaagatcagcgccaccagcatcttctttgagagcatgccctacaaggtgaacccagacaccggctacatcaactatgaccagctggaggagaatgcccggctcttccaccccaagctgatcatcgccggcaccagctgctacagcaggaacctggagtatgcccggctgaggaagattgctgatgaaaatggagcctacctgatggctgacatggcccacatcagcggcctggtggccgccggcgtggtgcccagcccctttgagcactgccacgtggtgaccaccaccacccacaagaccctgcggggctgccgggccggcatgatcttctacagaaaaggagtgaagtctgtggaccccaagacaggcaaggagatcctgtacaacctggagagcctcatcaacagcgctgtgtttcctggcctgcagggcggcccccacaaccacgccatcgccggcgtggccgtggccctgaagcaggccatgaccctggagttcaaggtgtaccagcaccaggtggtggccaactgccgggccctgtctgaggccctgacagagctgggctacaagatcgtgactggaggcagtgacaaccacctgatcctggtggacctgcggagcaagggcacagatggcggccgggcagagaaggtgctggaggcctgcagcatcgcctgcaacaagaacacctgccctggggacagaagtgccctgcggcccagcggcctgcggctgggcaccccagccctgaccagccggggcctgctggagaaggacttccagaaggtggcccacttcatccaccggggcatcgagctgaccctgcagatccagagcgacacaggagtgcgggccaccctgaaggagttcaaggagcggctggccggggacaagtaccaggccgctgtgcaggccctgcgggaggaggtggagagctttgccagcctcttccccctgcccggcctgcctgacttctag

SEQ ID NO: 169220 - DNA, 1515 bp, synthetic construct
  misc_feature 1..1515: note = Description of Artificial Sequence: Synthetic coding sequence
  source 1..1515: mol_type = other DNA
atgctgtacttcagcctcttctgggccgcccggcccctgcagagatgtggccagctggtgaggatggccatccgggcccagcacagcaatgctgcccagacccagacaggagaggccaacagaggctggacaggccaggagagcctgagtgacagcgaccctgagatgtgggagctgctgcagcgggagaaggaccggcagtgccggggcctggagctgattgccagcgagaacttctgcagcagagctgccctggaggccctgggcagctgcctgaacaacaagtacagcgagggctacccaggcaagcgctactacggcggcgctgaggtggtggatgaaattgagctgctgtgccagaggcgggccctggaggcctttgacctggaccctgcccagtggggcgtgaatgtgcagccctacagcggcagccctgccaacctggccgtgtacacagccctgctgcagccccatgaccgcatcatgggcctggacctgcctgatggcggccacctgacccacggctacatgtctgatgtgaagaggatcagcgccaccagcatcttctttgagagcatgccctacaagctgaaccccaagacaggcctgattgactacaaccagctggccctgacagcccggctcttccggcccaggctcatcatcgccggcaccagcgcctatgcccggctgattgattatgccaggatgagggaggtgtgtgatgaggtgaaggcccacctgctggccgacatggcccacatcagcggcctggtggccgccaaggtgatccccagccccttcaagcatgctgacatcgtgaccaccaccacccacaagaccctgcggggggcccggagcggcctcatcttctacaggaagggcgtgaaggctgtggaccccaagacaggccgggagatcccctacacctttgaggaccgcatcaactttgctgtgttccccagcctgcagggcggcccccacaaccacgccatcgctgctgtggccgtggccctgaagcaggcctgcacccccatgttccgggagtacagcctgcaggtgctgaagaatgcccgggccatggctgatgccctgctggagcggggctacagcctggtgtctgggggcacagacaaccacctggtgctggtggacctgcggcccaagggcctggatggagcccgggcagagcgggtgctggagctggtgtccatcacagccaacaagaacacctgccctggggacagaagtgccatcaccccaggcggcctgcggctgggcgccccagccctgaccagccggcagttccgggaggatgacttccggcgggtggtggacttcattgatgaaggagtgaacatcggcctggaggtgaagagcaagacagccaagctgcaggacttcaagagcttcctgctgaaggacagcgagaccagccagaggctggccaacctgcggcagagggtggagcagtttgcccgggccttccccatgcctggctttgatgagcactag

SEQ ID NO: 169221 - DNA, 1227 bp, synthetic construct
  misc_feature 1..1227: note = Description of Artificial Sequence: Synthetic coding sequence
  source 1..1227: mol_type = other DNA
atgggagagcagcgctggtggatgaagctgagctgctgtgccagcgctggcccctggaagcccctgacctggatcctgcacagcggggagagcatgagcagccccaccccaggcccccagcccacctggcccagcacccagcccttctgcaacctgaccaccggctcctggggctggacctgccccatgggcgccatcagccccacagccacctgcctgaccagcagcggctaccagccccggcccagcagcagcagcctgtgccccatcagcagcacagccctggccgtgtgtgtgtctgtgcagcccaagacaggcctgattgactacaaccagctggccctgacagcccggctcttccggcccaggctcatcatcgccggcaccagcgcctatgcccggctgattgattatgccaggatgagggaggtgtgtgatgaggtgaaggcccacctgctggccgacatggcccacatcagcggcctggtggccgccaaggtgatccccagccccttcaagcatgctgacatcgtgaccaccaccacccacaagaccctgcggggggcccggagcggcctcatcttctacaggaagggcgtgaaggctgtggaccccaagacaggccgggagatcccctacacctttgaggaccgcatcaactttgctgtgttccccagcctgcagggcggcccccacaaccacgccatcgctgctgtggccgtggccctgaagcaggcctgcacccccatgttccgggagtacagcctgcaggtgctgaagaatgcccgggccatggctgatgccctgctggagcggggctacagcctggtgtctgggggcacagacaaccacctggtgctggtggacctgcggcccaagggcctggatggagcccgggcagagcgggtgctggagctggtgtccatcacagccaacaagaacacctgccctggggacagaagtgccatcaccccaggcggcctgcggctgggcgccccagccctgaccagccggcagttccgggaggatgacttccggcgggtggtggacttcattgatgaaggagtgaacatcggcctggaggtgaagagcaagacagccaagctgcaggacttcaagagcttcctgctgaaggacagcgagaccagccagaggctggccaacctgcggcagagggtggagcagtttgcccgggccttccccatgcctggctttgatgagcactag

SEQ ID NO: 169222 - DNA, 1452 bp, synthetic construct
  misc_feature 1..1452: note = Description of Artificial Sequence: Synthetic coding sequence
  source 1..1452: mol_type = other DNA
atggccatccgggcccagcacagcaatgctgcccagacccagacaggagaggccaacagaggctggacaggccaggagagcctgagtgacagcgaccctgagatgtgggagctgctgcagcgggagaaggaccggcagtgccggggcctggagctgattgccagcgagaacttctgcagccgggccgccctggaggccctgggcagctgcctgaacaacaagtacagcgagggctacccaggcaagcgctactatggaggagctgaggtggtggatgaaattgagctgctgtgccagaggcgggccctggaggcctttgacctggaccctgcccagtggggcgtgaatgtgcagccctacagcggcagccctgccaacctggccgtgtacacagccctgctgcagccccatgaccgcatcatgggcctggacctgcctgatggcggccacctgacccacggctacatgtctgatgtgaagaggatcagcgccaccagcatcttctttgagagcatgccctacaagctgaaccccaagacaggcctgattgactacaaccagctggccctgacagcccggctcttccggcccaggctcatcatcgccggcaccagcgcctatgcccggctgattgattatgccaggatgagggaggtgtgtgatgaggtgaaggcccacctgctggccgacatggcccacatcagcggcctggtggccgccaaggtgatccccagccccttcaagcacgccgacatcgtgaccaccaccacccacaagaccctgcggggggcccggagcggcctcatcttctacagaaaaggagtgaaggctgtggaccccaagacaggccgggagatcccctacacctttgaagatcgcatcaactttgctgtgttccccagcctgcagggcggcccccacaaccacgccatcgctgctgtggccgtggccctgaagcaggcctgcacccccatgttccgggagtacagcctgcaggtgctgaagaatgcccgggccatggctgatgccctgctggagcggggctacagcctggtgtctgggggcacagacaaccacctggtgctggtggacctgcggcccaagggcctggatggagcccgggcagagcgggtgctggagctggtgtccatcacagccaacaagaacacctgccctggggacagaagtgccatcacccctgggggcctgcggctgggcgccccagccctgaccagccggcagttcagagaagatgacttcagaagagtggtggacttcattgatgagggcgtgaacatcggcctggaggtgaagagcaagacagccaagctgcaggacttcaagagcttcctgctgaaggacagcgagaccagccagaggctggccaacctgcggcagagggtggagcagtttgcccgggccttccccatgcctggctttgatgagcactag

SEQ ID NO: 169223 - DNA, 1452 bp, synthetic construct; identical to SEQ ID NO: 169222
  misc_feature 1..1452: note = Description of Artificial Sequence: Synthetic coding sequence
  source 1..1452: mol_type = other DNA

SEQ ID NO: 169224 - DNA, 1452 bp, synthetic construct; identical to SEQ ID NO: 169222
  misc_feature 1..1452: note = Description of Artificial Sequence: Synthetic coding sequence
  source 1..1452: mol_type = other DNA

SEQ ID NO: 169225 - DNA, 1485 bp, synthetic construct
  misc_feature 1..1485: note = Description of Artificial Sequence: Synthetic coding sequence
  source 1..1485: mol_type = other DNA
atgctgtacttcagcctcttctgggccgcccggcccctgcagagatgtggccagctggtgaggatggccatccgggcccagcacagcaatgctgcccagacccagacaggagaggccaacagaggctggacaggccaggagagcctgagtgacagcgaccctgagatgtgggagctgctgcagcgggagaaggaccggcagtgccggggcctggagctgattgccagcgagaacttctgcagcagagctgccctggaggccctgggcagctgcctgaacaacaagtacagcgagggctacccaggcaagcgctactacggcggcgctgaggtggtggatgaaattgagctgctgtgccagaggcgggccctggaggcctttgacctggaccctgcccagtggggcgtgaatgtgcagccctacagcggcagccctgccaacctggccgtgtacacagccctgctgcagccccatgaccgcatcatgggcctggacctgcctgatggcggccacctgacccacggctacatgtctgatgtgaagaggatcagcgccaccagcatcttctttgagagcatgccctacaagctgaacctggccctgacagcccggctcttccggcccaggctcatcatcgccggcaccagcgcctatgcccggctgattgattatgccaggatgagggaggtgtgtgatgaggtgaaggcccacctgctggccgacatggcccacatcagcggcctggtggccgccaaggtgatccccagccccttcaagcatgctgacatcgtgaccaccaccacccacaagaccctgcggggggcccggagcggcctcatcttctacaggaagggcgtgaaggctgtggaccccaagacaggccgggagatcccctacacctttgaggaccgcatcaactttgctgtgttccccagcctgcagggcggcccccacaaccacgccatcgctgctgtggccgtggccctgaagcaggcctgcacccccatgttccgggagtacagcctgcaggtgctgaagaatgcccgggccatggctgatgccctgctggagcggggctacagcctggtgtctgggggcacagacaaccacctggtgctggtggacctgcggcccaagggcctggatggagcccgggcagagcgggtgctggagctggtgtccatcacagccaacaagaacacctgccctggggacagaagtgccatcaccccaggcggcctgcggctgggcgccccagccctgaccagccggcagttccgggaggatgacttccggcgggtggtggacttcattgatgaaggagtgaacatcggcctggaggtgaagagcaagacagccaagctgcaggacttcaagagcttcctgctgaaggacagcgagaccagccagaggctggccaacctgcggcagagggtggagcagtttgcccgggccttccccatgcctggctttgatgagcactag

SEQ ID NO: 169226 - DNA, 1422 bp, synthetic construct
  misc_feature 1..1422: note = Description of Artificial Sequence: Synthetic coding sequence
  source 1..1422: mol_type = other DNA
atgggcgctgtgctgggcgtcttcagcctggcctcctgggtgccctgcctgtgcagcggggccagctgcctgctgtgcagctgctgccccaacagcaagaacagcacagtgaccaggctcatctatgccttcatcctgctgctgagcacagtggtgtcctacatcatgcagaggaaggagatggagacctacctgaagaagatccctggcttctgtgagggcggcttcaagatccatgaagctgacatcaatgctgacaaggactgtgatgtgctggtgggctacaaggctgtgtaccgcatcagctttgccatggccatcttcttctttgtgttcagcctgctgatgttcaaggtgaagaccagcaaggacctgcgggctgctgtgcacaacggcttctggttcttcaagattgctgccctgattggcatcatggtgggcagcttctacatccctgggggctacttcagctctgtgtggtttgtggtgggcatgattggagctgccctcttcatcctgatccagctggtgctgctggtggactttgcccacagctggaatgaatcctgggtgaacaggatggaggagggcaacccccggctgtggtacgccgccctgctgtccttcaccagcgccttctacatcctgagcatcatctgtgtgggcctgctgtacacctactacaccaagccagatggctgcacagagaacaagttcttcatcagcatcaacctgatcctgtgtgtggtggccagcatcatcagcatccaccccaagatccaggagcaccagcccaggagcggcctgctgcagagcagcctcatcaccctgtacaccatgtacctgacctggagcgccatgagcaatgaaccagacaggagctgcaaccccaacctgatgtccttcatcacccgcatcacagcccccaccctggcccctggcaacagcacagctgtggtgcccacccccaccccacccagcaagagcggcagcctgctggacagcgacaacttcatcggcctgtttgtgtttgtgctgtgcctgctgtacagcagcatccgcaccagcaccaacagccaggtggacaagctgaccctgagcggcagtgacagcgtcatcctgggggacaccaccaccagcggggccagtgatgaggaggatggccagcccaggagagctgtggacaatgagaaggagggcgtgcagtacagctacagcctcttccacctgatgctgtgcctggccagcctgtacatcatgatgaccctgacctcctggtacagcccagatgccaagttccagagcatgaccagcaagtggccagctgtgtgggtgaagatcagcagctcctgggtgtgcctgctgctgtatgtgtggaccctggtggcccccctggtgctgaccagccgggacttctcctag

SEQ ID NO: 169227 - DNA, 1422 bp, synthetic construct; identical to SEQ ID NO: 169226
  misc_feature 1..1422: note = Description of Artificial Sequence: Synthetic coding sequence
  source 1..1422: mol_type = other DNA

SEQ ID NO: 169228 - DNA, 639 bp, synthetic construct
  misc_feature 1..639: note = Description of Artificial Sequence: Synthetic coding sequence
  source 1..639: mol_type = other DNA
gagcaccagcccaggagcggcctgctgcagagcagcctcatcaccctgtacaccatgtacctgacctggagcgccatgagcaatgaaccagacaggagctgcaaccccaacctgatgtccttcatcacccgcatcacagcccccaccctggcccctggcaacagcacagctgtggtgcccacccccaccccacccagcaagagcggcagcctgctggacagcgacaacttcatcggcctgtttgtgtttgtgctgtgcctgctgtacagcagcatccgcaccagcaccaacagccaggtggacaagctgaccctgagcggcagtgacagcgtcatcctgggggacaccaccaccagcggggccagtgatgaagaagatggccagccccggcgggctgtggacaatgagaaggagggcgtgcagtacagctacagcctcttccacctgatgctgtgcctggccagcctgtacatcatgatgaccctgacctcctggtacagcccagatgccaagttccagagcatgaccagcaagtggccagctgtgtgggtgaagatcagcagctcctgggtgtgcctgctgctgtatgtgtggaccctggtggcccccctggtgctgaccagccgggacttctcctag

SEQ ID NO: 169229 - DNA, 1323 bp, synthetic construct
  misc_feature 1..1323: note = Description of Artificial Sequence: Synthetic coding sequence
  source 1..1323: mol_type = other DNA
atgcccctgcagcgctgcctgatctatgccttcatcctgctgctgagcacagtggtgtcctacatcatgcagaggaaggagatggagacctacctgaagaagatccctggcttctgtgagggcggcttcaagatccacgaggccgacatcaatgctgacaaggactgtgatgtgctggtgggctacaaggctgtgtaccgcatcagctttgccatggccatcttcttctttgtgttcagcctgctgatgttcaaggtgaagaccagcaaggacctgcgggctgctgtgcacaacggcttctggttcttcaagattgctgccctgattggcatcatggtgggcagcttctacatccctgggggctacttcagctctgtgtggtttgtggtgggcatgattggagctgccctcttcatcctgatccagctggtgctgctggtggactttgcccacagctggaatgaatcctgggtgaacaggatggaggagggcaacccccggctgtggtatgctgccctgctgtccttcaccagcgccttctacatcctgagcatcatctgtgtgggcctgctgtacacctactacaccaagccagatggctgcacagagaacaagttcttcatcagcatcaacctgatcctgtgtgtggtggccagcatcatcagcatccaccccaagatccaggagcaccagcccaggagcggcctgctgcagagcagcctcatcaccctgtacaccatgtacctgacctggagcgccatgagcaatgaaccagacaggagctgcaaccccaacctgatgtccttcatcacccgcatcacagcccccaccctggcccctggcaacagcacagctgtggtgcccacccccaccccacccagcaagagcggcagcctgctggacagcgacaacttcatcggcctgtttgtgtttgtgctgtgcctgctgtacagcagcatccgcaccagcaccaacagccaggtggacaagctgaccctgagcggcagtgacagcgtcatcctgggggacaccaccaccagcggggccagtgatgaagaagatggccagccccggcgggctgtggacaatgagaaggagggcgtgcagtacagctacagcctcttccacctgatgctgtgcctggccagcctgtacatcatgatgaccctgacctcctggtacagcccagatgccaagttccagagcatgaccagcaagtggccagctgtgtgggtgaagatcagcagctcctgggtgtgcctgctgctgtatgtgtggaccctggtggcccccctggtgctgaccagccgggacttctcctag

SEQ ID NO: 169230 - DNA, 1257 bp, synthetic construct
  misc_feature 1..1257: note = Description of Artificial Sequence: Synthetic coding sequence
  source 1..1257: mol_type = other DNA
atgcagaggaaggagatggagacctacctgaagaagatccctggcttctgtgagggcggcttcaagatccacgaggccgacatcaatgctgacaaggactgtgatgtgctggtgggctacaaggctgtgtaccgcatcagctttgccatggccatcttcttctttgtgttcagcctgctgatgttcaaggtgaagaccagcaaggacctgcgggctgctgtgcacaacggcttctggttcttcaagattgctgccctgattggcatcatggtgggcagcttctacatccctgggggctacttcagctctgtgtggtttgtggtgggcatgattggagctgccctcttcatcctgatccagctggtgctgctggtggactttgcccacagctggaatgaatcctgggtgaacaggatggaggagggcaacccccggctgtggtatgctgccctgctgtccttcaccagcgccttctacatcctgagcatcatctgtgtgggcctgctgtacacctactacaccaagccagatggctgcacagagaacaagttcttcatcagcatcaacctgatcctgtgtgtggtggccagcatcatcagcatccaccccaagatccaggagcaccagcccaggagcggcctgctgcagagcagcctcatcaccctgtacaccatgtacctgacctggagcgccatgagcaatgaaccagacaggagctgcaaccccaacctgatgtccttcatcacccgcatcacagcccccaccctggcccctggcaacagcacagctgtggtgcccacccccaccccacccagcaagagcggcagcctgctggacagcgacaacttcatcggcctgtttgtgtttgtgctgtgcctgctgtacagcagcatccgcaccagcaccaacagccaggtggacaagctgaccctgagcggcagtgacagcgtcatcctgggggacaccaccaccagcggggccagtgatgaagaagatggccagccccggcgggctgtggacaatgagaaggagggcgtgcagtacagctacagcctcttccacctgatgctgtgcctggccagcctgtacatcatgatgaccctgacctcctggtacagcccagatgccaagttccagagcatgaccagcaagtggccagctgtgtgggtgaagatcagcagctcctgggtgtgcctgctgctgtatgtgtggaccctggtggcccccctggtgctgaccagccgggacttctcctag

SEQ ID NO: 169231 - DNA, 1422 bp, synthetic construct
  misc_feature 1..1422: note = Description of Artificial Sequence: Synthetic coding sequence
  source 1..1422: mol_type = other DNA
atggccacagccacagagcagtgggtgctggtggagatggtgcaggccctgtatgaggccccagcctaccacctgatcctggagggcatcctgatcctgtggatcatccggctgctcttcagcaagacctacaagctgcaggagaggagtgacctgactgtgaaggagaaggaggagctgattgaggagtggcagcctgagcccctggtgccccctgtgcccaaggaccacccagccctgaactacaacatcgtgtctggcccccccagccacaagacagtggtgaatggcaaggagtgcatcaactttgccagcttcaacttcctgggcctgctggacaacccccgggtgaaggccgccgccctggccagcctgaagaagtatggagtgggcacctgtggcccccggggcttctacggcacctttgatgtgcacctggacctggaggaccggctggccaagttcatgaagacagaggaggccatcatctacagctatggctttgccaccatcgccagcgccatcccagcctacagcaagagaggagacatcgtgtttgtggaccgggccgcctgctttgccatccagaagggcctgcaggccagcagaagtgacatcaagctgttcaagcacaatgacatggctgacctggagcggctgctgaaggagcaggagattgaggaccagaagaaccccaggaaggcccgggtgacccggcgcttcatcgtggtggagggcctgtacatgaacacaggcaccatctgccccctgcctgagctggtgaagctgaagtacaagtacaaggcccgcatcttcctggaggagagcctgagctttggagtgctgggggagcacggccggggcgtgacagagcactacggcatcaacattgatgacatcgacctgatcagcgccaacatggagaatgccctggccagcatcggcggcttctgctgcggccgcagctttgtgattgaccaccagaggctgagcggccagggctactgcttcagcgccagcctgccccccctgctggccgccgccgccatcgaggccctgaacatcatggaggagaaccctggcatctttgctgtgctgaaggagaagtgtggccagatccacaaggccctgcagggcatcagcggcctgaaggtggtgggggagagcctgagccctgccttccacctgcagctggaggagagcacaggcagccgggagcaggatgtgcggctgctgcaggagatcgtggaccagtgcatgaacagaagcatcgccctgacccaggcccgctacctggagaaggaggagaagtgcctgcccccacccagcatccgggtggtggtgacagtggagcagacagaggaggagctggagcgggccgccagcaccatcaaggaggtggcccaggccgtgctgctgtag

SEQ ID NO: 169232 - DNA, 432 bp, synthetic construct
  misc_feature 1..432: note = Description of Artificial Sequence: Synthetic coding sequence
  source 1..432: mol_type = other DNA
atggccacagccacagagcagtgggtgctggtggagatggtgcaggccctgtatgaggccccagcctaccacctgatcctggagggcatcctgatcctgtggatcatccggctgctcttcagcaagacctacaagctgcaggagaggagtgacctgactgtgaaggagaaggaggagctgattgaggagtggcagcctgagcccctggtgccccctgtgcccaaggaccacccagccctgaactacaacatcgtgtctggcccccccagccacaagacagtggtgaatggcaaggagtgcatcaactttgccagcttcaacttcctgggcctgctggacaacccccgggtgaaggccgccgccctggccagcctgaagaagtatggagtgggcacctgtggcccccggggcttctacggcacctttgaatag

SEQ ID NO: 169233 - DNA, 1017 bp, synthetic construct
  misc_feature 1..1017: note = Description of Artificial Sequence: Synthetic coding sequence
  source 1..1017: mol_type = other DNA
atggccaagtggggcgagggggacccccgctggatcgtggaggagcgggcagatgccaccaacgtgaacaactggcactggacagaaagagatgccagcaactggagcacagacaagctgaagaccctcttcctggccgtgcaggtgcagaatgaggagggcaaatgtgaggtgacagaggtgtccaagctggatggagaggccagcatcaacaacaggaagggcaagctgatcttcttctatgagtggagcgtgaagctgaactggacaggcaccagcaagtctggagtgcagtacaagggccacgtggagatccccaacctgagtgatgaaaattctgtggatgaggtggagatctctgtgtccctggccaaggatgagccagacaccaacctggtggccctgatgaaggaggagggcgtgaagctgctgcgggaggccatgggcatctacatcagcaccctgaagacagagttcacccagggcatgatcctgcccaccatgaatggagagagcgtggaccctgtgggccagcctgccctgaagacagaggagaggaaggccaagccagcccccagcaagacccaggcccggcctgtgggcgtgaagatccccacctgcaagatcaccctgaaggagaccttcctgaccagccctgaggagctgtacagagtcttcaccacccaggagctggtgcaggccttcacccacgccccagccaccctggaggccgacagaggaggcaagttccacatggtggatggaaatgtgtctggagagttcacagacctggtgcctgagaagcacatcgtgatgaagtggaggttcaagtcctggccagagggccactttgccaccatcaccctgaccttcatcgacaagaatggagaaacagagctgtgcatggagggccggggcatcccagcccctgaggaggagaggacccggcagggctggcagcgctactactttgagggcatcaagcagaccttcggctatggagcccggctcttctag

SEQ ID NO: 169234 - DNA, 990 bp, synthetic construct
  misc_feature 1..990: note = Description of Artificial Sequence: Synthetic coding sequence
  source 1..990: mol_type = other DNA
atggccaaccctgggggcggcgctgtgtgcaatggcaagctgcacaaccacaagaagcagagcaatggcagccagagcaggaactgcaccaagaatggcatcgtgaaggaggcccagcagaatggcaagccccacttctatgacaagctgattgtggagagctttgaggaggcccccctgcacgtgatggtgttcacctacatgggctacggcatcggcaccctgtttggctacctgcgggacttcctgaggaactggggcatcgagaagtgcaatgctgctgtggagaggaaggagcagaaggactttgtgcccctgtaccaggactttgagaacttctacaccaggaacctgtacatgaggatccgggacaactggaaccggcccatctgcagcgcccctggccccctgtttgacctgatggagcgggtgtctgatgactacaactggaccttccgcttcaccggccgggtcatcaaggatgtgatcaacatgggcagctacaacttcctgggcctggccgccaagtatgatgagagcatgaggaccatcaaggatgtgctggaggtgtatggaactggagtggccagcaccaggcatgagatgggcaccctggacaagcacaaggagctggaggacctggtggccaagttcctgaatgtggaggccgccatggtgtttggcatgggctttgccaccaacagcatgaacatcccagccctggtgggcaagggctgcctgatcctgagtgatgagctgaaccacaccagcctggtgctgggcgcccggctgagcggggccaccatccgcatcttcaagcacaacaacacccagagcctggagaagctgctgagagatgctgtgatctacggccagcccaggacccggcgggcctggaagaagatcctgatcctggtggagggcgtgtaccgcacctcctggatcatctacggcttcacccgcatcgtgctcttcatgctgcacccctag

SEQ ID NO: 169235 - DNA, 1659 bp, synthetic construct
  misc_feature 1..1659: note = Description of Artificial Sequence: Synthetic coding sequence
  source 1..1659: mol_type = other DNA
atggccaaccctgggggcggcgctgtgtgcaatggcaagctgcacaaccacaagaagcagagcaatggcagccagagcaggaactgcaccaagaatggcatcgtgaaggaggcccagcagaatggcaagccccacttctatgacaagctgattgtggagagctttgaggaggcccccctgcacgtgatggtgttcacctacatgggctacggcatcggcaccctgtttggctacctgcgggacttcctgaggaactggggcatcgagaagtgcaatgctgctgtggagaggaaggagcagaaggactttgtgcccctgtaccaggactttgagaacttctacaccaggaacctgtacatgaggatccgggacaactggaaccggcccatctgcagcgcccctggccccctgtttgacctgatggagcgggtgtctgatgactacaactggaccttccgcttcaccggccgggtcatcaaggatgtgatcaacatgggcagctacaacttcctgggcctggccgccaagtatgatgagagcatgaggaccatcaaggatgtgctggaggtgtatggaactggagtggccagcaccaggcatgagatgggcaccctggacaagcacaaggagctggaggacctggtggccaagttcctgaatgtggaggccgccatggtgtttggcatgggctttgccaccaacagcatgaacatcccagccctggtgggcaagggctgcctgatcctgagtgatgagctgaaccacaccagcctggtgctgggcgcccggctgagcggggccaccatccgcatcttcaagcacaacaacacccagagcctggagaagctgctgagagatgctgtgatctacggccagcccaggacccggcgggcctggaagaagatcctgatcctggtggagggcgtgtacagcatggagggcagcatcgtgcacctgccccagatcatcgccctgaagaagaagtacaaggcctacctgtacattgatgaggcccacagcattggagctgtgggccccaccggccggggcgtgacagagttcttcggcctggacccccatgaggtggatgtgctgatgggcaccttcaccaagagctttggagccagcggcggctacatcgccggcaggaaggacctggtggactacctgcgggtgcacagccacagcgctgtgtatgccagctccatgagcccccccatcgccgagcagatcatccgcagcctgaagctgatcatgggcctggatggcaccacccagggcctgcagagggtgcagcagctggccaagaacacccgctacttccggcagaggctgcaggagatgggcttcatcatctatggaaatgaaaatgcctctgtggtgcccctgctgctgtacatgcctgggaaggtggccgcctttgcccggcacatgctggagaagaagattggagtggtggtggtgggcttccctgccacccccctggccgaggcccgggcccgcttctgtgtgtctgctgcccacacccgggagatgctggacacagtgctggaggccctggatgagatgggagacctgctgcagctgaagtacagccgccacaagaagagcgcccggcctgagctgtatgatgagaccagctttgagctggaggactag

SEQ ID NO: 169236 - DNA, 366 bp, synthetic construct
  misc_feature 1..366: note = Description of Artificial Sequence: Synthetic coding sequence
  source 1..366: mol_type = other DNA
tgaagcccccccatcgccgagcagatcatccgcagcctgaagctgatcatgggcctggatggcaccacccagggcctgcagagggtgcagcagctggccaagaacacccgctacttccggcagaggctgcaggagatgggcttcatcatctatggaaatgaaaatgcctctgtggtgcccctgctgctgtacatgcctgggaaggtggccgcctttgcccggcacatgctggagaagaagattggagtggtggtggtgggcttccctgccacccccctggccgaggcccgggcccgcttctgtgtgtctgctgcccacacccgggagatgctggacaccgtcatctgctgcgtgatgaagatctag

SEQ ID NO: 169237 - DNA, 420 bp, synthetic construct
  misc_feature 1..420: note = Description of Artificial Sequence: Synthetic coding sequence
  source 1..420: mol_type = other DNA
atggccaaccctgggggcggcgctgtgtgcaatggcaagctgcacaaccacaagaagcagagcaatggcagccagagcaggaactgcaccaagaatggcatcgtgaaggaggcccagcagaatggcaagccccacttctatgacaagctgattgtggagagctttgaggaggcccccctgcacgtgatggtgttcacctacatgggctacggcatcggcaccctgtttggctacctgcgggacttcctgaggaactggggcatcgagaagtgcaatgctgctgtggagaggaaggagcagaaggactttgtgcccctgtaccaggactttgagaacttctacaccaggaacctgtacatgaggatccgggacaactggaaccggcccatctgcagcgcccctggccccctgtttgattag

SEQ ID NO: 169238 - DNA, 648 bp, synthetic construct
  misc_feature 1..648: note = Description of Artificial Sequence: Synthetic coding sequence
  source 1..648: mol_type = other DNA
aactgcaccaagaatggaattgtgaaggaggcccagcagaatggcaagccccacttctatgacaagctgattgtggagagctttgaggaggcccccctgcacgtgatggtgttcacctacatgggctatggaattggcaccctgtttggctacctgcgggacttcctgaggaactggggcattgaaaaatgtaatgctgctgtggagaggaaggagcagaaggactttgtgcccctgtaccaggactttgagaacttctacaccaggaacctgtacatgaggatccgggacaactggaaccggcccatctgcagcgcccctggccccctgtttgacctgatggagcgggtgtctgatgactacaactggaccttccgcttcaccggccgggtcatcaaggatgtgatcaacatgggcagctacaacttcctgggcctggccgccaagtatgatgagagcatgaggaccatcaaggatgtgctggaggtgtatggcaccggggtggccagcaccaggcatgagatgggagagttcaccagctcctggcagaatgccctgtgtgtgggcggcgtgctgcaggccgacagcgtgccccagggccccccctggagctggaagatgggccgccacagcagcctgctggagtag

SEQ ID NO: 169239 - DNA, 360 bp, synthetic construct
  misc_feature 1..360: note = Description of Artificial Sequence: Synthetic coding sequence
  source 1..360: mol_type = other DNA
atggccctgtctgtgctgcggctggccctgctgctgctggccgtgacctttgctggcagcgcccggagcggccctggagagcggggccccccagagaagagcggcttcggcagccagacaggaggcggcccctgcccagcccctgggggcctgggagatgccagcctcatcccccagtttggcctcttcagcaagtaccgcacccccaactgcagccagtaccgcctgcccggctgccccaggcacttcaaccctgtgtgtggcagtgacatgagcacctacgccaatgaatgtaccctgtgcatgaagatccgggagggcggccacaacatcaagatcatcagaaatggcccctgctag

SEQ ID NO: 169240 - DNA, 405 bp, synthetic construct
  misc_feature 1..405: note = Description of Artificial Sequence: Synthetic coding sequence
  source 1..405: mol_type = other DNA
atggccctgtctgtgctgcggctggccctgctgctgctggccgtgacctttgctggcagcgcccggagcggccctggagagcggggccccccagagaagagcggcttcggcagccagacaggaggcggcccctgcccagcccctgggggcctgggagatggcacccgggcccctgtgactggaggcagccctgaggacctgcctgccagcctcatcccccagtttggcctcttcagcaagtaccgcacccccaactgcagccagtaccgcctgcccggctgccccaggcacttcaaccctgtgtgtggcagtgacatgagcacctacgccaatgaatgtaccctgtgcatgaagatccgggagggcggccacaacatcaagatcatcagaaatggcccctgctag

SEQ ID NO: 169241 - DNA, 240 bp, synthetic construct
  misc_feature 1..240: note = Description of Artificial Sequence: Synthetic coding sequence
  source 1..240: mol_type = other DNA
atgaaggtgacaggcatcttcctgctgagcgccctggccctgctgagcctgagcggcaacacaggagctgacagcctgggccgggaggccaagtgctacaatgagctgaatggctgcaccaagatctatgaccctgtgtgtggcacagatggcaacacctacccaaatgaatgtgtgctgtgctttgaaaataggaagaggcagaccagcatcctgatccagaagagcggcccctgctag

SEQ ID NO: 169242 - DNA, 255 bp, synthetic construct
  misc_feature 1..255: note = Description of Artificial Sequence: Synthetic coding sequence
  source 1..255: mol_type = other DNA
atggccctgtctgtgctgcggctggccctgctgctgctggccgtgacctttgctgccagcctcatcccccagtttggcctcttcagcaagtaccgcacccccaactgcagccagtaccgcctgcccggctgccccaggcacttcaaccctgtgtgtggcagtgacatgagcacctacgccaatgaatgtaccctgtgcatgaagatccgggagggcggccacaacatcaagatcatcagaaatggcccctgctag

SEQ ID NO: 169243 - DNA, 261 bp, synthetic construct
  misc_feature 1..261: note = Description of Artificial Sequence: Synthetic coding sequence
  source 1..261: mol_type = other DNA
atggctgtgcggcagtgggtgattgccctggccctggccgccctgctggtggtggaccgggaggtgcctgtggccgccggcaagctgcccttcagcaggatgcccatctgtgagcacatggtggagagccccacctgcagccagatgagcaacctggtgtgtggcacagatggcctgacctacaccaatgaatgccagctgtgcctggcccgcatcaagaccaagcaggacatccagatcatgaaggatggaaaatgttag

SEQ ID NO: 169244 - DNA, 330 bp, synthetic construct
  misc_feature 1..330: note = Description of Artificial Sequence: Synthetic coding sequence
  source 1..330: mol_type = other DNA
atgatcctgggcatcggcagcagcccccacctgctgtggaccctggagggcacccacatctggagcctgctgggagatgccagccacacagaccggctgcctgaggccggggccggcaagctgctgtctgaggtgcctgtggccgccggcaagctgcccttcagcaggatgcccatctgtgagcacatggtggagagccccacctgcagccagatgagcaacctggtgtgtggcacagatggcctgacctacaccaatgaatgccagctgtgcctggcccgcatcaagaccaagcaggacatccagatcatgaaggatggcaagtgctag

SEQ ID NO: 169245 - DNA, 330 bp, synthetic construct; identical to SEQ ID NO: 169244
  misc_feature 1..330: note = Description of Artificial Sequence: Synthetic coding sequence
  source 1..330: mol_type = other DNA

SEQ ID NO: 169246 - DNA, 3195 bp, synthetic construct
  misc_feature 1..3195: note = Description of Artificial Sequence: Synthetic coding sequence
  source 1..3195: mol_type = other DNA
atgaagatcgccaccgtgtctgtgctgctgcccctggccctgtgcctgatccaggatgctgccagcaagaatgaagaccaggagatgtgccacgagttccaggccttcatgaagaatggcaagctgttctgcccccaggacaagaagttcttccagagcctggatggcatcatgttcatcaacaagtgtgccacctgcaagatgatcctggagaaggaggccaagagccagaagagggcccggcacctggcccgggcccccaaggccacagcccccacagagctgaactgtgatgacttcaagaagggggagagagatggagacttcatctgcccagactactatgaagctgtgtgtggcacagatggcaagacctatgacaacagatgtgccctgtgtgctgaaaatgccaagacaggcagccagattggagtgaagtctgagggggagtgcaagagcagcaaccctgagcaggatgtgtgcagcgccttccggccctttgtgagagatggccgcctgggctgcacccgggagaatgaccctgtgctgggcccagatggcaagacccacggcaacaagtgtgccatgtgtgccgagctgttcctgaaggaggccgagaatgccaagcgggagggggagacccgcatcagaagaaatgctgagaaggacttctgcaaggagtatgagaagcaggtgagaaatggccgcctcttctgcacccgggagagtgaccctgtgcggggcccagatggccgcatgcacggcaacaagtgtgccctgtgtgccgagatcttcaagcagcgcttcagcgaggagaacagcaagacagaccagaacctgggcaaggccgaggagaagaccaaggtgaagcgggagatcgtgaagctgtgcagccagtaccagaaccaggccaagaatggcatcctcttctgcacccgggagaatgaccccatccggggcccagatggcaagatgcacggcaacctgtgcagcatgtgccaggcctacttccaggccgagaatgaggagaagaagaaggccgaggcccgggccaggaacaagcgggagagcggcaaggccaccagctatgcagagctgtgcagcgagtacaggaagctggtgagaaatggcaagctggcctgcacccgggagaatgaccccatccagggcccagatggcaaggtgcacggcaacacctgcagcatgtgtgaggtgttcttccaggccgaggaggaggagaagaagaagaaggagggcaagagcaggaacaagaggcagagcaagagcacagccagctttgaggagctgtgcagcgagtacaggaagagcaggaagaatggccgcctcttctgcacccgggagaatgaccccatccagggcccagatggcaagatgcacggcaacacctgcagcatgtgtgaggccttcttccagcaggaggagcgggcccgggccaaggccaagcgggaggccgccaaggagatctgcagcgagttccgggaccaggtgagaaatggcaccctcatctgcacccgggagcacaaccctgtgcggggcccagatggcaagatgcacggcaacaagtgtgccatgtgtgccagcgtcttcaagctggaggaggaggagaagaagaatgacaaggaggagaagggcaaggtggaggccgagaaggtgaagcgggaggccgtgcaggagctgtgcagcgagtaccgccactacgtgagaaatggccgcctgccctgcacccgggagaatgaccccatcgagggcctggatggcaagatccacggcaacacctgcagcatgtgtgaggccttcttccagcaggaggccaaggagaaggagagagctgagccccgggccaaggtgaagcgggaggccgagaaggagacctgtgatgagttccggcggctgctgcagaatggcaagctgttctgcaccagagaaaatgaccctgtgcggggcccagatggcaagacccacggcaacaagtgtgccatgtgcaaggctgtgttccagaaggaaaatgaggagaggaagaggaaggaggaggaggaccagagaaatgctgctggccacggcagcagcggcggcggcggcggcaacacccaggatgaatgtgccgagtaccgggagcagatgaagaatggccgcctgagctgcacccgggagagtgaccctgtgagagatgctgatggcaagagctacaacaaccagtgcaccatgtgcaaggccaagctggagcgggaggccgagaggaagaatgagtacagccgcagccgcagcaatggaactggaagtgaaagtggcaaggacacctgtgatgagttccgcagccagatgaagaatggcaagctgatctgcacccgggagagtgaccctgtgcggggcccagatggcaagacccacggcaacaagtgcaccatgtgcaaggagaagctggagcgggaggccgctgagaagaagaagaaggaggatgaagatagaagcaacacaggagagaggagcaacacaggagagaggagcaatgacaaggaggacctgtgccgggagttccgctccatgcagagaaatggcaagctgatctgcacccgggagaacaaccctgtgcggggcccctacggcaagatgcacatcaacaagtgtgccatgtgccagagcatctttgaccgggaggccaatgaaaggaagaagaaggatgaggagaagagcagcagcaagcccagcaacaatgccaaggatgaatgttctgagttcaggaactacatccggaacaatgagctgatctgccccagagaaaatgaccctgtgcacggggctgatggcaagttctacaccaacaagtgctacatgtgcagagctgtgttcctgacagaggccctggagcgggccaagctgcaggagaagcccagccacgtgcgggccagccaggaggaggacagcccagacagcttcagcagcctggacagcgagatgtgcaaggactacagagtgctgccccgcatcggctacctgtgccccaaggacctgaagcctgtgtgtggagatgatggccagacctacaacaacccctgcatgctgtgccacgagaacctgatccggcagaccaacacccacatccgcagcactggaaaatgtgaggagagcagcaccccaggcaccacagctgcctccatgccacccagtgatgaatag

SEQ ID NO: 169247 - DNA, 3285 bp, synthetic construct
  misc_feature 1..3285: note = Description of Artificial Sequence: Synthetic coding sequence
  source 1..3285: mol_type = other DNA
atgaagatcgccaccgtgtctgtgctgctgcccctggccctgtgcctgatccaggatgctgccagcaagaatgaagaccaggagatgtgccacgagttccaggccttcatgaagaatggcaagctgttctgcccccaggacaagaagttcttccagagcctggatggcatcatgttcatcaacaagtgtgccacctgcaagatgatcctggagaaggaggccaagagccagaagagggcccggcacctggcccgggcccccaaggccacagcccccacagagctgaactgtgatgacttcaagaagggggagagagatggagacttcatctgcccagactactatgaagctgtgtgtggcacagatggcaagacctatgacaacagatgtgccctgtgtgctgaaaatgccaagacaggcagccagattggagtgaagtctgagggggagtgcaagagcagcaaccctgagcaggatgtgtgcagcgccttccggccctttgtgagagatggccgcctgggctgcacccgggagaatgaccctgtgctgggcccagatggcaagacccacggcaacaagtgtgccatgtgtgccgagctgttcctgaaggaggccgagaatgccaagcgggagggggagacccgcatcagaagaaatgctgagaaggacttctgcaaggagtatgagaagcaggtgagaaatggccgcctcttctgcacccgggagagtgaccctgtgcggggcccagatggccgcatgcacggcaacaagtgtgccctgtgtgccgagatcttcaagcagcgcttcagcgaggagaacagcaagacagaccagaacctgggcaaggccgaggagaagaccaaggtgaagcgggagatcgtgaagctgtgcagccagtaccagaaccaggccaagaatggcatcctcttctgcacccgggagaatgaccccatccggggcccagatggcaagatgcacggcaacctgtgcagcatgtgccaggcctacttccaggccgagaatgaggagaagaagaaggccgaggcccgggccaggaacaagcgggagagcggcaaggccaccagctatgcagagctgtgcagcgagtacaggaagctggtgagaaatggcaagctggcctgcacccgggagaatgaccccatccagggcccagatggcaaggtgcacggcaacacctgcagcatgtgtgaggtgttcttccaggccgaggaggaggagaagaagaagaaggagggcaagagcaggaacaagaggcagagcaagagcacagccagctttgaggagctgtgcagcgagtacaggaagagcaggaagaatggccgcctcttctgcacccgggagaatgaccccatccagggcccagatggcaagatgcacggcaacacctgcagcatgtgtgaggccttcttccagcaggaggagcgggcccgggccaaggccaagcgggaggccgccaaggagatctgcagcgagttccgggaccaggtgagaaatggcaccctcatctgcacccgggagcacaaccctgtgcggggcccagatggcaagatgcacggcaacaagtgtgccatgtgtgccagcgtcttcaagctggaggaggaggagaagaagaatgacaaggaggagaagggcaaggtggaggccgagaaggtgaagcgggaggccgtgcaggagctgtgcagcgagtaccgccactacgtgagaaatggccgcctgccctgcacccgggagaatgaccccatcgagggcctggatggcaagatccacggcaacacctgcagcatgtgtgaggccttcttccagcaggaggccaaggagaaggagagagctgagccccgggccaaggtgaagcgggaggccgagaaggagacctgtgatgagttccggcggctgctgcagaatggcaagctgttctgcaccagagaaaatgaccctgtgcggggcccagatggcaagacccacggcaacaagtgtgccatgtgcaaggctgtgttccagaaggaaaatgaggagaggaagaggaaggaggaggaggaccagagaaatgctgctggccacggcagcagcggcggcggcggcggcaacacccaggatgaatgtgccgagtaccgggagcagatgaagaatggccgcctgagctgcacccgggagagtgaccctgtgagagatgctgatggcaagagctacaacaaccagtgcaccatgtgcaaggccaagctggagcgggaggccgagaggaagaatgagtacagccgcagccgcagcaatggaactggaagtgaaagtggcaaggacacctgtgatgagttccgcagccagatgaagaatggcaagctgatctgcacccgggagagtgaccctgtgcggggcccagatggcaagacccacggcaacaagtgcaccatgtgcaaggagaagctggagcgggaggccgctgagaagaagaagaaggaggatgaagatagaagcaacacaggagagaggagcaacacaggagagaggagcaatgacaaggaggacctgtgccgggagttccgctccatgcagagaaatggcaagctgatctgcacccgggagaacaaccctgtgcggggcccctacggcaagatgcacatcaacaagtgtgccatgtgccagagcatctttgaccgggaggccaatgaaaggaagaagaaggatgaggagaagagcagcagcaagcccagcaacaatgccaaggaccagtgccggcaggtgcagaatgaagcagaagatgccaagttccggcagcccggccgcagcctggcctctgtggccaggatgagcacagatgaatgttctgagttcaggaactacatccggaacaatgagctgatctgccccagagaaaatgaccctgtgcacggggctgatggcaagttctacaccaacaagtgctacatgtgcagagctgtgttcctgacagaggccctggagcgggccaagctgcaggagaagcccagccacgtgcgggccagccaggaggaggacagcccagacagcttcagcagcctggacagcgagatgtgcaaggactacagagtgctgccccgcatcggctacctgtgccccaaggacctgaagcctgtgtgtggagatgatggccagacctacaacaacccctgcatgctgtgccacgagaacctgatccggcagaccaacacccacatccgcagcactggaaaatgtgaggagagcagcaccccaggcaccacagctgcctccatgccacccagtgatgaatag

SEQ ID NO: 169248 - DNA, 2751 bp, synthetic construct
  misc_feature 1..2751: note = Description of Artificial Sequence: Synthetic coding sequence
  source 1..2751: mol_type = other DNA
atgaagatcgccaccgtgtctgtgctgctgcccctggccctgtgcctgatccaggatgctgccagcaagaatgaagaccaggagatgtgccacgagttccaggccttcatgaagaatggcaagctgttctgcccccaggacaagaagttcttccagagcctggatggcatcatgttcatcaacaagtgtgccacctgcaagatgatcctggagaaggaggccaagagccagaagagggcccggcacctggcccgggcccccaaggccacagcccccacagagctgaactgtgatgacttcaagaagggggagagagatggagacttcatctgcccagactactatgaagctgtgtgtggcacagatggcaagacctatgacaacagatgtgccctgtgtgctgaaaatgccaagacaggcagccagattggagtgaagtctgagggggagtgcaagagcagcaaccctgagcaggatgtgtgcagcgccttccggccctttgtgagagatggccgcctgggctgcacccgggagaatgaccctgtgctgggcccagatggcaagacccacggcaacaagtgtgccatgtgtgccgagctgttcctgaaggaggccgagaatgccaagcgggagggggagacccgcatcagaagaaatgctgagaaggacttctgcaaggagtatgagaagcaggtgagaaatggccgcctcttctgcacccgggagagtgaccctgtgcggggcccagatggccgcatgcacggcaacaagtgtgccctgtgtgccgagatcttcaagcagcgcttcagcgaggagaacagcaagacagaccagaacctgggcaaggccgaggagaagaccaaggtgaagcgggagatcgtgaagctgtgcagccagtaccagaaccaggccaagaatggcatcctcttctgcacccgggagaatgaccccatccggggcccagatggcaagatgcacggcaacctgtgcagcatgtgccaggcctacttccaggccgagaatgaggagaagaagaaggccgaggcccgggccaggaacaagcgggagagcggcaaggccaccagctatgcagagctgtgcagcgagtacaggaagctggtgagaaatggcaagctggcctgcacccgggagaatgaccccatccagggcccagatggcaaggtgcacggcaacacctgcagcatgtgtgaggtgttcttccaggccgaggaggaggagaagaagaagaaggagggcaagagcaggaacaagaggcagagcaagagcacagccagctttgaggagctgtgcagcgagtacaggaagagcaggaagaatggccgcctcttctgcacccgggagaatgaccccatccagggcccagatggcaagatgcacggcaacacctgcagcatgtgtgaggccttcttccagcaggaggagcgggcccgggccaaggccaagcgggaggccgccaaggagatctgcagcgagttccgggaccaggtgagaaatggcaccctcatctgcacccgggagcacaaccctgtgcggggcccagatggcaagatgcacggcaacaagtgtgccatgtgtgccagcgtcttcaagctggaggaggaggagaagaagaatgacaaggaggagaagggcaaggtggaggccgagaaggtgaagcgggaggccgtgcaggagctgtgcagcgagtaccgccactacgtgagaaatggccgcctgccctgcacccgggagaatgaccccatcgagggcctggatggcaagatccacggcaacacctgcagcatgtgtgaggccttcttccagcaggaggccaaggagaaggagagagctgagccccgggccaaggtgaagcgggaggccgagaaggagacctgtgatgagttccggcggctgctgcagaatggcaagctgttctgcaccagagaaaatgaccctgtgcggggcccagatggcaagacccacggcaacaagtgtgccatgtgcaaggctgtgttccagaaggaaaatgaggagaggaagaggaaggaggaggaggaccagagaaatgctgctggccacggcagcagcggcggcggcggcggcaacacccaggatgaatgtgccgagtaccgggagcagatgaagaatggccgcctgagctgcacccgggagagtgaccctgtgagagatgctgatggcaagagctacaacaaccagtgcaccatgtgcaaggccaagctggagcgggaggccgagaggaagaatgagtacagccgcagccgcagcaatggaactggaagtgaaagtggcaaggacacctgtgatgagttccgcagccagatgaagaatggcaagctgatctgcacccgggagagtgaccctgtgcggggcccagatggcaagacccacggcaacaagtgcaccatgtgcaaggagaagctggagcgggaggccgctgagaagaagaagaaggaggatgaagatagaagcaacacaggagagaggagcaacacaggagagaggagcaatgacaaggaggacctgtgccgggagttccgctccatgcagagaaatggcaagctgatctgcacccgggagaacaaccctgtgcggggcccctacggcaagatgcacatcaacaagtgtgccatgtgccagagcatctttgaccgggaggccaatgaaaggaagaagaaggatgaggagaagagcagcagcaagcccagcaacaatgccaaggtgatctactag

SEQ ID NO: 169249 - DNA, 261 bp, synthetic construct
  misc_feature 1..261: note = Description of Artificial Sequence: Synthetic coding sequence
  source 1..261: mol_type = other DNA
atgagggccacagccatcgtgctgctgctggccctgaccctggccaccatgttcagcattgaatgtgccaagcagaccaagcagatggtggactgcagccactacaagaagctgcccccaggccagcagcgcttctgccaccacatgtatgaccccatctgtggcagtgatggcaagacctacaagaatgactgcttcttctgcagcaaggtgaagaagacagatggcaccctgaagtttgtgcactttggaaaatgttag

SEQ ID NO: 169250 - DNA, 759 bp, synthetic construct
  misc_feature 1..759: note = Description of Artificial Sequence: Synthetic coding sequence
  source 1..759: mol_type = other DNA
atggcccagctgtgtggcctgcggcgcagccgggccttcctggccctgctgggcagcctgctgctgtctggagtgctggccgctgaccgggagaggagcatccatgacttctgcctggtgtccaaggtggtgggccgctgccgggcctccatgccccgctggtggtacaacgtgacagatggcagctgccagctgtttgtgtatggaggctgtgatggcaacagcaacaactacctgaccaaggaggagtgcctgaagaagtgtgccaccgtgacagaaaatgccaccggggacctggccaccagcagaaatgctgctgacagctctgtgcccagcgccccccggcggcaggacagcgaggaccacagcagtgacatgttcaactatgaggagtactgcacagccaatgctgtgacaggcccctgccgggccagcttcccccgctggtactttgatgtggagaggaacagctgcaacaacttcatctatggaggctgccggggcaacaagaacagctacagaagtgaggaggcctgcatgctgcgctgcttccggcagcaggagaacccccccctgcccctgggcagcaaggtggtggtgctggccggcctgtttgtgatggtgctgatcctcttcctgggcgcctccatggtgtacctgatccgggtggcccggaggaaccaggagcgggccctgaggacagtgtggagcagtggagatgacaaggagcagctggtgaagaacacctacgtgctgtag

SEQ ID NO: 169251 - DNA, 588 bp, synthetic construct
  misc_feature 1..588: note = Description of Artificial Sequence: Synthetic coding sequence
  source 1..588: mol_type = other DNA
atggcccagctgtgtggcctgcggcgcagccgggccttcctggccctgctgggcagcctgctgctgtctggagtgctggccgctgaccgggagaggagcatccatgaaaatgccactggagacctggccaccagcagaaatgctgctgacagctctgtgcccagcgccccccggcggcaggacagcgaggaccacagcagtgacatgttcaactatgaggagtactgcacagccaatgctgtgacaggcccctgccgggccagcttcccccgctggtactttgatgtggagaggaacagctgcaacaacttcatctacggcggctgccggggcaacaagaacagctacagaagtgaggaggcctgcatgctgcgctgcttccggcagcaggagaacccccccctgcccctgggcagcaaggtggtggtgctggccggcctgtttgtgatggtgctgatcctcttcctgggcgcctccatggtgtacctgatccgggtggcccggaggaaccaggagcgggccctgaggacagtgtggagcagtggagatgacaaggagcagctggtgaagaacacctacgtgctgtag

SEQ ID NO: 169252 - DNA, 1299 bp, synthetic construct
  misc_feature 1..1299: note = Description of Artificial Sequence: Synthetic coding sequence
  source 1..1299: mol_type = other DNA
atgtctgacaagctgccctacaaggtggccgacatcggcctggccgcctggggcaggaaggccctggacattgctgaaaatgagatgcctggcctgatgaggatgagggagcgctacagcgccagcaagcccctgaagggggccagaattgctggctgcctgcacatgacagtggagacagctgtgctgattgagaccctggtgaccctgggcgctgaggtgcagtggagcagctgcaacatcttcagcacccaggaccacgccgccgccgccatcgccaaggccggcatccctgtgtatgcctggaagggggagacagatgaggagtacctgtggtgcatcgagcagaccctgtacttcaaggatggccccctgaacatgatcctggatgatggaggagacctgaccaacctgatccacaccaagtacccccagctgctgcccggcatccggggcatcagcgaggagaccaccactggagtgcacaacctgtacaagatgatggccaacggcatcctgaaggtgcctgccatcaacgtgaatgattctgtgaccaagagcaagtttgacaacctgtatggctgccgggagagcctgattgatggcatcaagagggccacagatgtgatgattgctgggaaggtggccgtggtggccggctatggagatgtgggcaagggctgtgcccaggccctgcggggctttggagcccgggtcatcatcacagaaattgaccccatcaatgccctgcaggccgccatggagggctatgaggtgaccaccatggatgaggcctgccaggagggcaacatctttgtgaccaccaccggctgcatcgacatcatcctgggccgccactttgagcagatgaaggatgatgccatcgtgtgcaacatcggccactttgatgtggagattgatgtgaagtggctgaatgaaaatgctgtggagaaggtgaacatcaagccccaggtggaccgctaccgcctgaagaatggccgccgcatcatcctgctggccgagggccgcctggtgaacctgggctgtgccatgggccaccccagctttgtgatgagcaacagcttcaccaaccaggtgatggcccagatcgagctgtggacccacccagacaagtaccctgtgggcgtgcacttcctgcccaagaagctggatgaagctgtggccgaggcccacctgggcaagctgaatgtgaagctgaccaagctgacagagaagcaggcccagtacctgggcatgagctgtgatggccccttcaagccagaccactaccgctactag

SEQ ID NO: 169253 - DNA, 1023 bp, synthetic construct
  misc_feature 1..1023: note = Description of Artificial Sequence: Synthetic coding sequence
  source 1..1023: mol_type = other DNA
atgtgtgcccagtactgcatcagctttgctgatgtggagaaggcccacatcaacatccgggacagcatccacctgacccctgtgctgaccagcagcatcctgaaccagctgaccggcaggaacctcttcttcaagtgtgagctgttccagaagacaggcagcttcaagatccggggggccctgaatgctgtgcgcagcctggtgcctgatgccctggagaggaagcccaaggctgtggtgacccacagcagcggcaaccacggccaggccctgacctacgccgccaagctggagggcatcccagcctacatcgtggtgccccagacagccccagactgcaagaagctggccatccaggcctatggagccagcatcgtgtactgtgagcccagtgatgagagccgggagaatgtggccaagagggtgacagaggagacagagggcatcatggtgcaccccaaccaggagcctgctgtgattgctggccagggcaccatcgccctggaggtgctgaaccaggtgcccctggtggatgccctggtggtgcctgtgggcggcggcggcatgctggccggcatcgccatcaccgtgaaggccctgaagcccagcgtgaaggtgtatgctgctgagcccagcaatgctgatgactgctaccagagcaagctgaagggcaagctgatgcccaacctgtacccacctgagaccatcgcagatggagtgaagagcagcatcggcctgaacacctggcccatcatccgggacctggtggatgacatcttcaccgtgacagaagatgagatcaagtgtgccacccagctggtgtgggagaggatgaagctgctgattgagcccacagctggggtgggcgtggccgctgtgctgagccagcacttccagacagtgtccccagaggtgaagaacatctgcatcgtgctgagcggcggcaatgtggacctgaccagcagcatcacctgggtgaagcaggccgagaggcctgccagctaccagagcgtgtctgtgtag

SEQ ID NO: 169254 - DNA, 1638 bp, synthetic construct
  misc_feature 1..1638: note = Description of Artificial Sequence: Synthetic coding sequence
  source 1..1638: mol_type = other DNA
atggccgagcccagcggcagccctgtgcacgtgcagctgccccagcaggccgcccctgtgacagctgctgctgctgctgccccagctgctgccacagctgccccagccccagctgccccagctgccccagccccagccccagccccagctgcccaggccgtgggctggcccatctgcagagatgcctatgagctgcaggaggtgattggcagcggggccacagctgtggtgcaggccgccctgtgcaagccccggcaggagcgggtggccatcaagaggatcaacctggagaagtgccagacctccatggatgagctgctgaaggagatccaggccatgagccagtgcagccaccccaacgtggtgacctactacaccagctttgtggtgaaggatgagctgtggctggtgatgaagctgctgagcggcggctccatgctggacatcatcaagtacatcgtgaacagaggagagcacaagaatggagtgctggaggaggccatcatcgccaccatcctgaaggaggtgctggagggcctggactacctgcacagaaatggccagatccaccgggacctgaaggccggcaacatcctgctgggggaggatggctctgtgcagattgctgactttggagtgtctgccttcctggccactggaggagatgtgaccaggaacaaggtgaggaagacctttgtgggcaccccctgctggatggcccctgaggtgatggagcaggtgcggggctatgacttcaaggctgacatgtggagctttggcatcacagccatcgagctggccaccggggccgccccctaccacaagtacccacccatgaaggtgctgatgctgaccctgcagaatgacccccccaccctggagactggagtggaggacaaggagatgatgaagaagtatggcaagagcttcaggaagctgctgagcctgtgcctgcagaaggaccccagcaagaggcccacagctgctgagctgctgaagtgcaagttcttccagaaggccaagaaccgggagtacctgattgagaagctgctgaccaggaccccagacatcgcccagagggccaagaaggtgagaagagtgcccggcagcagcggccacctgcacaagacagaagatggagactgggagtggagcgatgatgagatggatgagaagtctgaggagggcaaggccgccttcagccaggagaagagccggcgggtgaaggaggagaaccctgagattgctgtgtctgccagcaccatccctgagcagatccagagcctgtctgtgcatgacagccagggccccccaaatgccaatgaagactaccgggaggccagcagctgtgctgtgaacctggtgctgcggctgaggaacagcaggaaggagctgaatgacatccgctttgagttcaccccaggccgggacacagcagatggagtgtcccaggagctgttctctgctggcctggtggatggccatgatgtggtgattgtggccgccaacctgcagaagatcgtggatgaccccaaggccctgaagaccctgaccttcaagctggccagcggctgtgatggcagcgagatcccagatgaggtgaagctgattggatttgcccagctgtctgtgtcctag

SEQ ID NO: 169255 - DNA, 2715 bp, synthetic construct
  misc_feature 1..2715: note = Description of Artificial Sequence: Synthetic coding sequence
  source 1..2715: mol_type = other DNA
atggatgctggcttcttccggggcaccagcgctgagcaggacaaccgcttcagcaacaagcagaagaagctgctgaagcagctgaagtttgctgagtgcctggagaagaaggtggacatgagcaaggtgaacctggaggtgatcaagccctggatcaccaagagggtgacagagatcctgggctttgaagatgatgtggtgattgagttcatcttcaaccagctggaggtgaagaacccagacagcaagatgatgcagatcaacctgaccggcttcctgaatggcaagaatgcccgggagttcatgggagagctgtggcccctgctgctgagcgcccaggagaacattgctggcatccccagcgccttcctggagctgaagaaggaggagatcaagcagaggcagatcgagcaggagaagctggcctccatgaagaagcaggatgaggacaaggacaagagggacaaggaggagaaggagagcagccgggagaagcgggagaggagccgcagccccaggaggaggaagagccgcagccccagcccccggcggcgcagcagccctgtgcggcgggagaggaagaggagccacagccgcagccccaggcacaggaccaagagccgcagccccagccctgcccctgagaagaaggagaagaccccagagctgcctgagcccagcgtgaaggtgaaggagcccagcgtgcaggaggccaccagcaccagtgacatcctgaaggtgcccaagccagagcccatccctgagcccaaggagcccagccctgagaagaacagcaagaaggagaaggagaaggagaagacccggcccaggagccgcagccgcagcaagagccgcagcaggaccaggagccgcagccccagccacacccggccccggcggcggcacaggagccgcagccgcagctacagccccaggagaagacccagccccaggagaagacccagccccaggaggaggaccccacccaggaggatgcctcctccacccaggcacagaagaagccgcagccctgtgagaagaagaagaagaagcagcgccagcctgagcggcagcagcagcagcagcagcagcagccgcagccgcagcccccccaagaagccacccaagaggaccagcagcccccccaggaagacccggcggctgagccccagcgccagcccccccaggagaagacaccggcccagccccccagccaccccaccacccaagaccaggcacagccccaccccccagcagagcaacagaaccaggaagagccgggtgtctgtgtccccaggccgcaccagcggcaaggtgaccaagcacaagggcacagagaagcgggagagccccagccctgcccccaagcccaggaaggtggagctgtctgagagtgaagaagataaaggaggcaagatggctgctgctgacagcgtgcagcagaggcggcagtaccgccggcagaaccagcagagcagcagtgacagcggcagcagcagcagcagtgaagatgagcggcccaagaggagccacgtgaagaatggagaggtgggcagaagaagaagacacagccccagccgcagcgccagccccagccccaggaagaggcagaaggagaccagcccccggggcagaagaagaagaagccccagccccccacccaccaggagaagaagaagccccagccctgcccccccacccaggagaagaaggacccccaccccaccacccaggaggaggacccccagccccccaccaagaagaagaagccccagcccccggcgctacagcccccccatccagaggcgctacagccccagccccccacccaagagaagaacagccagccccccacctccacccaagagaagagccagccccagccccccacccaagagaagagtgagccacagccccccacccaagcagaggagcagccctgtgaccaagagaagaagccccagcctgagcagcaagcacaggaagggcagcagccccagccgcagcacccgggaggcccggagcccccagcccaacaagaggcacagccccagcccccggccccgggccccccagaccagcagcagccccccacctgtgagaagaggagccagcagcagcccccagaggcggcagagccccagccccagcacccggcccatccggcgggtgtccaggaccccagagcccaagaagatcaagaaggccgccagccccagcccccagagcgtgagaagagtgagcagcagccgctctgtgtctggcagccctgagcctgctgccaagaagcccccagccccacccagccctgtgcagagccagagccccagcaccaactggagccctgctgtgcctgtgaagaaggccaagagccccacccccagccccagcccccccaggaacagcgaccaggagggcggcggcaagaagaagaagaagaagaaggacaagaagcacaagaaggacaagaagcacaagaagcacaagaagcacaagaaggagaaggctgtggccgctgctgctgctgctgctgtgaccccagctgccatcgccgccgccaccaccaccctggcccaggaggagcctgtggccgcccctgagcccaagaaggagacagagagcgaggccgaggacaacctggatgacctggagaagcacctgcgggagaaggccctgcgctccatgaggaaggcccaggtgagcccccagagctag

SEQ ID NO: 169256 - DNA, 2742 bp, synthetic construct
  misc_feature 1..2742: note = Description of Artificial Sequence: Synthetic coding sequence
  source 1..2742: mol_type = other DNA
atggatgctggcttcttccggggcaccagcgctgagcaggacaaccgcttcagcaacaagcagaagaagctgctgaagcagctgaagtttgctgagtgcctggagaagaaggtggacatgagcaaggtgaacctggaggtgatcaagccctggatcaccaagagggtgacagagatcctgggctttgaagatgatgtggtgattgagttcatcttcaaccagctggaggtgaagaacccagacagcaagatgatgcagatcaacctgaccggcttcctgaatggcaagaatgcccgggagttcatgggagagctgtggcccctgctgctgagcgcccaggagaacattgctggcatccccagcgccttcctggagctgaagaaggaggagatcaagcagaggcagatcgagcaggagaagctggcctccatgaagaagcaggatgaggacaaggacaagagggacaaggaggagaaggagagcagccgggagaagcgggagaggagccgcagccccaggaggaggaagagccgcagccccagcccccggcggcgcagcagccctgtgcggcgggagaggaagaggagccacagccgcagccccaggcacaggaccaagagccgcagccccagccctgcccctgagaagaaggagaagaccccagagctgcctgagcccagcgtgaaggtgaaggagcccagcgtgcaggaggccaccagcaccagtgacatcctgaaggtgcccaagccagagcccatccctgagcccaaggagcccagccctgagaagaacagcaagaaggagaaggagaaggagaagacccggcccaggagccgcagccgcagcaagagccgcagcaggaccaggagccgcagccccagccacacccggccccggcggcggcacaggagccgcagcagaagaagacccagcccccggcggcggcccagccccaggaggaggaccccacccaggaggatgcctcctccacccaggcaccggcgcagccgcagccctgtgagaagaagaagaagaagcagcgccagcctgagcggcagcagcagcagcagcagcagcagccgcagccgcagcccccccaagaagccacccaagaggaccagcagcccccccaggaagacccggcggctgagccccagcgccagccccccaagaagaagacaccggcccagccccccagccaccccaccacccaagaccaggcacagccccaccccccagcagagcaacagaaccaggaagagccgggtgtctgtgtccccaggccgcaccagcggcaaggtgaccaagcacaagggcacagagaagcgggagagccccagccctgcccccaagcccaggaaggtggagctgtctgagagcgaggaggacaagggcggcaagatggctgctgctgacagcgtgcagcagaggcggcagtaccgccggcagaaccagcagagcagcagtgacagcggcagcagcagcagcagtgaagatgagcggcccaagaggagccacgtgaagaatggagaggtgggcagaagaagaagacacagccccagccgcagcgccagccccagccccaggaagaggcagaaggagaccagccccaggatgcagatgggcaagcgctggcagagccctgtgaccaagagcggcagaagaagaagaagccccagccccccacccaccaggagaagaagaagccccagccctgcccctcctccaagaagaagaaggacccccaccccacctccaagaagaaggacccccagccccccacccaggagaagaagccccagcccccggcgctacagcccccccatccagaggcgctacagccccagccccccacccaagagaagaacagccagccccccacctccacccaagaggcgggccagccccagccccccacccaagagaagagtgagccacagccccccacccaagcagaggagcagccctgtgaccaagaggaggagccccagcctgagcagcaagcacaggaagggcagcagccccagccgcagcacccgggaggcccggagcccccagcccaacaagaggcacagccccagcccccggccccgggccccccagaccagcagcagccccccacctgtgcggcggggggccagcagcagcccccagaggcggcagagccccagccccagcacccggcccatcagaagagtgtccaggaccccagagcccaagaagatcaagaaggccgccagccccagcccccagagcgtgcggcgggtgagcagcagccgctctgtgtctggcagccctgagcctgctgccaagaagcccccagccccacccagccctgtgcagagccagagccccagcaccaactggagccctgctgtgcctgtgaagaaggccaagagccccacccccagccccagccccccaagaaacagcgaccaggagggcggcggcaagaagaagaagaagaagaaggacaagaagcacaagaaggacaagaagcacaagaagcacaagaagcacaagaaggagaaggctgtggccgctgctgctgctgctgctgtgaccccagctgccatcgctgctgccaccaccaccctggcccaggaggagcctgtggccgcccctgagcccaagaaggagacagaaagtgaagctgaggacaacctggatgacctggagaagcacctgcgggagaaggccctgcgctccatgaggaaggcccaggtgagcccccagagctag

SEQ ID NO: 169257 - DNA, 2751 bp, synthetic construct
  misc_feature 1..2751: note = Description of Artificial Sequence: Synthetic coding sequence
  source 1..2751: mol_type = other DNA
atggatgctggcttcttccggggcaccagcgctgagcaggacaaccgcttcagcaacaagcagaagaagctgctgaagcagctgaagtttgctgagtgcctggagaagaaggtggacatgagcaaggtgaacctggaggtgatcaagccctggatcaccaagagggtgacagagatcctgggctttgaagatgatgtggtgattgagttcatcttcaaccagctggaggtgaagaacccagacagcaagatgatgcagatcaacctgaccggcttcctgaatggcaagaatgcccgggagttcatgggagagctgtggcccctgctgctgagcgcccaggagaacattgctggcatccccagcgccttcctggagctgaagaaggaggagatcaagcagaggcagatcgagcaggagaagctggcctccatgaagaagcaggatgaggacaaggacaagagggacaaggaggagaaggagagcagccgggagaagcgggagaggagccgcagccccaggaggaggaagagccgcagccccagcccccggcggcgcagcagccctgtgcggcgggagaggaagaggagccacagccgcagccccaggcacaggaccaagagccgcagccccagccctgcccctgagaagaaggagaagaccccagagctgcctgagcccagcgtgaaggtgaaggagcccagcgtgcaggaggccaccagcaccagtgacatcctgaaggtgcccaagccagagcccatccctgagcccaaggagcccagccctgagaagaacagcaagaaggagaaggagaaggagaagacccggcccaggagccgcagccgcagcaagagccgcagcaggaccaggagccgcagccccagccacacccggccccggcggcggcacaggagccgcagccgcagctacagccccaggagaagacccagccccaggagaagacccagccccaggaggaggaccccacccaggaggatgcctcctccacccaggcacagaagaagccgcagccctgtgagaagaagaagaagaagcagcgccagcctgagcggcagcagcagcagcagcagcagcagccgcagccgcagcccccccaagaagccacccaagaggaccagcagcccccccaggaagacccggcggctgagccccagcgccagcccccccaggagaagacaccggcccagccccccagccaccccaccacccaagaccaggcacagccccaccccccagcagagcaacagaaccaggaagagccgggtgtctgtgtccccaggccgcacctctgtgaccaagcacaagggcacagagaagcgggagagccccagccctgcccccaagcccaggaaggtggagctgtctgagagtgaagaagataaaggaggcaagatggctgctgctgacagcgtgcagcagaggcggcagtaccgccggcagaaccagcagagcagcagtgacagcggcagcagcagcagcagtgaagatgagcggcccaagaggagccacgtgaagaatggagaggtgggcagaagaagaagacacagccccagccgcagcgccagccccagccccaggaagaggcagaaggagaccagccccaggatgcagatgggcaagcgctggcagagccctgtgaccaagtctggaagaagaagaagaagccccagccccccacccaccaggagaagaagaagccccagccctgcccccccacccaggagaagaaggacccccaccccaccacccaggaggaggacccccagccccccaccaagaagaagaagccccagcccccggcgctacagcccccccatccagaggcgctacagccccagccccccacccaagagaagaacagccagccccccacctccacccaagagaagagccagccccagccccccacccaagagaagagtgagccacagccccccacccaagcagaggagcagccctgtgaccaagagaagaagccccagcctgagcagcaagcacaggaagggcagcagccccagccgcagcacccgggaggcccggagcccccagcccaacaagaggcacagccccagcccccggccccgggccccccagaccagcagcagccccccacctgtgagaagaggagccagcagcagcccccagaggcggcagagccccagccccagcacccggcccatccggcgggtgtccaggaccccagagcccaagaagatcaagaaggccgccagccccagcccccagagcgtgagaagagtgagcagcagccgctctgtgtctggcagccctgagcctgctgccaagaagcccccagccccacccagccctgtgcagagccagagccccagcaccaactggagccctgctgtgcctgtgaagaaggccaagagccccacccccagccccagcccccccaggaacagcgaccaggagggcggcggcaagaagaagaagaagaagaaggacaagaagcacaagaaggacaagaagcacaagaagcacaagaagcacaagaaggagaaggctgtggccgctgctgctgctgctgctgtgaccccagctgccatcgccgccgccaccaccaccctggcccaggaggagcctgtggccgcccctgagcccaagaaggagacagagagcgaggccgaggacaacctggatgacctggagaagcacctgcgggagaaggccctgcgctccatgaggaaggcccaggtgagcccccagagctag

SEQ ID NO: 169258 - DNA, 957 bp, synthetic construct
  misc_feature 1..957: note = Description of Artificial Sequence: Synthetic coding sequence
  source 1..957: mol_type = other DNA
atgggagagctgtggcccctgctgctgagcgcccaggagaacattgctggcatccccagcgccttcctggagctgaagaaggaggagatcaagcagaggcagatcgagcaggagaagctggcctccatgaagaagcaggatgaggacaaggacaagagggacaaggaggagaaggagagcagccgggagaagcgggagaggagccgcagccccaggaggaccaagagccgcagccccagccctgcccctgagaagaaggagaagaccccagagctgcctgagcccagcgtgaaggtgaaggagcccagcgtgcaggaggccaccagcaccagtgacatcctgaaggtgcccaagccagagcccatccctgagcccaaggagcccagccctgagaagaacagcaagaaggagaaggagaaggagaagacccggcccaggagccgcagccgcagcaagagccgcagcaggaccaggagccgcagccccagccacacccggcccaggagaagacacaggagccgcagccgcagctacagcccccggcggcggcccagcccccggcggcggcccagccccaggaggaggaccccacccaggaggatgcctcctccacccaggcaccggcgcagccgcagccctgtgcggcgcttcagcggcatcctgccccccaaggtgaacagcgctgaggaggatgtgcggcagcacccctgcctgggcgtggcccaccaccccctgcacctggtgcacggccaccaccagaggagcctgccccggggccacccagcccccctgggcaagctggtgggctacctgctgcagcaggtgctgcagggcgagggcaccggccaccacctgctgcagctgcaccaccccaagctgggcatccccctgcaccccagcagccagacagtgcaggagaaggtggtgttcctgtgcctgcagggcgagctgcagtag

SEQ ID NO: 169259 - DNA, 8259 bp, synthetic construct
  misc_feature 1..8259: note = Description of Artificial Sequence: Synthetic coding sequence
  source 1..8259: mol_type = other DNA
atgtacaatggaattggcctgcccaccccccggggcagcggcaccaacggctacgtgcagaggaacctgagcctggtgcggggcagaagaggagagaggccagactacaagggggaggaggagctgcggcggctggaggccgccctggtgaagaggcccaacccagacatcctggaccacgagaggaagagaagagtggagctgcgctgcctggagctggaggagatgatggaggagcagggctatgaggagcagcagatccaggagaaggtggccaccttccggctgatgctgctggagaaggatgtgaaccctgggggcaaggaggagaccccaggccagaggcctgctgtgacagagacccaccagctggccgagctgaatgagaagaagaatgaaaggctgcgggccgccttcggcatcagtgacagctatgtggatggcagcagctttgacccccagaggcgggcccgggaggccaagcagcctgcccctgagccccccaagccctacagcctggtgcgggagagcagcagcagccgcagccccacccccaagcagaagaagaagaagaagaagaaggaccggggccgccgctctgagagcagcagcccccggcgggagaggaagaagagcagcaagaagaagaagcacaggtctgagagcgagagcaagaagaggaagcacaggagccccacccccaagagcaagaggaagagcaaggacaagaagaggaagaggagccgcagcaccaccccagcccccaagagccggcgggcccacaggagcaccagcgctgacagcgccagcagcagtgacaccagccgcagccgcagccgctctgctgctgccaagacccacaccacagccctggccggccgcagccccagccctgccagcggccggcggggggagggagatgcccccttcagcgagcccggcaccaccagcacccagaggcccagcagccctgagacagccaccaagcagcccagcagcccctatgaggacaaggacaaggacaagaaggagaagagcgccacccggcccagccccagccctgagaggagcagcactggacctgagcccccagcccccacccccctgctggccgagcggcacggcggcagcccccagcccctggccaccacccccctgagccaggagcctgtgaaccccccatctgaggccagccccacccgggacaggagcccccccaagagccctgagaagctgccccagagcagcagcagcgagagcagcccccccagcccccagcccaccaaggtgtccagacatgccagcagcagccctgagagccccaagccagccccagcccctggcagccaccgggagatcagcagcagccccaccagcaagaacagaagccacggccgggccaagagggacaagagccacagccacacccccagcaggaggatgggccgcagccgcagccctgccacagccaagaggggccgcagccgcagcaggacccccaccaagaggggccacagccgcagccgcagcccccagtggaggaggagccgcagcgcccagcgctggggccgcagccgcagcccccagaggcggggccgcagccgcagcccccagaggcctggctggagccgcagcaggaacacccagaggcggggccgcagccgcagcgcccggcggggccgcagccacagccgcagccctgccacccggggccgcagccgcagcaggaccccagcccggcggggccgcagccgcagcaggaccccagcccggcggcgcagccgcagcaggacccccacccggcggcgcagccgcagcaggaccccagcccggcggggccgcagccgcagcaggaccccagccaggagaagaagcaggaccaggagccctgtgagaagaagaagccgcagccgcagccctgcccggcgcagcggccgcagccgcagcaggaccccagcccggcggggccgcagccgcagcaggaccccagcccggcggggccgcagccgcagcaggaccccagcccggcgcagcggccgcagccgcagcaggaccccagcccggcggggccgcagccgcagcaggaccccccggcggggccgcagccgcagccgcagcctggtgagaagaggccgcagccacagcaggaccccccagaggcggggccgcagcggcagcagcagcgagaggaagaacaagagcaggaccagccagaggaggagccgcagcaacagcagccctgagatgaagaagagccgcatcagcagcagaagaagccgcagcctgagcagccccaggagcaaggccaagagccggctgagcctgcggcgcagcctgagcggcagcagcccctgccccaagcagaagagccagaccccaccaagaagaagccgcagcggcagcagccagcccaaggccaagagcaggaccccaccaagaagaagccgcagcagcagcagccccccacccaagcagaagagcaagacccccagccggcagagccacagcagcagcagcccccaccccaaggtgaagagcggcaccccaccccggcagggcagcatcaccagcccccaggccaatgagcagagcgtgaccccccagaggaggagctgctttgagagcagcccagaccctgagctgaagagcaggacccccagccgccacagctgcagcggcagcagccccccccgggtgaagagcagcaccccaccccggcagagccccagccgcagcagcagcccccagcccaaggtgaaggccatcatcagcccccggcagaggagccacagcggcagcagcagccccagccccagccgggtgaccagcaggaccaccccccggcgcagccgctctgtgagcccctgcagcaatgtggagagccggctgctgccccgctacagccacagcggcagcagcagcccagacaccaaggtgaagccagagaccccaccccggcagagccacagcggcagcatcagcccctaccccaaggtgaaggcccagaccccacctggccccagcctgagcggcagcaagagcccctgcccccaggagaagagcaaggacagcctggtgcagagctgccccggcagcctgagcctgtgtgccggcgtgaagagcagcaccccacctggagagagctactttggagtgagcagcctgcagctgaagggccagagccagaccagcccagaccacagaagtgacaccagcagccctgaggtgcggcagagccacagcgagagccccagcctgcagagcaagagccagaccagccccaagggcggccgcagccgcagcagcagccctgtgacagagctggccagccgcagccccatccggcaggacagaggagagttcagcgccagccccatgctgaagagcggcatgagccctgagcagagccgcttccagagcgacagcagcagctaccccaccgtggacagcaacagcctgctgggccagagccggctggagacagctgagagcaaggagaagatggccctgcccccccaggaggatgccacagccagccccccccggcagaaggacaagttcagccccttccctgtgcaggacaggcctgagagcagcctggtgttcaaggacaccctgcggaccccaccccgggagaggtctggggccggcagcagccctgagaccaaggagcagaacagcgccctgcccaccagcagccaggatgaggagctgatggaggtggtggagaagtctgaggagcctgctggccagatcctgagccacctgagcagcgagctgaaggagatgagcaccagcaactttgagagcagccctgaggtggaggagaggcctgctgtgtccctgaccctggaccagagccagagccaggccagcctggaggccgtggaggtgcccagcatggccagctcctggggcggcccccacttcagccctgagcacaaggagctgagcaacagccccctgcgggagaacagctttggcagccccctggagttcaggaacagcggccccctgggcacagagatgaacacaggcttcagcagcgaggtgaaggaggacctgaatggccccttcctgaaccagctggagacagaccccagcctggacatgaaggagcagagcaccaggagcagcggccacagcagcagcgagctgagcccagatgctgtggagaaggccggcatgagcagcaaccagagcatcagcagccctgtgctggatgctgtgcccaggacccccagccgggagaggagcagcagcgccagcagccctgagatgaaggatggcctgcccaggacccccagcagaagaagccgcagcggcagcagccctggcctgagagatggcagcggcacccccagccgccacagcctgagcggcagcagccctggcatgaaggacatccccaggacccccagccggggccgctcagaatgtgacagcagccctgagcccaaggccctgccccagaccccccggcccaggagccgcagccccagcagccctgagctgaacaacaagtgcctgaccccccagcgggagaggagcggcagcgagagctctgtggaccagaagacagtggcccggacccccctgggccagaggagccgcagcggcagcagccaggagctggatgtgaagcccagcgccagcccccaggagaggtctgagagtgacagcagcccagacagcaaggccaagaccaggacccccctgcggcagaggagccgcagcggcagcagccctgaggtggacagcaagagccggctgagcccccggcgcagccgcagcggcagcagccctgaggtgaaggacaagccccgggccgccccccgggcccagagcggcagtgacagcagccctgagcccaaggccccagccccccgggccctgccccggcgcagccgcagcggcagcagcagcaagggccggggccccagccctgagggcagcagcagcacagagagcagccctgagcacccccccaagagcaggacagcccggcggggcagccgcagcagccctgagcccaagaccaagagcaggaccccaccaagaagaagaagcagccgcagcagccctgagctgaccaggaaggcccggctgagcagaagaagccgcagcgccagcagcagccctgagaccaggagcaggaccccacccaggcacagaagaagccccagcgtgagcagccctgagcctgctgagaagagccgcagcagcagaagaagaagaagtgccagcagccccaggaccaagaccaccagccggcggggccgcagccccagccccaagccccggggcctgcagaggagccgcagccgcagccggcgggagaagaccaggaccaccaggagaagagacagaagtggcagcagccagagcaccagcagaagacggcagaggagccgcagccgcagccgggtgaccaggagaagaagaggaggcagcggctaccacagccgcagccctgcccggcaggagagcagcaggaccagcagcagaagaagaagaggccgcagcaggaccccacccaccagcaggaagaggagccgcagcaggaccagccctgccccctggaagaggagccgcagccgggccagccctgccacccaccggcgcagccgcagcaggacccccctcatcagcagaagaagaagccgcagcaggaccagccctgtgtccagaagaagaagccgcagcaggacctctgtgaccaggagaagaagccgcagccgggccagccctgtgtccagaagaagaagccgcagcaggaccccacctgtgaccaggagaagaagccgcagcaggacccccaccacccggcggcgcagccgcagcaggaccccacctgtgacccggcggcgcagccgcagcaggaccccacctgtgacccggcggcgcagccgcagcaggaccagccccatcacccggcggcgcagccgcagcaggaccagccctgtgacccggcggcgcagccgcagcaggaccagccctgtgacccggcggcgcagccgcagcaggaccagccctgtgacccggcggcgcagccgcagcaggaccccaccagccatcagaagaagaagccgcagcaggacccccctgctgcccaggaagaggagccgcagccgcagccccctggccatcagaagaagaagccgcagcaggacccccaggacagcccggggcaagaggagcctgaccaggagccccccagccatcagaagaagaagtgccagcggcagcagcagtgacaggagccgcagcgccaccccaccagccaccaggaaccacagcggcagcaggaccccacctgtggccctgaacagcagcaggatgagctgcttcagccggcccagcatgagccccacccccctggaccgctgccgcagccctggcatgctggagcccctgggcagcagcaggacccccatgtctgtgctgcagcaggccggcggctccatgatggatggccctggcccccgcatcccagaccaccagaggacctctgtgcctgagaaccacgcccagagcagaattgccctggccctgacagccatcagcctgggcacagcccggcccccacccagcatgtctgctgctggcctggccgccaggatgagccaggtgcctgcccctgtgcccctgatgagcctgaggacagccccagctgccaacctggccagccgcatcccagctgccagcgctgctgccatgaacctggccagcgcccggaccccagccatccccacagctgtgaacctggccgacagcaggaccccagctgctgctgctgccatgaacctggccagccccaggacagctgtggcccccagcgctgtgaacctggccgaccccaggacccccacagccccagctgtgaacctggccggggcccggaccccagctgccctggccgccctgagcctgaccggcagcggcaccccacccacagctgccaactaccccagcagcagcaggaccccccaggccccagccagcgccaacctggtgggccccaggtctgcccacgccacagcccctgtgaacattgctggcagcaggacagctgctgccctggccccagccagcctgaccagcgccaggatggccccagccctgagcggggccaacctgaccagcccccgggtgcccctgagcgcctatgaaagagtgtctggccgcaccagcccccccctgctggaccgggcccggagcaggaccccacccagcgcccccagccagagcaggatgaccagcgagcgggcccccagccccagcagcaggatgggccaggcccccagccagagcctgctgcccccagcccaggaccagcccaggagccctgtgcccagcgccttcagtgaccagagccgctgcctgattgcccagaccacccctgtggccggcagccagagcctgagcagtggagctgtggccaccaccaccagcagcgctggggaccacaacggcatgctgtctgtgcctgcccctggggtgccccacagtgatgtgggggagcccccagccagcactggagcccagcagcccagcgccctggccgccctgcagcctgccaaggagcggcgcagcagcagcagcagcagcagcagcagcagcagcagcagcagcagcagcagcagcagcagcagcagcagcagcagcggcagcagcagcagtgacagcgagggcagcagcctgcctgtgcagcctgaggtggccctgaagagggtgcccagccccaccccagcccccaaggaggccgtgcgggagggccggcccccagagcccaccccagccaagaggaagagaagaagcagcagcagcagcagcagcagcagcagcagcagcagcagcagcagcagcagcagcagcagcagcagcagcagcagcagcagcagcagcagcagcagcagcagcagcagcagcagcagcagcagccccagccctgccaagccaggcccccaggccctgcccaagccagccagccccaagaagcccccacctggagagaggaggagccgcagccccaggaagcccatcgacagcctgcgggacagccgcagcctgagctacagccctgtggagaggagaagacccagcccccagcccagcccccgggaccagcagagcagcagcagcgagcggggcagccggcggggccagagaggagacagccgcagccccagccacaagagaagaagagagacccccagcccccggcccatgaggcacaggagcagccgcagcccctag

SEQ ID NO: 169260 - DNA, 702 bp, synthetic construct
  misc_feature 1..702: note = Description of Artificial Sequence: Synthetic coding sequence
  source 1..702: mol_type = other DNA
atgatctccttccccagcctgcagaggacagagctggaggagatggacctgatcctgcagcaggagggctggcagctggacctgaagaggaacagcctgggctggaaggacctgcagaggagcagccaccccagcccctgcctgcaggccggccggcccctgccccagcccacctgcacccaccggggcctgcccaagctgcggctgtctgaggagggggactacccagccagcgccagcaccccagagccccggggcctcatccccccatctggcaccttcctgcgcttcaacctggaccccctgtgctgcggcccccagcctgtggcctctgtgtcccggggctgggtgagcagccaccactgcagccctgagaactgctggctgacctggctgggggagctgcctgcccccttcagcggcaccccaccacccacagctgtgcccccaggccagggcagccgcagccgcagccccaggaagcccatcgacagcctgcgggacagccgcagcctgagctacagccctgtggagcggcggcggcccagcccccagcccagcccccgggaccagcagagcagcagcagcgagcggggcagcagaagaggccagagaggagacagccgcagccccagccacaagagaagaagagagacccccagcccccggcccatgaggcacaggagcagccgcagcccctag

SEQ ID NO: 169261 - DNA, 7005 bp, synthetic construct
  misc_feature 1..7005: note = Description of Artificial Sequence: Synthetic coding sequence
  source 1..7005: mol_type = other DNA
atgtacaatggaattggcctgcccaccccccggggcagcggcaccaacggctacgtgcagaggaacctgagcctggtgcggggcagaagaggagagaggccagactacaagggggaggaggagctgcggcggctggaggccgccctggtgaagaggcccaacccagacatcctggaccacgagaggaagagaagagtggagctgcgctgcctggagctggaggagatgatggaggagcagggctatgaggagcagcagatccaggagaaggtggccaccttccggctgatgctgctggagaaggatgtgaaccctgggggcaaggaggagaccccaggccagaggcctgctgtgacagagacccaccagctggccgagctgaatgagaagaagaatgaaaggctgcgggccgccttcggcatcagtgacagctatgtggatggcagcagctttgacccccagaggcgggcccgggaggccaagcagcctgcccctgagccccccaagccctacagcctggtgcgggagagcagcagcagccgcagccccacccccaagcagaagaagaagaagaagaagaaggaccggggccgccgctctgagagcagcagcccccggcgggagaggaagaagagcagcaagaagaagaagcacaggtctgagagcgagagcaagaagaggaagcacaggagccccacccccaagagcaagaggaagagcaaggacaagaagaggaagaggagccgcagcaccaccccagcccccaagagccggcgggcccacaggagcaccagcgctgacagcgccagcagcagtgacaccagccgcagccgcagccgctctgctgctgccaagacccacaccacagccctggccggccgcagccccagccctgccagcggccggcggggggagggagatgcccccttcagcgagcccggcaccaccagcacccagaggcccagcagccctgagacagccaccaagcagcccagcagcccctatgaggacaaggacaaggacaagaaggagaagagcgccacccggcccagccccagccctgagaggagcagcactggacctgagcccccagcccccacccccctgctggccgagcggcacggcggcagcccccagcccctggccaccacccccctgagccaggagcctgtgaaccccccatctgaggccagccccacccgggacaggagcccccccaagagccctgagaagctgccccagagcagcagcagcgagagcagcccccccagcccccagcccaccaaggtgtccagacatgccagcagcagccctgagagccccaagccagccccagcccctggcagccaccgggagatcagcagcagccccaccagcaagaacagaagccacggccgggccaagagggacaagagccacagccacacccccagcaggaggatgggccgcagccgcagccctgccacagccaagaggggccgcagccgcagcaggacccccaccaagaggggccacagccgcagccgcagcccccagtggaggaggagccgcagcgcccagcgctggggccgcagccgcagcccccagaggcggggccgcagccgcagcccccagaggcctggctggagccgcagcaggaacacccagaggcggggccgcagccgcagcgcccggcggggccgcagccacagccgcagccctgccacccggggccgcagccgcagcaggaccccagcccggcggggccgcagccgcagcaggaccccagcccggcggcgcagccgcagcaggacccccacccggcggcgcagccgcagcaggaccccagcccggcggggccgcagccgcagcaggaccccagccaggagaagaagcaggaccaggagccctgtgagaagaagaagccgcagccgcagccctgcccggcgcagcggccgcagccgcagcaggaccccagcccggcggggccgcagccgcagcaggaccccagcccggcggggccgcagccgcagcaggaccccagcccggcgcagcggccgcagccgcagcaggaccccagcccggcggggccgcagccgcagcaggaccccccggcggggccgcagccgcagccgcagcctggtgagaagaggccgcagccacagcaggaccccccagaggcggggccgcagcggcagcagcagcgagaggaagaacaagagcaggaccagccagaggaggagccgcagcaacagcagccctgagatgaagaagagccgcatcagcagcagaagaagccgcagcctgagcagccccaggagcaaggccaagagccggctgagcctgcggcgcagcctgagcggcagcagcccctgccccaagcagaagagccagaccccaccaagaagaagccgcagcggcagcagccagcccaaggccaagagcaggaccccaccaagaagaagccgcagcagcagcagccccccacccaagcagaagagcaagacccccagccggcagagccacagcagcagcagcccccaccccaaggtgaagagcggcaccccaccccggcagggcagcatcaccagcccccaggccaatgagcagagcgtgaccccccagaggaggagctgctttgagagcagcccagaccctgagctgaagagcaggacccccagccgccacagctgcagcggcagcagccccccccgggtgaagagcagcaccccaccccggcagagccccagccgcagcagcagcccccagcccaaggtgaaggccatcatcagcccccggcagaggagccacagcggcagcagcagccccagccccagccgggtgaccagcaggaccaccccccggcgcagccgctctgtgagcccctgcagcaatgtggagagccggctgctgccccgctacagccacagcggcagcagcagcccagacaccaaggtgaagccagagaccccaccccggcagagccacagcggcagcatcagcccctaccccaaggtgaaggcccagaccccacctggccccagcctgagcggcagcaagagcccctgcccccaggagaagagcaaggacagcctggtgcagagctgccccggcagcctgagcctgtgtgccggcgtgaagagcagcaccccacctggagagagctactttggagtgagcagcctgcagctgaagggccagagccagaccagcccagaccacagaagtgacaccagcagccctgaggtgcggcagagccacagcgagagccccagcctgcagagcaagagccagaccagccccaagggcggccgcagccgcagcagcagccctgtgacagagctggccagccgcagccccatccggcaggacagaggagagttcagcgccagccccatgctgaagagcggcatgagccctgagcagagccgcttccagagcgacagcagcagctaccccaccgtggacagcaacagcctgctgggccagagccggctggagacagctgagagcaaggagaagatggccctgcccccccaggaggatgccacagccagccccccccggcagaaggacaagttcagccccttccctgtgcaggacaggcctgagagcagcctggtgttcaaggacaccctgcggaccccaccccgggagaggtctggggccggcagcagccctgagaccaaggagcagaacagcgccctgcccaccagcagccaggatgaggagctgatggaggtggtggagaagtctgaggagcctgctggccagatcctgagccacctgagcagcgagctgaaggagatgagcaccagcaactttgagagcagccctgaggtggaggagaggcctgctgtgtccctgaccctggaccagagccagagccaggccagcctggaggccgtggaggtgcccagcatggccagctcctggggcggcccccacttcagccctgagcacaaggagctgagcaacagccccctgcgggagaacagctttggcagccccctggagttcaggaacagcggccccctgggcacagagatgaacacaggcttcagcagcgaggtgaaggaggacctgaatggccccttcctgaaccagctggagacagaccccagcctggacatgaaggagcagagcaccaggagcagcggccacagcagcagcgagctgagcccagatgctgtggagaaggccggcatgagcagcaaccagagcatcagcagccctgtgctggatgctgtgcccaggacccccagccgggagaggagcagcagcgccagcagccctgagatgaaggatggcctgcccaggacccccagcagaagaagccgcagcggcagcagccctggcctgagagatggcagcggcacccccagccgccacagcctgagcggcagcagccctggcatgaaggacatccccaggacccccagccggggccgctcagaatgtgacagcagccctgagcccaaggccctgccccagaccccccggcccaggagccgcagccccagcagccctgagctgaacaacaagtgcctgaccccccagcgggagaggagcggcagcgagagctctgtggaccagaagacagtggcccggacccccctgggccagaggagccgcagcggcagcagccaggagctggatgtgaagcccagcgccagcccccaggagaggtctgagagtgacagcagcccagacagcaaggccaagaccaggacccccctgcggcagaggagccgcagcggcagcagccctgaggtggacagcaagagccggctgagcccccggcgcagccgcagcggcagcagccctgaggtgaaggacaagccccgggccgccccccgggcccagagcggcagtgacagcagccctgagcccaaggccccagccccccgggccctgccccggcgcagccgcagcggcagcagcagcaagggccggggccccagccctgagggcagcagcagcacagagagcagccctgagcacccccccaagagcaggacagcccggcggggcagccgcagcagccctgagcccaagaccaagagcaggaccccaccaagaagaagaagcagccgcagcagccctgagctgaccaggaaggcccggctgagcagaagaagccgcagcgccagcagcagccctgagaccaggagcaggaccccacccaggcacagaagaagccccagcgtgagcagccctgagcctgctgagaagagccgcagcagcagaagaagaagaagtgccagcagccccaggaccaagaccaccagccggcggggccgcagccccagccccaagccccggggcctgcagaggagccgcagccgcagccggcgggagaagaccaggaccaccaggagaagagacagaagtggcagcagccagagcaccagcagaagacggcagaggagccgcagccgcagccgggtgaccaggagaagaagaggaggcagcggctaccacagccgcagccctgcccggcaggagagcagcaggaccagcagcagaagaagaagaggccgcagcaggaccccacccaccagcaggaagaggagccgcagcaggaccagccctgccccctggaagaggagccgcagccgggccagccctgccacccaccggcgcagccgcagcaggacccccctcatcagcagaagaagaagccgcagcaggaccagccctgtgtccagaagaagaagccgcagcaggacctctgtgaccaggagaagaagccgcagccgggccagccctgtgtccagaagaagaagccgcagcaggaccccacctgtgaccaggagaagaagccgcagcaggacccccaccacccggcggcgcagccgcagcaggaccccacctgtgacccggcggcgcagccgcagcaggaccccacctgtgacccggcggcgcagccgcagcaggaccagccccatcacccggcggcgcagccgcagcaggaccagccctgtgacccggcggcgcagccgcagcaggaccagccctgtgacccggcggcgcagccgcagcaggaccagccctgtgacccggcggcgcagccgcagcaggaccccaccagcccaggaccagcccaggagccctgtgcccagcgccttcagtgaccagagccgctgcctgattgcccagaccacccctgtggccggcagccagagcctgagcagtggagctgtggccaccaccaccagcagcgctggggaccacaacggcatgctgtctgtgcctgcccctggggtgccccacagtgatgtgggggagcccccagccagcactggagcccagcagcccagcgccctggccgccctgcagcctgccaaggagcggcgcagcagcagcagcagcagcagcagcagcagcagcagcagcagcagcagcagcagcagcagcagcagcagcagcagcggcagcagcagcagtgacagcgagggcagcagcctgcctgtgcagcctgaggtggccctgaagagggtgcccagccccaccccagcccccaaggaggccgtgcgggagggccggcccccagagcccaccccagccaagaggaagagaagaagcagcagcagcagcagcagcagcagcagcagcagcagcagcagcagcagcagcagcagcagcagcagcagcagcagcagcagcagcagcagcagcagcagcagcagcagcagcagcagcagcagccccagccctgccaagccaggcccccaggccctgcccaagccagccagccccaagaagcccccacctggagagaggaggagccgcagccccaggaagcccatcgacagcctgcgggacagccgcagcctgagctacagccctgtggagaggagaagacccagcccccagcccagcccccgggaccagcagagcagcagcagcgagcggggcagccggcggggccagagaggagacagccgcagccccagccacaagagaagaagagagacccccagcccccggcccatgaggcacaggagcagccgcagcccctag

SEQ ID NO: 169262 - DNA, 936 bp, synthetic construct
  misc_feature 1..936: note = Description of Artificial Sequence: Synthetic coding sequence
  source 1..936: mol_type = other DNA
atgctgctggagaaggatgtgaaccctgggggcaaggaggagaccccaggccagaggcctgctgtgacagagacccaccagctggccgagctgaatgagaagaagaatgaaaggctgcgggccgccttcggcatcagtgacagctatgtggatggcagcagctttgacccccagaggcgggcccgggaggccaagcagcctgcccctgagccccccaagccctacagcctggtgcgggagagcagcagcagccgcagccccacccccaagcagaagaagaagaagaagaagaaggaccggggccgccgctctgagagcagcagcccccggcgggagaggaagaagagcagcaagaagaagaagcacaggtctgagagcgagagcaagaagaggaagcacaggagccccacccccaagagcaagaggaagagcaaggacaagaagaggaagaggagccgcagcaccaccccagcccccaagagccggcgggcccacaggagcaccagcgctgacagcgccagcagcagtgacaccagccgcagccgcagccgctctgctgctgccaagacccacaccacagccctggccggccgcagccccagccctgccagcggccggcggggggagggagatgcccccttcagcgagcccggcaccaccagcacccagaggcccagcagccctgagacagccaccaagcagcccagcagcccctatgaggacaaggacaaggacaagaaggagaagagcgccacccggcccagccccagccctgagaggagcagcactggacctgagcccccagcccccacccccctgctggccgagcggcacggcggcagcccccagcccctggccaccacccccctgagccaggagcctgtgaaccccagcccccagctgttcatgttcctgaagggcatcctggtgttctag

SEQ ID NO: 169263 - DNA, 2871 bp, synthetic construct
  misc_feature 1..2871: note = Description of Artificial Sequence: Synthetic coding sequence
  source 1..2871: mol_type = other DNA
agaagaagaaggctgcggcgggctgaccggcggggggaggccgccgcccctggcccccgggacagcggggcccgggctgctgctgctgcccggcccctgcccctgggcggcggcggcagaagaagaagagtgcggggctatgaggagcagcagatccaggagaaggtggccaccttccggctgatgctgctggagaaggatgtgaaccctgggggcaaggaggagaccccaggccagaggcctgctgtgacagagacccaccagctggccgagctgaatgagaagaagaatgaaaggctgcgggccgccttcggcatcagtgacagctatgtggatggcagcagctttgacccccagaggcgggcccgggaggccaagcagcctgcccctgagccccccaagccctacagcctggtgcgggagagcagcagcagccgcagccccacccccaagcagaagaagaagaagaagaagaaggaccggggcagaagaagtgagagcagcagcccccggcgggagaggaagaagagcagcaagaagaagaagcacaggtctgagagcgagagcaagaagaggaagcacaggagccccacccccaagagcaagaggaagagcaaggacaagaagaggaagaggagccgcagcaccaccccagcccccaagagcagaagagcccacaggagcaccagcgctgacagcgccagcagcagtgacaccagccgcagccgcagccgctctgctgctgccaagacccacaccacagccctggccggccgcagccccagccctgccagcggcagaagaggagaaggagatgcccccttcagcgagcccggcaccaccagcacccagaggcccagcagccctgagacagccaccaagcagcccagcagcccctatgaggacaaggacaaggacaagaaggagaagagcgccacccggcccagccccagccctgagaggagcagcacaggccctgagcccccagcccccacccccctgctggccgagagacatggaggcagcccccagcccctggccaccacccccctgagccaggagcctgtgaacccccccagcgaggccagccccacccgggacaggagcccccccaagagccctgagaagctgccccagagcagcagcagcgagagcagcccccccagcccccagcccaccaaggtgtccagacatgccagcagcagccctgagagccccaagccagccccagcccctggcagccaccgggagatcagcagcagccccaccagcaagaacagaagccacggccgggccaagagggacaagagccacagccacacccccagcaggaggatgggccgcagccgcagccctgccacagccaagaggggccgcagccgcagcaggacccccaccaagaggggccacagccgcagccgcagcccccagtggaggaggagccgcagcgcccagcgctggggccgcagccgcagcccccagaggcggggccgcagccgcagcccccagaggcctggctggagccgcagcaggaacacccagaggcggggccgcagccgcagcgcccggcggggccgcagccacagccgcagccctgccacccggggccgcagccgcagcaggaccccagcccggcggggccgcagccgcagcaggaccccagccaggagaagaagccgcagcaggacccccaccaggagaagaagccgcagcaggaccccagcccggcggggccgcagccgcagcaggaccccagcccggcggcgcagcaggaccaggagccctgtgagaagaagaagccgcagccgcagccctgccaggagaagtggccgcagccgcagcaggaccccagcccggcggggccgcagccgcagcaggaccccagcccggcggggccgcagccgcagcaggaccccagccaggagaagtggccgcagccgcagcaggaccccagcccggcggggccgcagccgcagcaggaccccaagaagaggccgcagccgcagccgcagcctggtgcggcggggccgcagccacagcaggaccccccagaggcggggccgcagcggcagcagcagcgagaggaagaacaagagcaggaccagccagaggaggagccgcagcaacagcagccctgagatgaagaagagccgcatcagcagccgccgcagccgcagcctgagcagccccaggagcaaggccaagagccggctgagcctgcggcgcagcctgagcggcagcagcccctgccccaagcagaagagccagaccccaccccggcgcagccgcagcggcagcagccagcccaaggccaagagcaggaccccaccccggcgcagccgcagcagcagcagccccccacccaagcagaagagcaagacccccagccggcagagccacagcagcagcagcccccaccccaaggtgaagagcggcaccccaccccggcagggcagcatcaccagcccccaggccaatgagcagagcgtgaccccccagaggaggagctgctttgagagcagcccagaccctgagctgaagagcaggacccccagccgccacagctgcagcggcagcagccccccccgggtgaagagcagcaccccaccccggcagagccccagccgcagcagcagcccccagcccaaggtgaaggccatcatcagcccccggcagaggagccacagcggcagcagcagccccagccccagccgggtgaccagcaggaccaccccaagaagaagccgctctgtgagcccctgcagcaatgtggagagccggctgctgccccgctacagccacagcggcagcagcagcccagacaccaaggtgaagccagagaccccaccccggcagagccacagcggctag

SEQ ID NO: 169264 - DNA, 6036 bp, synthetic construct
  misc_feature 1..6036: note = Description of Artificial Sequence: Synthetic coding sequence
  source 1..6036: mol_type = other DNA
atgaagaagagccgcatcagcagcagaagaagccgcagcctgagcagccccaggagcaaggccaagagccggctgagcctgcggcgcagcctgagcggcagcagcccctgccccaagcagaagagccagaccccaccaagaagaagccgcagcggcagcagccagcccaaggccaagagcaggaccccaccaagaagaagccgcagcagcagcagccccccacccaagcagaagagcaagacccccagccggcagagccacagcagcagcagcccccaccccaaggtgaagagcggcaccccaccccggcagggcagcatcaccagcccccaggccaatgagcagagcgtgaccccccagaggaggagctgctttgagagcagcccagaccctgagctgaagagcaggacccccagccgccacagctgcagcggcagcagccccccccgggtgaagagcagcaccccaccccggcagagccccagccgcagcagcagcccccagcccaaggtgaaggccatcatcagcccccggcagaggagccacagcggcagcagcagccccagccccagccgggtgaccagcaggaccaccccccggcgcagccgctctgtgagcccctgcagcaatgtggagagccggctgctgccccgctacagccacagcggcagcagcagcccagacaccaaggtgaagccagagaccccaccccggcagagccacagcggcagcatcagcccctaccccaaggtgaaggcccagaccccacctggccccagcctgagcggcagcaagagcccctgcccccaggagaagagcaaggacagcctggtgcagagctgccccggcagcctgagcctgtgtgccggcgtgaagagcagcaccccacctggagagagctactttggagtgagcagcctgcagctgaagggccagagccagaccagcccagaccacagaagtgacaccagcagccctgaggtgcggcagagccacagcgagagccccagcctgcagagcaagagccagaccagccccaagggcggccgcagccgcagcagcagccctgtgacagagctggccagccgcagccccatccggcaggacagaggagagttcagcgccagccccatgctgaagagcggcatgagccctgagcagagccgcttccagagcgacagcagcagctaccccaccgtggacagcaacagcctgctgggccagagccggctggagacagctgagagcaaggagaagatggccctgcccccccaggaggatgccacagccagccccccccggcagaaggacaagttcagccccttccctgtgcaggacaggcctgagagcagcctggtgttcaaggacaccctgcggaccccaccccgggagaggtctggggccggcagcagccctgagaccaaggagcagaacagcgccctgcccaccagcagccaggatgaggagctgatggaggtggtggagaagtctgaggagcctgctggccagatcctgagccacctgagcagcgagctgaaggagatgagcaccagcaactttgagagcagccctgaggtggaggagaggcctgctgtgtccctgaccctggaccagagccagagccaggccagcctggaggccgtggaggtgcccagcatggccagctcctggggcggcccccacttcagccctgagcacaaggagctgagcaacagccccctgcgggagaacagctttggcagccccctggagttcaggaacagcggccccctgggcacagagatgaacacaggcttcagcagcgaggtgaaggaggacctgaatggccccttcctgaaccagctggagacagaccccagcctggacatgaaggagcagagcaccaggagcagcggccacagcagcagcgagctgagcccagatgctgtggagaaggccggcatgagcagcaaccagagcatcagcagccctgtgctggatgctgtgcccaggacccccagccgggagaggagcagcagcgccagcagccctgagatgaaggatggcctgcccaggacccccagcagaagaagccgcagcggcagcagccctggcctgagagatggcagcggcacccccagccgccacagcctgagcggcagcagccctggcatgaaggacatccccaggacccccagccggggccgctcagaatgtgacagcagccctgagcccaaggccctgccccagaccccccggcccaggagccgcagccccagcagccctgagctgaacaacaagtgcctgaccccccagcgggagaggagcggcagcgagagctctgtggaccagaagacagtggcccggacccccctgggccagaggagccgcagcggcagcagccaggagctggatgtgaagcccagcgccagcccccaggagaggtctgagagtgacagcagcccagacagcaaggccaagaccaggacccccctgcggcagaggagccgcagcggcagcagccctgaggtggacagcaagagccggctgagcccccggcgcagccgcagcggcagcagccctgaggtgaaggacaagccccgggccgccccccgggcccagagcggcagtgacagcagccctgagcccaaggccccagccccccgggccctgccccggcgcagccgcagcggcagcagcagcaagggccggggccccagccctgagggcagcagcagcacagagagcagccctgagcacccccccaagagcaggacagcccggcggggcagccgcagcagccctgagcccaagaccaagagcaggaccccaccaagaagaagaagcagccgcagcagccctgagctgaccaggaaggcccggctgagcagaagaagccgcagcgccagcagcagccctgagaccaggagcaggaccccacccaggcacagaagaagccccagcgtgagcagccctgagcctgctgagaagagccgcagcagcagaagaagaagaagtgccagcagccccaggaccaagaccaccagccggcggggccgcagccccagccccaagccccggggcctgcagaggagccgcagccgcagccggcgggagaagaccaggaccaccaggagaagagacagaagtggcagcagccagagcaccagcagaagacggcagaggagccgcagccgcagccgggtgaccaggagaagaagaggaggcagcggctaccacagccgcagccctgcccggcaggagagcagcaggaccagcagcagaagaagaagaggccgcagcaggaccccacccaccagcaggaagaggagccgcagcaggaccagccctgccccctggaagaggagccgcagccgggccagccctgccacccaccggcgcagccgcagcaggacccccctcatcagcagaagaagaagccgcagcaggaccagccctgtgtccagaagaagaagccgcagcaggacctctgtgaccaggagaagaagccgcagccgggccagccctgtgtccagaagaagaagccgcagcaggaccccacctgtgaccaggagaagaagccgcagcaggacccccaccacccggcggcgcagccgcagcaggaccccacctgtgacccggcggcgcagccgcagcaggaccccacctgtgacccggcggcgcagccgcagcaggaccagccccatcacccggcggcgcagccgcagcaggaccagccctgtgacccggcggcgcagccgcagcaggaccagccctgtgacccggcggcgcagccgcagcaggaccagccctgtgacccggcggcgcagccgcagcaggaccccaccagccatcagaagaagaagccgcagcaggacccccctgctgcccaggaagaggagccgcagccgcagccccctggccatcagaagaagaagccgcagcaggacccccaggacagcccggggcaagaggagcctgaccaggagccccccagccatcagaagaagaagtgccagcggcagcagcagtgacaggagccgcagcgccaccccaccagccaccaggaaccacagcggcagcaggaccccacctgtggccctgaacagcagcaggatgagctgcttcagccggcccagcatgagccccacccccctggaccgctgccgcagccctggcatgctggagcccctgggcagcagcaggacccccatgtctgtgctgcagcaggccggcggctccatgatggatggccctggcccccgcatcccagaccaccagaggacctctgtgcctgagaaccacgcccagagcagaattgccctggccctgacagccatcagcctgggcacagcccggcccccacccagcatgtctgctgctggcctggccgccaggatgagccaggtgcctgcccctgtgcccctgatgagcctgaggacagccccagctgccaacctggccagccgcatcccagctgccagcgctgctgccatgaacctggccagcgcccggaccccagccatccccacagctgtgaacctggccgacagcaggaccccagctgctgctgctgccatgaacctggccagccccaggacagctgtggcccccagcgctgtgaacctggccgaccccaggacccccacagccccagctgtgaacctggccggggcccggaccccagctgccctggccgccctgagcctgaccggcagcggcaccccacccacagctgccaactaccccagcagcagcaggaccccccaggccccagccagcgccaacctggtgggccccaggtctgcccacgccacagcccctgtgaacattgctggcagcaggacagctgctgccctggccccagccagcctgaccagcgccaggatggccccagccctgagcggggccaacctgaccagcccccgggtgcccctgagcgcctatgaaagagtgtctggccgcaccagcccccccctgctggaccgggcccggagcaggaccccacccagcgcccccagccagagcaggatgaccagcgagcgggcccccagccccagcagcaggatgggccaggcccccagccagagcctgctgcccccagcccaggaccagcccaggagccctgtgcccagcgccttcagtgaccagagccgctgcctgattgcccagaccacccctgtggccggcagccagagcctgagcagtggagctgtggccaccaccaccagcagcgctggggaccacaacggcatgctgtctgtgcctgcccctggggtgccccacagtgatgtgggggagcccccagccagcactggagcccagcagcccagcgccctggccgccctgcagcctgccaaggagcggcgcagcagcagcagcagcagcagcagcagcagcagcagcagcagcagcagcagcagcagcagcagcagcagcagcagcggcagcagcagcagtgacagcgagggcagcagcctgcctgtgcagcctgaggtggccctgaagagggtgcccagccccaccccagcccccaaggaggccgtgcgggagggccggcccccagagcccaccccagccaagaggaagagaagaagcagcagcagcagcagcagcagcagcagcagcagcagcagcagcagcagcagcagcagcagcagcagcagcagcagcagcagcagcagcagcagcagcagcagcagcagcagcagcagcagcagccccagccctgccaagccaggcccccaggccctgcccaagccagccagccccaagaagcccccacctggagagaggagcctgctgcctgtgagccccagccccaggcacagcctgccccacgtggcccggggcaccttcctgaagaggaccagcggctacttcccccccctgcacaagagctttggcaccccctgtggcctgcaggacaaggccccacccctgcgggagtggagggtgcggctcttcaccaacggcccctgccccccctgtgtgctgctgctgcctgcccccacccacgccctgtgcagcagccacacccagaggctggccgtgtag

SEQ ID NO: 169265 - DNA, 1836 bp, synthetic construct
  misc_feature 1..1836: note = Description of Artificial Sequence: Synthetic coding sequence
  source 1..1836: mol_type = other DNA
atggcctctgtgcagcagggcgagaagcagctgtttgagaagttctggaggggcaccttcaaggctgtggccacccccaggcctgagagcatcatcgtggccagcatcacagccaggaagcccctgcccaggacagagccccagaacaaccctgtggtgcctgcccaggacggccccagcgagaagctgggccagcacctggccacagagcccctgggcaccaacagctgggagcgggacaagacctgccgggagctgggcgccacccggggccacagcgccagccatgacaaggacctgaccccaccacccagcagccggggcaagaagaagaagaagaagagcaccaggaagaagagaagaagaagcagcagctacagccccagccctgtgaagaagaagaagaagaagagcagcaagaagcacaagagaagaagaagcttcagcaagaagaggaggcacagcagcagcagccccaagagcaagagaagagatgagaagaggcacaagaagcagagccgcagccggcccaggaagagccaccgccaccgccaccaccgctgccccagccgcagccagagcagcgagagccggcccagcagctgtgagagccgccaccggggccgcagccctgaggagggccagaagagcagaagaagacacagccgccgctgcagcaagaccctgtgcaaggacagccctgaggcccagagcagcaggcctcccagccagcccctgcagatgctgggctacctgagcgcccggggcgtcatcactggaagtggcagcgctgctgacctcttcaccaagacagccagccccctgaccaccagccggggccgcagccaggagtatgattctggaaatgacaccagcagcccccccagcacccagaccagcagcgcccggagccggggccaggagaagggcagccccagcggcggcctgagcaagagccgggagctgaacagcggcaacaccagtgacagcggcaacagcttcaccaccagcagcccccagaacaagggggccatgctggagaacctgagccccaccagccggggccgggagagccggggcttccagagcccctgcctggagtgtgccgaggtgaagaagagcagcctggtgcccagcacagcccggagcagccccatgaagggctgcagccgcagcagcagctatgccagcaccaggagcagcagccacagcagccgcagccccaacccccgggccagcccccgctacacccagagccgcagcaccagcagcgagaagaggagctacagccgcagccccagctacagcagcaagagcggcaagaggagcccccccagccgcagcagccgcagccgccgcagccccagctacagccgctacagccccagccgggagcgggaccccaagtacagcgagaaggacagccagcagcgggagcgggagcgggccaggagaagaagaagaagctacagccccatgaggaagagaagaagagacagccccagccacctggaggcccggcgcatcaccagcgccaggaagaggcccatcccctactaccggcccagccccagcagcagcggcagcctgagcagcaccagctcctggtacagcagcagcagcagccgcagcgccagccgcagctacagccgcagccgcagccgcagccgcagcagaagaagaagcaggaccaggaccagcagcagcagcagcagccgcagccccagccctggcagccgcagccgcagccgcagccgcagccgcagccgcagccgcagccgcagccagagccgcagctacagcagcgctgacagctacagcagcaccaggaggtag

SEQ ID NO: 169266 - DNA, 747 bp, synthetic construct
  misc_feature 1..747: note = Description of Artificial Sequence: Synthetic coding sequence
  source 1..747: mol_type = other DNA
atgtctgggggcggcgtcatccggggccctgctggcaacaatgactgccgcatctacgtgggcaacctgcccccagacatccgcaccaaggacattgaagatgtgttctacaagtatggagccatccgggacatcgacctgaagaacagaagaggaggccccccatttgcctttgtggagtttgaggaccccagagatgctgaagatgctgtgtatggaagagatggctatgactatgatggctaccgcctgcgggtggagttccccaggagcggccggggcaccggccggggcggcggcggcggcggcggcggcggggccccccggggccgctatggcccccccagcagaagaagtgagaacagagtggtggtgtctggcctgcccccatctggctcctggcaggacctgaaggaccacatgagggaggccggagatgtgtgctacgcagatgtgtacagagatggcactggagtggtggagtttgtgaggaaggaggacatgacctatgctgtgaggaagctggacaacaccaagttccgcagccatgaaggagaaacagcctacatccgggtgaaggtggatggccccaggagccccagctatggccgcagccgcagccgcagccgcagccgcagccgcagccgcagccgcagcaacagccgcagccgcagctacagccccaggaggagccggggcagcccccgctacagccccaggcacagccgcagccgcagcaggacatag

SEQ ID NO: 169267 - DNA, 606 bp, synthetic construct
  misc_feature 1..606: note = Description of Artificial Sequence: Synthetic coding sequence
  source 1..606: mol_type = other DNA
atgtctgggggcggcgtcatccggggccctgctggcaacaatgactgccgcatctacgtgggcaacctgcccccagacatccgcaccaaggacattgaagatgtgttctacaagtatggagccatccgggacatcgacctgaagaacagaagaggaggccccccatttgcctttgtggagtttgaggaccccagagatgctgaagatgctgtgtatggaagagatggctatgactatgatggctaccgcctgcgggtggagttccccaggagcggccggggcaccggccggggcggcggcggcggcggcggcggcggggccccccggggccgctatggcccccccagcagaagaagtgagaacagagtggtggtgtctggcctgcccccatctggctcctggcaggacctgaaggaccacatgagggaggccggagatgtgtgctacgcagatgtgtacagagatggcactggagtggtggagtttgtgaggaaggaggacatgacctatgctgtgaggaagctggacaacaccaagttccgcagccatgaggtgggctacacccgcatcctcttctttgaccagaactggatccagtggagctag

SEQ ID NO: 169268 - DNA, 786 bp, synthetic construct
  misc_feature 1..786: note = Description of Artificial Sequence: Synthetic coding sequence
  source 1..786: mol_type = other DNA
atgagccgctacctgcggccccccaacaccagcctgtttgtgagaaatgtggctgatgacaccaggtctgaggacctgcggcgggagtttggccgctatggccccatcgtggatgtgtatgtgcccctggacttctacacccggcggccccggggctttgcctacgtgcagtttgaagatgtgagagatgctgaagatgccctgcacaacctggacaggaagtggatctgtggccggcagatcgagatccagtttgcccagggcgacaggaagacccccaaccagatgaaggccaaggagggcagaaatgtgtacagcagcagccgctatgatgattatgaccgctacagaagaagccgcagccgctcctatgaaagaagaagaagccgcagccgcagctttgactacaactacagaagaagctacagccccaggaaccggcccaccggccggcccaggaggagccgcagccacagcgacaatgaccgcttcaagcacaggaacagaagcttcagccgcagcaagagcaacagccgcagccgcagcaagagccagcccaagaaggagatgaaggccaagagccgcagccgcagcgccagccacaccaagacccggggcaccagcaagacagacagcaagacccactacaagagcggcagccgctatgagaaggagagcaggaagaaggagcccccaagaagcaagagccagagccgcagccagagccgcagccgcagcaagagccgcagccgctcctggaccagccccaagagcagcggccactag

SEQ ID NO: 169269 - DNA, 552 bp, synthetic construct
  misc_feature 1..552: note = Description of Artificial Sequence: Synthetic coding sequence
  source 1..552: mol_type = other DNA
atgagccgctacctgcggccccccaacaccagcctgtttgtgagaaatgtggctgatgacaccaggtctgaggacctgcggcgggagtttggccgctatggccccatcgtggatgtgtatgtgcccctggacttctacacccggcggccccggggctttgcctacgtgcagtttgaagatgtgagagatgctgaagatgccctgcacaacctggacaggaagtggatctgtggccggcagatcgagatccagtttgcccagggcgacaggaagacccccaaccagatgaaggccaaggagggcagaaatgtgtacagcagcagccgctatgatgattatgaccgctacagaagaagccgcagccgctcctatgaaagaagaagaagccgcagccgcagctttgactacaactacagaagaagctacagccccaggaacagccggcccaccggccggccccggcgcagccgcagccacagcgacaatgaccggcccaactgctcctggaacacccagtacagcagcgcctactacaccagcaggaagatctag

SEQ ID NO: 169270 - DNA, 522 bp, synthetic construct
  misc_feature 1..522: note = Description of Artificial Sequence: Synthetic coding sequence
  source 1..522: mol_type = other DNA
atgagccgctacctgcggccccccaacaccagcctgtttgtgagaaatgtggctgatgacaccaggtctgaggacctgcggcgggagtttggccgctatggccccatcgtggatgtgtatgtgcccctggacttctacacccggcggccccggggctttgcctacgtgcagtttgaagatgtgagagatgctgaagatgccctgcacaacctggacaggaagtggatctgtggccggcagatcgagatccagtttgcccagggcgacaggaagacccccaaccagatgaaggccaaggagggcagaaatgtgtacagcagcagccgctatgatgattatgaccgctacagaagaagccgcagccgctcctatgaaagaagaagaagccgcagccgcagctttgactacaactacagaagaagctacagccccaggaacagccggcccaccggccggccccggcgcagccgcagccacagcgacaatgacagccaggtgtccaagaagaagaatgaaagatag

SEQ ID NO: 169271 - DNA, 519 bp, synthetic construct
  misc_feature 1..519: note = Description of Artificial Sequence: Synthetic coding sequence
  source 1..519: mol_type = other DNA
atgagccgctacctgcggccccccaacaccagcctgtttgtgagaaatgtggctgatgacaccaggtctgaggacctgcggcgggagtttggccgctatggccccatcgtggatgtgtatgtgcccctggacttctacacccggcggccccggggctttgcctacgtgcagtttgaagatgtgagagatgctgaagatgccctgcacaacctggacaggaagtggatctgtggccggcagatcgagatccagtttgcccagggcgacaggaagacccccaaccagatgaaggccaaggagggcagaaatgtgtacagcagcagccgctatgatgattatgaccgctacagaagaagccgcagccgctcctatgaaagaagaagaagccgcagccgcagctttgactacaactacagaagaagctacagccccaggaaccggcccaccggccggcccaggaggagccgcagccacagcgacaatgacagccaggtgtccaagaagaagaatgaaagatag

SEQ ID NO: 169272 - DNA, 498 bp, synthetic construct
  misc_feature 1..498: note = Description of Artificial Sequence: Synthetic coding sequence
  source 1..498: mol_type = other DNA
atgagccgctacctgcggccccccaacaccagcctgtttgtgagaaatgtggctgatgacaccaggtctgaggacctgcggcgggagtttggccgctatggccccatcgtggatgtgtatgtgcccctggacttctacacccggcggccccggggctttgcctacgtgcagtttgaagatgtgagagatgctgaagatgccctgcacaacctggacaggaagtggatctgtggccggcagatcgagatccagtttgcccagggcgacaggaagacccccaaccagatgaaggccaaggagggcagaaatgtgtacagcagcagccgctatgatgattatgaccgctacagaagaagccgcagccgctcctatgaaagaagaagaagccgcagccgcagctttgactacaactacagaagaagctacagccccaggaagcccaactgctcctggaacacccagtacagcagcgcctactacaccagcaggaagatctag

SEQ ID NO: 169273 - DNA, 549 bp, synthetic construct
  misc_feature 1..549: note = Description of Artificial Sequence: Synthetic coding sequence
  source 1..549: mol_type = other DNA
atgagccgctacctgcggccccccaacaccagcctgtttgtgagaaatgtggctgatgacaccaggtctgaggacctgcggcgggagtttggccgctatggccccatcgtggatgtgtatgtgcccctggacttctacacccggcggccccggggctttgcctacgtgcagtttgaagatgtgagagatgctgaagatgccctgcacaacctggacaggaagtggatctgtggccggcagatcgagatccagtttgcccagggcgacaggaagacccccaaccagatgaaggccaaggagggcagaaatgtgtacagcagcagccgctatgatgattatgaccgctacagaagaagccgcagccgctcctatgaaagaagaagaagccgcagccgcagctttgactacaactacagaagaagctacagccccaggaaccggcccaccggccggcccaggaggagccgcagccacagcgacaatgaccggcccaactgctcctggaacacccagtacagcagcgcctactacaccagcaggaagatctag

SEQ ID NO: 169274 - DNA, 789 bp, synthetic construct
  misc_feature 1..789: note = Description of Artificial Sequence: Synthetic coding sequence
  source 1..789: mol_type = other DNA
atgagccgctacctgcggccccccaacaccagcctgtttgtgagaaatgtggctgatgacaccaggtctgaggacctgcggcgggagtttggccgctatggccccatcgtggatgtgtatgtgcccctggacttctacacccggcggccccggggctttgcctacgtgcagtttgaagatgtgagagatgctgaagatgccctgcacaacctggacaggaagtggatctgtggccggcagatcgagatccagtttgcccagggcgacaggaagacccccaaccagatgaaggccaaggagggcagaaatgtgtacagcagcagccgctatgatgattatgaccgctacagaagaagccgcagccgctcctatgaaagaagaagaagccgcagccgcagctttgactacaactacagaagaagctacagccccaggaacagccggcccaccggccggccccggcgcagccgcagccacagcgacaatgaccgcttcaagcacaggaacagaagcttcagccgcagcaagagcaacagccgcagccgcagcaagagccagcccaagaaggagatgaaggccaagagccgcagccgcagcgccagccacaccaagacccggggcaccagcaagacagacagcaagacccactacaagagcggcagccgctatgagaaggagagcaggaagaaggagccccccaggagcaagagccagagccgcagccagagccgcagccgcagcaagagccgcagccgctcctggaccagccccaagagcagcggccactag

SEQ ID NO: 169275 - DNA, 1275 bp, synthetic construct
  misc_feature 1..1275: note = Description of Artificial Sequence: Synthetic coding sequence
  source 1..1275: mol_type = other DNA
atgatcaacaaccacaggaaccaggccctgtacttcagcgagcacaagtacttccagcagacccaggtggtgtaccagggcgacatcttctgggtgttcctgtgtgtgttctgcctgaggaaagaatgtgtgctgatgcagggctgcttctctgctggggtcatcccagatgaggccaaggccctgagcctgctggccccagccaatgctgtggccggcctgctgcccggcggcggcctgctgcccacccccaaccccctgacccagatcggggctgtgcccctggccgccctgggcgcccccaccctggaccctgccctggccgccctgggcctgcccggggccaacctgaacagccagagcctggccgctgaccagctgctgaagctgatgagcacagtggaccccaagctgaaccacgtggccgccggcctggtgagccccagcctgaagagtgacaccagcagcaaggagattgaggaggccatgaagagggtgcgggaggcccagagcctcatctctgctgccattgaaccagacaagaaggaggagaagaggaggcacagccgcagccgcagccgcagcagaagaagaaggacccccagcagcagccgccacagaagaagccgcagccgcagcagaagaagaagccacagcaagagccgcagcagaagaagaagcaagagccccaggagaagaagaagccacagccgggagcggggccgccgcagccgcagcaccagcaagacccgggacaagaagaaggaggacaaggagaagaagaggagcaagaccccacccaagagctacagcacagcccggcgcagccgcagcgccagccgggagaggagaagaagaagaagccgcagcggcaccaggagccccaagaagcccaggagccccaagaggaagctgagccgcagccccagcccccggcggcacaagaaggagaagaagaaggacaaggacaaggagaggagcagagatgagcgggagaggagcaccagcaagaagaagaagagcaaggacaaggagaaggaccgggagaggaagtctgagagtgacaaggatgtgaagcaggtgacccgggactatgatgaggaggagcagggctatgacagcgagaaggagaagaaggaggagaagaagcccattgaaacaggcagccccaagaccaaggagtgcagcgtggagaagggcactggagacagcctgcgggagagcaaggtgaatggagatgaccaccacgaggaggacatggacatgtctgactag

SEQ ID NO: 169276 - DNA, 1455 bp, synthetic construct
  misc_feature 1..1455: note = Description of Artificial Sequence: Synthetic coding sequence
  source 1..1455: mol_type = other DNA
atgagcaacaccaccgtggtgcccagcacagctggccctggccccagcggcggccctgggggcggcggcggcggcggcggcggcggcggcggcacagaggtgatccaggtgaccaacgtgagccccagcgccagcagcgagcagatgaggaccctgtttggcttcctgggcaagattgatgagctgcggctcttccccccagatgacagccccctgcctgtgagcagccgggtgtgctttgtgaagttccatgaccctgacagcgctgtggtggcccagcacctgaccaacacagtgtttgtggaccgggccctgattgtggtgccctatgcagagggcgtcatcccagatgaggccaaggccctgagcctgctggccccagccaatgctgtggccggcctgctgcccggcggcggcctgctgcccacccccaaccccctgacccagatcggggctgtgcccctggccgccctgggcgcccccaccctggaccctgccctggccgccctgggcctgcccggggccaacctgaacagccagagcctggccgctgaccagctgctgaagctgatgagcacagtggaccccaagctgaaccacgtggccgccggcctggtgagccccagcctgaagagtgacaccagcagcaaggagattgaggaggccatgaagagggtgcgggaggcccagagcctcatctctgctgccattgaaccagacaagaaggaggagaagaggaggcacagccgcagccgcagccgcagcagaagaagaaggacccccagcagcagccgccacagaagaagccgcagccgcagcagaagaagaagccacagcaagagccgcagcagaagaagaagcaagagccccaggagaagaagaagccacagccgggagcggggccgccgcagccgcagcaccagcaagacccgggacaagaagaaggaggacaaggagaagaagaggagcaagaccccacccaagagctacagcacagcccggcgcagccgcagcgccagccgggagaggagaagaagaagaagccgcagcggcaccaggagccccaagaagcccaggagccccaagaggaagctgagccgcagccccagcccccggcggcacaagaaggagaagaagaaggacaaggacaaggagaggagcagagatgagcgggagaggagcaccagcaagaagaagaagagcaaggacaaggagaaggaccgggagaggaagtctgagagtgacaaggatgtgaagcaggtgacccgggactatgatgaggaggagcagggctatgacagcgagaaggagaagaaggaggagaagaagcccattgaaacaggcagccccaagaccaaggagtgcagcgtggagaagggcactggagacagcctgcgggagagcaaggtgaatggagatgaccaccacgaggaggacatggacatgtctgactag

SEQ ID NO: 169277 - DNA, 1452 bp, synthetic construct
  misc_feature 1..1452: note = Description of Artificial Sequence: Synthetic coding sequence
  source 1..1452: mol_type = other DNA
atgagcaacaccaccgtggtgcccagcacagctggccctggccccagcggcggccctgggggcggcggcggcggcggcggcggcggcggcggcacagaggtgatccaggtgaccaacgtgagccccagcgccagcagcgagcagatgaggaccctgtttggcttcctgggcaagattgatgagctgcggctcttccccccagatgacagccccctgcctgtgagcagccgggtgtgctttgtgaagttccatgaccctgacagcgctgtggtggcccagcacctgaccaacacagtgtttgtggaccgggccctgattgtggtgccctatgcagagggcgtcatcccagatgaggccaaggccctgagcctgctggccccagccaatgctgtggccggcctgctgcccggcggcggcctgctgcccacccccaaccccctgacccagatcggggctgtgcccctggccgccctgggcgcccccaccctggaccctgccctggccgccctgggcctgcccggggccaacctgaacagccagagcctggccgctgaccagctgctgaagctgatgagcacagtggaccccaagctgaaccacgtggccgccggcctggtgagccccagcctgaagagtgacaccagcagcaaggagattgaggaggccatgaagagggtgcgggaggcccagagcctcatctctgctgccattgaaccagacaagaaggaggagaagaggaggcacagccgcagccgcagccgcagcagaagaagaaggacccccagcagcagccgccacagaagaagccgcagccgcagcagaagaagaagccacagcaagagccgcagcagaagaagaagcaagagccccaggagaagaagaagccacagccgggagcggggccgccgcagccgcagcaccagcaagacccgggacaagaagaaggaggacaaggagaagaagaggagcaagaccccacccaagagctacagcacagcccggcgcagccgcagcgccagccgggagaggagaagaagaagaagccgcagcggcaccaggagccccaagaagcccaggagccccaagaggaagctgagccgcagccccagcccccggcggcacaagaaggagaagaagaaggacaaggacaaggagaggagcagagatgagcgggagaggagcaccagcaagaagaagaagagcaaggacaaggagaaggaccgggagaggaagtctgagagtgacaaggatgtgaaggtgacccgggactatgatgaggaggagcagggctatgattctgagaaggagaagaaggaggagaagaagcccatcgagaccggcagccccaagaccaaggaatgttctgtggagaagggcaccggggacagcctgcgggagagcaaggtgaatggagatgaccaccacgaggaggacatggacatgtctgactag

SEQ ID NO: 169278 - DNA, 1170 bp, synthetic construct
  misc_feature 1..1170: note = Description of Artificial Sequence: Synthetic coding sequence
  source 1..1170: mol_type = other DNA
atgagcaacaccaccgtggtgcccagcacagctggccctggccccagcggcggccctgggggcggcggcggcggcggcggcggcggcggcggcacagaggtgatccaggtgaccaacgtgagccccagcgccagcagcgagcagatgaggaccctgtttggcttcctgggcaagattgatgagctgcggctcttccccccagatgacagccccctgcctgtgagcagccgggtgtgctttgtgaagttccatgaccctgacagcgctgtggtggcccagcacctgaccaacacagtgtttgtggaccgggccctgattgtggtgccctatgcagagggcgtcatcccagatgaggccaaggccctgagcctgctggccccagccaatgctgtggccggcctgctgcccggcggcggcctgctgcccacccccaaccccctgacccagatcggggctgtgcccctggccgccctgggcgcccccaccctggaccctgccctggccgccctgggcctgcccggggccaacctgaacagccagagcctggccgctgaccagctgctgaagctgatgagcacagtggaccccaagctgaaccacgtggccgccggcctggtgagccccagcctgaagagtgacaccagcagcaaggagattgaggaggccatgaagagggtgcgggaggcccagagcctcatctctgctgccattgaaccagacaagaaggaggagaagaggaggcacagccgcagccgcagccgcagcagaagaagaaggacccccagcagcagccgccacagaagaagccgcagccgcagcagaagaagaagccacagcaagagccgcagcagaagaagaagcaagagccccaggagaagaagaagccacagccgggagcggggccgccgcagccgcagcaccagcaagacccgggacaagaagaaggaggacaaggagaagaagaggagcaagaccccacccaagagctacagcacagcccggcgcagccgcagcgccagcagcctgcacatctgtgacagccgggagaggagaagaagaagaagccgcagcggcaccaggagccccaagaagcccaggagccccaagaggaagctgagccgcagccccagccccaggaggcacaagaaggagaagaagaaggacaagtag

SEQ ID NO: 169279 - DNA, 1455 bp, synthetic construct; identical to SEQ ID NO: 169276
  misc_feature 1..1455: note = Description of Artificial Sequence: Synthetic coding sequence
  source 1..1455: mol_type = other DNA

SEQ ID NO: 169280 - DNA, 387 bp, synthetic construct
  misc_feature 1..387: note = Description of Artificial Sequence: Synthetic coding sequence
  source 1..387: mol_type = other DNA
atgagcaacaccaccgtggtgcccagcacagctggccctggccccagcggcggccctgggggcggcggcggcggcggcggcggcggcggcggcacagaggtgatccaggtgaccaacgtgagccccagcgccagcagcgagcagatgaggaccctgtttggcttcctgggcaagattgatgagctgcggctcttccccccagatgacagccccctgcctgtgagcagccgggtgtgctttgtgaagttccatgaccctgacagcgctgtggtggcccagcacctgaccaacacagtgtttgtggaccgggccctgattgtggtgccctatgcagaggtgaagcagcccaccagggtggtggtgcacaagacagcctttgagagctag

SEQ ID NO: 169281 - DNA, 396 bp, synthetic construct
  misc_feature 1..396: note = Description of Artificial Sequence: Synthetic coding sequence
  source 1..396: mol_type = other DNA
atgagcaacaccaccgtggtgcccagcacagctggccctggccccagcggcggccctgggggcggcggcggcggcggcggcggcggcggcggcacagaggtgatccaggtgaccaacgtgagccccagcgccagcagcgagcagatgaggaccctgtttggcttcctgggcaagattgatgagctgcggctcttccccccagatgacagccccctgcctgtgagcagccgggtgtgctttgtgaagttccatgaccctgacagcgctgtggtggcccagcacctgaccaacacagtgtttgtggaccgggccctgattgtggtgccctatgcagaggtgttccacggcagcatcaaggctgctgtgaagaagatcctgctgacccatgagaactag

SEQ ID NO: 169282 - DNA, 630 bp, synthetic construct
  misc_feature 1..630: note = Description of Artificial Sequence: Synthetic coding sequence
  source 1..630: mol_type = other DNA
atgaccagcctgaaggtggacaacctgacctaccgcaccagcccagacaccctgcggcgggtgtttgagaagtatggccgggtgggagatgtgtacatcccccgggaccgctacaccaaggagagccggggctttgcctttgtgcgcttccatgacaagagagatgctgaagatgccatggatgccatggatggagctgtgctggatggccgggagctgcgggtgcagatggcccgctatggccggcccccagacagccaccacagccggcggggccccccaccccggcgctatggaggcggcggctatggaagaagaagccgcagccccaggagaagaagaagaagccgcagccgcagccgcagccgcagccgcagccgcagccgcagccgctacagccgcagcaagagccgcagcaggaccaggagccgcagccgcagcaccagcaagagccgcagcgcccggcgcagcaagagcaagagcagctctgtgagccgcagccgcagccgcagccgcagccgcagccgcagccgcagccccccacctgtgtccaagcgggagagcaagagccgcagccgcagcaagagcccccccaagagccctgaggaggagggcgctgtgagcagctag

SEQ ID NO: 169283 - DNA, 606 bp, synthetic construct
  misc_feature 1..606: note = Description of Artificial Sequence: Synthetic coding sequence
  source 1..606: mol_type = other DNA
atgtcctatggccggcccccaccagatgtggagggcatgaccagcctgaaggtggacaacctgacctaccgcaccagcccagacaccctgcggcgggtgtttgagaagtatggccgggtgggagatgtgtacatcccccgggaccgctacaccaaggagagccggggctttgcctttgtgcgcttccatgacaagagagatgctgaagatgccatggatgccatggatggagctgtgctggatggccgggagctgcgggtgcagatggcccgctgtggcggctatggaagaagaagccgcagccccaggagaagaagaagaagccgcagccgcagccgcagccgcagccgcagccgcagccgcagccgctacagccgcagcaagagccgcagcaggaccaggagccgcagccgcagcaccagcaagagccgcagcgcccggcgcagcaagagcaagagcagctctgtgagccgcagccgcagccgcagccgcagccgcagccgcagccgcagccccccacctgtgtccaagcgggagagcaagagccgcagccgcagcaagagcccccccaagagccctgaggaggagggcgctgtgagcagctag

SEQ ID NO: 169284 - DNA, 666 bp, synthetic construct
  misc_feature 1..666: note = Description of Artificial Sequence: Synthetic coding sequence
  source 1..666: mol_type = other DNA
atgtcctatggccggcccccaccagatgtggagggcatgaccagcctgaaggtggacaacctgacctaccgcaccagcccagacaccctgcggcgggtgtttgagaagtatggccgggtgggagatgtgtacatcccccgggaccgctacaccaaggagagccggggctttgcctttgtgcgcttccatgacaagagagatgctgaagatgccatggatgccatggatggagctgtgctggatggccgggagctgcgggtgcagatggcccgctatggccggcccccagacagccaccacagccggcggggccccccaccccggcgctatggaggcggcggctatggaagaagaagccgcagccccaggagaagaagaagaagccgcagccgcagccgcagccgcagccgcagccgcagccgcagccgctacagccgcagcaagagccgcagcaggaccaggagccgcagccgcagcaccagcaagagccgcagcgcccggcgcagcaagagcaagagcagctctgtgagccgcagccgcagccgcagccgcagccgcagccgcagccgcagccccccacctgtgtccaagcgggagagcaagagccgcagccgcagcaagagcccccccaagagccctgaggaggagggcgctgtgagcagctag

SEQ ID NO: 169285 - DNA, 540 bp, synthetic construct
  misc_feature 1..540: note = Description of Artificial Sequence: Synthetic coding sequence
  source 1..540: mol_type = other DNA
atgtcctatggccggcccccaccagatgtggagggcatgaccagcctgaaggtggacaacctgacctaccgcaccagcccagacaccctgcggcgggtgtttgagaagtatggccgggtgggagatgtgtacatcccccgggaccgctacaccaaggagagccggggctttgcctttgtgcgcttccatgacaagagagatgctgaagatgccatggatgccatggatggagctgaccccggggtgggcgtggtgcccggcctggccgctgacctggccacagctgcccggagcctgggccctgccctggtgctggacctgggccggccccccagcccagacccccatgagggccccagccccagcccccggcgcagcccagacctggtgcggggccctggccctggcctgggccctggggtgctgccccagtgcccccggggcaaccccaaccctggccgggaccggcgggtgccccccagcctgctgaagaggaaggagcgctgccccctgaagaagatgctgcggagccctgtgtag

SEQ ID NO: 169286 - DNA, 669 bp, synthetic construct
  misc_feature 1..669: note = Description of Artificial Sequence: Synthetic coding sequence
  source 1..669: mol_type = other DNA
cctgagaggagaggagtggccccacccagggctgaggaggccggggccagcagccggggcagcggcccccccctgcgggccatgtcctatggccggcccccaccagatgtggagggcatgaccagcctgaaggtggacaacctgacctaccgcaccagcccagacaccctgcggcgggtgtttgagaagtatggccgggtgggagatgtgtacatcccccgggaccgctacaccaaggagagccggggctttgcctttgtgcgcttccatgacaagagagatgctgaagatgccatggatgccatggatggagctgtgctggatggccgggagctgcgggtgcagatggcccgctatggccggcccccagacagccaccacagcagaagaggccccccaccaagaagatatggaggcggcggctacggccgccgcagccgcagccccaggagaagaagaagaagccgcagccgcagccgcagccgcagccgcagccgcagccgcagccgctacagccgcagcaagagccgcagcaggaccaggagccgcagccgcagcaccagcaagagccgcagcgcccggcgcagcaagagcaagagcagctctgtgagccgcagccgcagccgcagccgcagccgcagccgcagccgcagccccccacctgtgtag

SEQ ID NO: 169287 - DNA, 375 bp, synthetic construct
  misc_feature 1..375: note = Description of Artificial Sequence: Synthetic coding sequence
  source 1..375: mol_type = other DNA
atgcaccgggacagctgccccctggactgcaaggtgtatgtgggcaacctgggcaacaacggcaacaagacagagctggagcgggccttcggctactacggccccctgcggtctgtgtgggtggccagaaatcctcctggctttgcctttgtggagtttgaggaccccagagatgctgctgatgctgtgcgggagctggatggccgcaccctgtgtggctgccgggtgcgggtggagctgagcaatggagagaagaggagcaggaacagaggccccccacccagctggggccggcggcccagagatgactacagaagaagaagccccccacccaggagaagagtgaccatcatgagcctgctgaccaccctgtag

SEQ ID NO: 169288 - DNA, 495 bp, synthetic construct
  misc_feature 1..495: note = Description of Artificial Sequence: Synthetic coding sequence
  source 1..495: mol_type = other DNA
atgcaccgggacagctgccccctggactgcaaggtgtatgtgggcaacctgggcaacaacggcaacaagacagagctggagcgggccttcggctactacggccccctgcggtctgtgtgggtggccagaaatcctcctggctttgcctttgtggagtttgaggaccccagagatgctgctgatgctgtgcgggagctggatggccgcaccctgtgtggctgccgggtgcgggtggagctgagcaatggagagaagaggagcaggaacagaggccccccacccagctggggccggcggcccagagatgactacagaagaagaagccccccacccaggagaagaagcccccggcggcgctccttcagccgcagccgcagccgcagcctgagccgggacagaagaagagagaggagcctgagccgggagaggaaccacaagcccagccgctccttcagccgcagccgcagccgcagccgcagcaatgaaaggaagtag

SEQ ID NO: 169289 - DNA, 1485 bp, synthetic construct
  misc_feature 1..1485: note = Description of Artificial Sequence: Synthetic coding sequence
  source 1..1485: mol_type = other DNA
atgccccgggtgtacatcggccgcctgagctaccaggcccgggagagagatgtggagcgcttcttcaagggctacggcaagatcctggaggtggacctgaagaatggctacggctttgtggagtttgatgacctgagagatgctgatgatgctgtgtatgagctgaatggcaaggacctgtgtggggagagggtcatcgtggagcacgcccggggccccaggagagatggcagctatggcagcggccgcagcggctacggctacagaagaagtggccgggacaagtatggcccccccaccaggacagagtaccgcctgattgtggagaacctgagcagccgctgctcctggcaggacctgaaggactacatgaggcaggccggggaggtgacctatgcagatgcccacaagggcaggaagaatgaaggagtgattgaatttgtgtcctacagcgacatgaagagggccctggagaagctggatggaacagaggtgaatggaaggaagatccggctggtggaggacaagccaggcagcagaagaagaagaagctacagccgcagccgcagccacagccgcagccgcagccgcagccgccacagcaggaagagccgcagccgcagcggcagcagcaagagcagccacagcaagagccgcagccgcagccgcagcggcagccgcagccgcagcaagagccgcagccgcagccagagccgcagccgcagcaagaaggagaagagccgcagccccagcaaggagaagagccgcagccgcagccacagcgctgggaagagccgcagcaagagcaaggaccaggccgaggagaagatccagaacaatgacaacgtgggcaagcccaagagccgcagccccagccgccacaagagcaagagcaagagccgcagccgcagccaggagaggagagtggaggaggagaagaggggctctgtgtcccggggccgcagccaggagaagagcctgcggcagagccgcagccgcagccgcagcaaaggaggcagccgcagccgcagccgcagccgcagcaagagcaaggacaagaggaaaggaaggaagaggagccgggaggagagccgcagccgcagccgcagccgcagcaagtctgagaggagcaggaagaggggcagcaagagggacagcaaggccggcagcagcaagaagaagaagaaggaggacacagacaggagccagagccgcagccccagccgctctgtgtccaaggagcgggagcacgccaagtctgagagcagccagcgggagggccgcggggagagtgaaaatgccggcaccaaccaggagaccaggagccgcagccgcagcaacagcaagagcaagcccaacctgcccagcgagagccgcagccgcagcaagagcgccagcaagaccaggagccgcagcaagagccgcagccgcagcgccagccgcagccccagccgcagccgcagccgcagccacagccgctcctag

SEQ ID NO: 169290 - DNA, 1221 bp, synthetic construct
  misc_feature 1..1221: note = Description of Artificial Sequence: Synthetic coding sequence
  source 1..1221: mol_type = other DNA
atgccccgggtgtacatcggccgcctgagctaccaggcccgggagagagatgtggagcgcttcttcaagggctacggcaagatcctggaggtggacctgaagaatggctacggctttgtggagtttgatgacctgagagatgctgatgatgctgtgtatgagctgaatggcaaggacctgtgtggggagagggtcatcgtggagcacgcccggggccccaggagagatggcagctatggcagcggccgcagcggctacggctacagaagaagtggccgggacaagtatggcccccccaccaggacagagtaccgcctgattgtggagaacctgagcagccgctgctcctggcaggacctgaaggactacatgaggcaggccggggaggtgacctatgcagatgcccacaagggcaggaagaatgaaggagtgattgaatttgtgtcctacagcgacatgaagagggccctggagaagctggatggaacagaggtgaatggaaggaagatccggctggtggaggacaagccaggcagcagaagaagaagaagctacagccgcagccgcagccacagccgcagccgcagccgcagccgccacagcaggaagagccgcagccgcagcggcagcagcaagagcagccacagcaagagccgcagccgcagccgcagcggcagccgcagccgcagcaagagccgcagccgcagccagagccgcagccgcagcaagaaggagaagagccgcagccccagcaaggagaagagccgcagccgcagccacagcgctgggaagagccgcagcaagagcaaggaccaggccgaggagaagatccagaacaatgacaacgtgggcaagcccaagagccgcagccccagccgccacaagagcaagagcaagagccgcagccgcagccaggagaggagagtggaggaggagaagaggggctctgtgtcccggggccgcagccaggagaagagcctgcggcagagccgcagccgcagccgcagcaaaggaggcagccgcagccgcagccgcagccgcagcaagagcaaggacaagaggaaaggaaggaagaggagccgggaggagagccgcagccgcagccgcagccgcagcaagtctgagaggagcaggaagaggggcagcctggccttccggcccggcctgagctaccgggagctgagcaacctggatggcagcaaggccggcatgaccacctag

SEQ ID NO: 169291 - DNA, 477 bp, synthetic construct
  misc_feature 1..477: note = Description of Artificial Sequence: Synthetic coding sequence
  source 1..477: mol_type = other DNA
atgccccgggtgtacatcggccgcctgagctaccaggcccgggagagagatgtggagcgcttcttcaagggctacggcaagatcctggaggtggacctgaagaatggctacggctttgtggagtttgatgacctgagagatgctgatgatgctgtgtatgagctgaatggcaaggacctgtgtggggagagggtcatcgtggagcacgcccggggccccaggagagatggcagctatggcagcggccgcagcggctacggctacagaagaagtggccgggacaagtatggcccccccaccaggacagagtaccgcctgattgtggagaacctgagcagccgctgctcctggcaggacctgaaggtgggcctgcccctgcctgagcaggagcctgagcctgagcctgagagcgagcctgagcaggagcgggagaagcaggagccccagcagggcaaggagccccagccccagccctag

SEQ ID NO: 169292 - DNA, 819 bp, synthetic construct
  misc_feature 1..819: note = Description of Artificial Sequence: Synthetic coding sequence
  source 1..819: mol_type = other DNA
atgagcggctgcagggtcttcatcggccgcctgaacccagctgcccgggagaaggatgtggagcgcttcttcaagggctacggccgcatccgggacatcgacctgaagaggggctttggatttgtggagtttgaggaccccagagatgctgatgatgctgtgtatgagctggatggcaaggagctgtgcagcgagcgggtgaccattgaacatgcccgggcccggagccggggcggccggggccggggccgctacagcgaccgcttcagcagccggcggcccagaaatgacagaagaaatgcccctcctgtgaggacagaaaatcggctgattgtggagaacctgagcagccgggtgtcctggcaggacctgaaggacttcatgaggcaggccggggaggtgacctttgctgatgcccaccggcccaagctgaatgaaggagtggtggagtttgccagctatggagacctgaagaatgccatcgagaagctgagcggcaaggagatcaatggaaggaagatcaagctgattgagggcagcaagaggcacagccgcagccgcagccgcagccgcagcaggaccaggagcagcagccgcagccgcagccgcagccgcagccgcagcaggaagagctacagccgcagccgcagccgcagccgcagccgcagccgcagcaagagccgctctgtgagccgcagccctgtgcctgagaagagccagaagaggggcagcagcagccgcagcaagagccctgcctctgtggaccggcagaggagccgcagccgcagccgcagccgctctgtggacagcggcaactag

SEQ ID NO: 169293 - DNA, 417 bp, synthetic construct
  misc_feature 1..417: note = Description of Artificial Sequence: Synthetic coding sequence
  source 1..417: mol_type = other DNA
atgagcggctgcagggtcttcatcggccgcctgaacccagctgcccgggagaaggatgtggagcgcttcttcaagggctacggccgcatccgggacatcgacctgaagaggggctttggatttgtggagtttgaggaccccagagatgctgatgatgctgtgtatgagctggatggcaaggagctgtgcagcgagcgggtgaccattgaacatgcccgggcccggagccggggcggccggggccggggccgctacagcgaccgcttcagcagccggcggcccagaaatgacagaagaaatgcccctcctgtgaggacagaaaatcggctgattgtggagaacctgagcagccgggtgtcctggcagcctgtgtgtgtggtgggcctgatgaccaggtctgcctgtggcctgtcctag

SEQ ID NO: 169294 - DNA, 819 bp, synthetic construct; identical to SEQ ID NO: 169292
  misc_feature 1..819: note = Description of Artificial Sequence: Synthetic coding sequence
  source 1..819: mol_type = other DNA

SEQ ID NO: 169295 - DNA, 819 bp, synthetic construct; identical to SEQ ID NO: 169292
  misc_feature 1..819: note = Description of Artificial Sequence: Synthetic coding sequence
  source 1..819: mol_type = other DNA

SEQ ID NO: 169296 - DNA, 1035 bp, synthetic construct
  misc_feature 1..1035: note = Description of Artificial Sequence: Synthetic coding sequence
  source 1..1035: mol_type = other DNA
atgccccgggtgtacatcggccgcctgagctacaacgtgcgggagaaggacatccagcgcttcttcagcggctacggccgcctgctggaggtggacctgaagaatggctacggctttgtggagtttgaggacagcagagatgctgatgatgctgtgtatgagctgaatggcaaggagctgtgtggggagagggtcatcgtggagcacgcccggggcccccggcgggacagagatggctacagctatggcagccgcagcggcggcggcggctacagcagcaggaggaccagcggccgggacaagtatggcccccctgtgaggacagagtaccgcctgattgtggagaacctgagcagccgctgctcctggcaggacctgaaggacttcatgaggcaggccggggaggtgacctatgcagatgcccacaaggagaggaccaatgaaggagtgattgagttccgcagctacagcgacatgaagagggccctggacaagctggatggaacagagatcaatggaagaaacatccggctgattgaggacaagcccaggaccagccaccggcgcagctacagcggcagccgcagccgcagccgcagcagaagaagaagccgcagccgcagcagaagaagcagccgcagccgcagccgcagcatcagcaagagccgcagccgcagccgcagccgcagcaagggccgcagccgcagccgcagcaaaggaaggaagagccgcagcaagagcaagagcaagcccaagagtgaccggggcagccacagccacagccgcagccgcagcaaggatgaatatgagaagagccgcagccgcagccgcagccgcagccccaaggaaaatggcaagggggacatcaagagcaagagccgcagccgcagccagagccgcagcaacagccccctgcctgtgccccccagcaaggcccggtctgtgtccccaccacccaagagggccaccagccgcagccgcagccgcagccgcagcaagagccgcagccgcagccgcagcagcagccgggactag

SEQ ID NO: 169297 - DNA, 717 bp, synthetic construct
  misc_feature 1..717: note = Description of Artificial Sequence: Synthetic coding sequence
  source 1..717: mol_type = other DNA
atgagccgctatggccgctatggaggagagaccaaggtgtatgtgggcaacctgggcaccggggccggcaagggggagctggagcgggccttctcctactacggccccctgaggacagtgtggatcgccaggaaccccccaggctttgcctttgtggagtttgaggaccccagagatgctgaagatgctgtgcggggcctggatggcaaggtgatctgtggcagccgggtgcgggtggagctgagcacaggcatgcccaggaggagcagatttgaccggcccccagcccggcggccctttgaccccaatgaccgctgctatgaatgtggggagaagggccactacgcctatgactgccaccgctacagcagaagaagaagaagccgcagccgcagccgcagccacagccgcagccggggccgccgctacagccgcagccgcagccgcagccggggcagaagaagccgcagcgccagccccaggaggagccgcagcatcagcctgcggcgcagccgcagcgccagcctgcggcgcagccgcagcggcagcatcaagggcagccgctacttccagagccccagccgcagccgcagccgcagccgcagcatcagccggcccaggagcagccgcagcaagagccgcagccccagccccaagaggagccgcagccccagcggcagccccaggagaagtgccagccctgagaggatggactag

SEQ ID NO: 169298 - DNA, 681 bp, synthetic construct
  misc_feature 1..681: note = Description of Artificial Sequence: Synthetic coding sequence
  source 1..681: mol_type = other DNA
atgagccgctatggccgctatggaggagagaccaaggtgtatgtgggcaacctgggcaccggggccggcaagggggagctggagcgggccttctcctactacggccccctgaggacagtgtggatcgccaggaaccccccaggctttgcctttgtggagtttgaggaccccagagatgctgaagatgctgtgcggggcctggatggcaaggtgatctgtggcagccgggtgcgggtggagctgagcacaggcatgcccaggaggagcagatttgaccggcccccagcccggcggccctttgaccccaatgaccgctgctatgaatgtggggagaagggccactacgcctatgactgccaccgctacagcagaagaagaagaagccgcagccgcagccgcagccacagccgcagccggggccgccgctacagccgcagccgcagccgcagccggggcagaagaagccgcagcgccagccccaggaggagccgcagcatcagcctgcggcgcagccgcagcgccagcctgcggcgcagccgcagcggcagcatcaagggcagccgctacttccagagccccagccgcagccgcagccgcagccgcagcatcagccggcccaggagcagccgcagccccagcggcagccccaggagaagtgccagccctgagaggatggactag

SEQ ID NO: 169299 - DNA, 1926 bp, synthetic construct
  misc_feature 1..1926: note = Description of Artificial Sequence: Synthetic coding sequence
  source 1..1926: mol_type = other DNA
atgaactgggccgccttcggcggcagcgagttcttcatccctgagggcatccagattgacagccgctgccccctgagcaggaacatcacagagtggtaccactactacggcattgctgtgaaggagagcagccagtactatgatgtgatgtacagcaagaagggggccgcctgggtgtctgagaccgggaagaaggaggtgtccaagcagacagtggcctacagccccaggagcaagctgggcaccctgctgcctgagttccccaacgtgaaggacctgaacctgcctgccagcctgcctgaggagaaggtgtccaccttcatcatgatgtaccgcacccactgccagaggatcctggacaccgtcatccgggccaactttgatgaggtgcagagcttcctgctgcacttctggcagggcatgccaccccacatgctgcctgtgctgggcagcagcacagtggtgaacatcgtgggcgtgtgtgacagcatcctgtacaaggccatcagcggcgtgctgatgcccaccgtgctgcaggccctgcctgacagcctgacccaggtgatcaggaagtttgccaagcagctggatgagtggctgaaggtggccctgcatgacctgcctgagaacctgaggaacatcaagtttgagctgagccgccgcttcagccagatcctgcggcggcagaccagcctgaaccacctgtgccaggccagcaggacagtcatccacagcgctgacatcaccttccagatgctggaggactggagaaatgtggacctgaacagcatcaccaagcagaccctgtacaccatggaggacagcagagatgagcacaggaagctgatcacccagctgtaccaggagtttgaccacctgctggaggagcagagccccatcgagagctacatcgagtggctggacaccatggtggacagatgtgtggtgaaggtggccgccaagaggcagggcagcctgaagaaggtggcccagcagttcctgctgatgtggagctgcttcggcaccagggtcatccgggacatgaccctgcacagcgcccccagctttggcagcttccacctgatccacctgatgtttgatgattatgtgctgtacctgctggagagcctgcactgccaggagcgggccaatgagctgatgagggccatgaagggggagggcagcacagctgaggtgcgggaggagatcatcctgacagaggccgccgcccccacccccagccctgtgcccagcttctccccagccaagagcgccacctctgtggaggtgcccccacccagcagccctgtgagcaaccccagccctgagtacacaggcctgagcaccaccggggccatgcagagctacacctggagcctgacctacacagtgaccacagctgctggcagccctgctgagaacagccagcagctgccctgcatgaggaacacccacgtgcccagcagctctgtgacccaccgcatccctgtgtacccccaccgggaggagcacggctacacaggcagctacaactacggcagctatggcaaccagcacccccaccccatgcagagccagtacccagccctgccccatgacacagccatcagcggccccctgcactacgccccctaccacaggagcagcgcccagtaccccttcaacagccccaccagcaggatggagccctgcctgatgagcagcaccccccggctgcaccccacccctgtgaccccccgctggccagaggtgcccagcgccaacacctgctacaccagccccagcgtgcacagcgcccgctatggcaacagcagtgacatgtacacccccctgaccaccaggagaaattctgaatatgagcacatgcagcacttccctggctttgcctacatcaacggggaggccagcacaggctgggccaagtag

SEQ ID NO: 169300 - DNA, 2907 bp, synthetic construct
  misc_feature 1..2907: note = Description of Artificial Sequence: Synthetic coding sequence
  source 1..2907: mol_type = other DNA
atggcctttgccaacttccgccgcatcctgcggctgagcacctttgagaagaggaagagccgggagtatgaacatgtgagaagagacctggaccccaatgaggtgtgggagatcgtgggggagctgggagatggagccttcggcaaggtgtacaaggccaagaacaaggagaccggggccctggccgccgccaaggtgattgagaccaagtctgaggaggagctggaggactacatcgtggagattgagatcctggccacctgtgaccacccctacatcgtgaagctgctgggcgcctactaccatgatggcaagctgtggatcatgattgagttctgccctgggggcgctgtggatgccatcatgctggagctggaccggggcctgacagagccccagatccaggtggtgtgccggcagatgctggaggccctgaacttcctgcacagcaagaggatcatccaccgggacctgaaggctggaaatgtgctgatgaccctggagggggacatccggctggccgactttggagtgtctgccaagaacctgaagaccctgcagaagagggacagcttcatcggcaccccctactggatggcccctgaggtggtgatgtgtgagaccatgaaggacaccccctatgactacaaggctgacatctggagcctgggcatcaccctcatcgagatggcccagatcgagcccccccaccacgagctgaaccccatgagggtgctgctgaagatcgccaagagtgacccccccaccctgctgacccccagcaagtggagcgtggagttccgggacttcctgaagatcgccctggacaagaaccctgagacccggcccagcgctgcccagctgctggagcacccctttgtgagcagcatcaccagcaacaaggccctgcgggagctggtggccgaggccaaggccgaggtgatggaggagattgaagatggaagagatgaaggagaggaggaggatgctgtggatgctgccagcaccctggagaaccacacccagaacagcagcgaggtgtccccacccagcctgaatgctgacaagcccctggaggagagccccagcacccccctggcccccagccagagccaggacagcgtgaatgagccctgcagccagcccagcggggacaggagcctgcagaccaccagcccccctgtggtggcccctggaaatgaaaatggcctggccgtgcctgtgcccctgaggaagagcaggcctgtgtccatggatgcccgcatccaggtggcccaggagaagcaggtggccgagcagggcggggacctgagccctgctgccaacagaagccagaaggccagccagagccggcccaacagcagcgccctggagaccctgggcggggagaagctggccaacggcagcctggagcccccagcccaggccgcccctggccccagcaagagggacagcgactgcagcagcctgtgcaccagcgagagcatggactatggcaccaacctgagcacagacctgagcctgaacaaggagatgggcagcctgagcatcaaggaccccaagctgtacaagaagaccctgaagaggaccaggaagtttgtggtggatggagtggaggtgtccatcaccaccagcaagatcatcagtgaagatgagaagaaggatgaggagatgaggttcctgcggcggcaggagctgcgggagctgcggctgctgcagaaggaggagcacaggaaccagacccagctgagcaacaagcatgagctgcagctggagcagatgcacaagagatttgagcaggagatcaatgccaagaagaagttctttgacacagagctggagaacctggagcggcagcagaagcagcaggtggagaagatggagcaggaccatgctgtgagaagaagagaggaggcccggcgcatccggctggagcaggaccgggactacacccgcttccaggagcagctgaagctgatgaagaaggaggtgaagaatgaggtggagaagctgccccggcagcagaggaaggagagcatgaagcagaagatggaggagcacacccagaagaagcagctgctggaccgggactttgtggccaagcagaaggaggacctggagctggccatgaagaggctgaccacagacaacagaagagagatctgtgacaaggagagagaatgtctgatgaagaagcaggagctgctgcgggaccgggaggccgccctgtgggagatggaggagcaccagctgcaggagcggcaccagctggtgaagcagcagctgaaggaccagtacttcctgcagagacatgagctgctgaggaagcatgagaaggagcgggagcagatgcagcgctacaaccagaggatgattgagcagctgaaggtgcggcagcagcaggagaaggcccggctgcccaagatccagaggtctgagggcaagaccaggatggccatgtacaagaagagcctgcacatcaatggaggcggcagcgctgctgagcagcgggagaagatcaagcagttcagccagcaggaggagaagaggcagaagtctgagcggctgcagcagcagcagaagcatgagaaccagatgagggacatgctggcccagtgtgagagcaacatgtctgagctgcagcagctgcagaatgagaagtgccacctgctggtggagcacgagacccagaagctgaaggccctggatgagagccacaaccagaacctgaaggagtggagggacaagctgcggcccaggaagaaggccctggaggaggacctgaaccagaagaagcgggagcaggagatgttcttcaagctgtctgaggaggccgagtgccccaaccccagcacccccagcaaggccgccaagttcttcccctacagcagcgcagatgccagctag

SEQ ID NO: 169301 - DNA, 2907 bp, synthetic construct; identical to SEQ ID NO: 169300
  misc_feature 1..2907: note = Description of Artificial Sequence: Synthetic coding sequence
  source 1..2907: mol_type = other DNA

SEQ ID NO: 169302 - DNA, 3300 bp, synthetic construct
  misc_feature 1..3300: note = Description of Artificial Sequence: Synthetic coding sequence
  source 1..3300: mol_type = other DNA
cgcttcggcagcgccccccagaggcctgtggccatgaccacagcccagagggacagcctgctgtggaagctggccggcctgctgcgggagagcggagatgtggtgctgagcggctgcagcaccctgagcctgctgacccccaccctgcagcagctgaaccacgtgtttgagctgcacctgggcccctggggccctggccagacaggctttgtggccctgcccagccaccctgctgacagccctgtgatcctgcagctgcagttcctgtttgatgtgctgcagaagaccctgagcctgaagctggtgcacgtggccggccctggccccaccggccccatcaagatcttccccttcaagagcctgcggcacctggagctgcggggcgtgcccctgcactgcctgcacggcctgcggggcatctacagccagctggagaccctcatctgcagccgcagcctgcaggccctggaggagctgctgagcgcctgtggcggggacttctgcagcgccctgccctggctggccctgctgagcgccaacttctcctacaatgccctgacagccctggacagcagcctgcggctgctgagcgccctgcgcttcctgaacctgagccacaaccaggtgcaggactgccagggcttcctgatggacctgtgtgagctgcaccacctggacatctcctacaaccggctgcacctggtgcccaggatgggccccagcggggccgccctgggcgtgctgatcctgcggggaaatgagctgcggagcctgcacggcctggagcagctgaggaacctgcggcacctggacctggcctacaacctgctggagggccaccgggagctgagccccctgtggctgctggccgagctgaggaagctgtacctggagggcaaccccctgtggttccaccctgagcaccgggccgccacagcccagtacctgagcccccgggccagagatgctgccaccggcttcctgctggatggcaaggtgctgagcctgacagacttccagacccacaccagcctgggcctgagccccatgggcccccccctgccctggcctgtgggcagcaccccagagaccagcggcggccctgacctgagtgacagcctgagcagcggcggcgtggtgacccagcccctgctgcacaaggtgaagagccgggtgcgggtgagaagagccagcatcagcgagcccagcgacacagatcctgagcccaggaccctgaaccccagccctgctggctggtttgtgcagcagcaccctgagctggagctgatgagcagcttccgggagagatttggaagaaactggctgcagtaccgcagccacctggagcccagcggcaaccccctgcctgccacccccaccaccagcgcccccagcgcccccccagccagcagccagggccctgacacagccccccggcccagccccccccaggaggaggcccggggcccccaggagagcccccagaagatgtctgaggaggtgcgggcagagccccaggaggaggaggaggagaaggagggcaaggaggagaaggaggagggggagatggtggagcagggcgaggaggaggccggggaggaggaggaggaggagcaggaccagaaggaggtggaggccgagctgtgccggcccctgctggtgtgccccctggagggccctgagggcgtgcggggccgggagtgcttcctgcgggtgaccagcgcccacctgtttgaggtggagctgcaggccgcccggaccctggagcggctggagctgcagagcctggaggccgctgagattgagcctgaggcccaggcccagaggagcccccggcccaccggcagtgacctgctgcccggggcccccatcctgagcctgcgcttctcctacatctgcccagaccggcagctgcggcgctacctggtgctggagccagatgcccacgccgctgtgcaggagctgctggccgtgctgacccctgtgaccaacgtggcccgggagcagctgggggaggcccgggacctgctgctgggccgcttccagtgcctgcgctgtggccacgagttcaagccagaggagcccaggatgggcctggacagcgaggagggctggaggcccctcttccagaagacagagagccctgctgtgtgccccaactgtggcagtgaccacgtggtgctgctggccgtgtcccggggcacccccaaccgggagaggaagcagggcgagcagagcctggcccccagccccagcgccagccctgtgtgccaccccccaggccacggggaccacctggaccgggccaagaacagccccccccaggcccccagcacccgggaccacggctcctggagcctgagccccccacctgagcgctgtggcctgcggtctgtggaccaccggctgcggctcttcctggatgtggaggtgttcagtgatgcccaggaggagttccagtgctgcctgaaggtgcctgtggccctggccggccacactggagagttcatgtgcctggtggtggtgtctgacagaagactctacctgctgaaggtgactggagagatgagggagcccccagcctcctggctgcagctgaccctggccgtgcccctgcaggacctgagcggcatcgagctgggcctggccggccagagcctgcggctggagtgggccgccggggccggccgctgtgtgctgctgcccagagatgcccggcactgccgggccttcctggaggagctgctggatgtgctgcagagcctgcccccagcctggaggaactgtgtgtctgccacagaggaggaggtgaccccccagcaccggctgtggcccctgctggagaaggacagcagcctggaggcccggcagttcttctacctgcgggccttcctggtggagggccccagcacctgcctggtgtccctgctgctgacccccagcaccctcttcctgctggatgaagatgctgctggcagccctgctgagcccagccccccagctgccagcggggaggccagcgagaaggtgcccccatctggccctggccctgctgtgcgggtgcgggagcagcagcccctgagcagcctgagctctgtgctgctgtaccgcagcgcccctgaggacctgcggctgctcttctatgatgaggtgtcccggctggagagcttctgggccctgcgggtggtgtgccaggagcagctgacagccctgctggcctggatccgggagccctgggaggagctgttcagcatcggcctgaggacagtcatccaggaggccctggccctggacagatag

SEQ ID NO: 169303 - DNA, 1938 bp, synthetic construct
  misc_feature 1..1938: note = Description of Artificial Sequence: Synthetic coding sequence
  source 1..1938: mol_type = other DNA
cgcttcggcagcgccccccagaggcctgtggccatgaccacagcccagagggacagcctgctgtggaagctggccggcctgctgcgggagagcggagatgtggtgctgagcggctgcagcaccctgagcctgctgacccccaccctgcagcagctgaaccacgtgtttgagctgcacctgggcccctggggccctggccagacaggctttgtggccctgcccagccaccctgctgacagccctgtgatcctgcagctgcagttcctgtttgatgtgctgcagaagaccctgagcctgaagctggtgcacgtggccggccctggccccaccggccccatcaagatcttccccttcaagagcctgcggcacctggagctgcggggcgtgcccctgcactgcctgcacggcctgcggggcatctacagccagctggagaccctcatctgcagccgcagcctgcaggccctggaggagctgctgagcgcctgtggcggggacttctgcagcgccctgccctggctggccctgctgagcgccaacttctcctacaatgccctgacagccctggacagcagcctgcggctgctgagcgccctgcgcttcctgaacctgagccacaaccaggtgcaggactgccagggcttcctgatggacctgtgtgagctgcaccacctggacatctcctacaaccggctgcacctggtgcccaggatgggccccagcggggccgccctgggcgtgctgatcctgcggggaaatgagctgcggagcctgcacggcctggagcagctgaggaacctgcggcacctggacctggcctacaacctgctggagggccaccgggagctgagccccctgtggctgctggccgagctgaggaagttcctgctggatggcaaggtgctgagcctgacagacttccagacccacaccagcctgggcctgagccccatgggcccccccctgccctggcctgtgggcagcaccccagagaccagcggcggccctgacctgagtgacagcctgagcagcggcggcgtggtgacccagcccctgctgcacaaggtgaagagccgggtgcgggtgagaagagccagcatcagcgagcccagcgacacagatcctgagcccaggaccctgaaccccagccctgctggctggtttgtgcagcagcaccctgagctggagctgatgagcagcttccgggagagatttggaagaaactggctgcagtaccgcagccacctggagcccagcggcaaccccctgcctgccacccccaccaccagcgcccccagcgcccccccagccagcagccagggccctgacacagccccccggcccagccccccccaggaggaggcccggggcccccaggagagcccccagaagatgtctgaggaggtgcgggcagagccccaggaggaggaggaggagaaggagggcaaggaggagaaggaggagggggagatggtggagcagggcgaggaggaggccggggaggaggaggaggaggagcaggaccagaaggaggtggaggccgagctgtgccggcccctgctggtgtgccccctggagggccctgagggcgtgcggggccgggagtgcttcctgcgggtgaccagcgcccacctgtttgaggtggagctgcaggccgcccggaccctggagcggctggagctgcagagcctggaggccgctgagattgagcctgaggcccaggcccagaggagcccccggcccaccggcagtgacctgctgcccggggcccccatcctgagcctgcgcttctcctacatctgcccagaccggcagctgcggcgctacctggtgctggagccagatgcccacgccgctgtgcaggtgatggccccccgggtgggcgcccaggaggccgtgggcatcaagagggcccggggcaagtggcagcaggcctag

SEQ ID NO: 169304 - DNA, 1095 bp, synthetic construct
  misc_feature 1..1095: note = Description of Artificial Sequence: Synthetic coding sequence
  source 1..1095: mol_type = other DNA
atgcagaagtggttcagcgcctttgatgatgccatcatccagaggcagtggagggccaaccccagccggggcggcggcggcgtgtccttcaccaaggaggtggacaccaacgtggccaccggggccccaccccggcggcagagggtgcccggccgggcctgcccctggagggagcccatccggggcagaagaggagcccggcctggaggaggagatgctgggggcaccccaggagagaccgtgcgccactgcagcgcccctgaggaccccatcttccgcttcagcagcctgcacagctaccccttccctggcaccatcaagagccgggacatgtcctggaagaggcaccacctgatccctgagacctttggagtgaagagaagaaggaagaggggccctgtggagagtgaccccctgcggggggagcccggcagcgcccgggctgctgtgtctgagctgatgcagctgttcccccggggcctgtttgaagatgccctgccccccatcgtgctgcggagccaggtgtacagcctggtgcctgacagaacagtggccgaccggcagctgaaggagctgcaggagcagggcgagatccgcatcgtgcagctgggctttgacctggatgcccacggcatcatcttcacagaggactaccgcaccagggtgctgaaggcctgtgatggccggccctatgctggagctgtgcagaagttcctggcctctgtgctgcctgcctgtggggacctgtccttccagcaggaccagatgacccagaccttcggcttccgggacagcgagatcacccacctggtgaatgccggcgtgctgactgtgagagatgctggctcctggtggctggccgtgcctggagctggccgcttcatcaagtactttgtgaagggccggcaggccgtgctgtccatggtgaggaaggccaagtaccgggagctgctgctgtctgagctgctgggcagaagagcccctgtggtggtgcggctgggcctgacctaccacgtgcatgacctgattggagcccagctggtggactgcatcagcaccaccagcggcaccctgctgcggctgcctgagacctag

SEQ ID NO: 169305 - DNA, 1107 bp, synthetic construct
  misc_feature 1..1107: note = Description of Artificial Sequence: Synthetic coding sequence
  source 1..1107: mol_type = other DNA
atgcagaagtggttcagcgcctttgatgatgccatcatccagaggcagtggagggccaaccccagccggggcggcggcggcgtgtccttcaccaaggaggtggacaccaacgtggccaccggggccccaccccggcggcagagggtgcccggccgggcctgcccctggagggagcccatccggggcagaagaggagcccggcctggaggaggagatgctgggggcaccccaggagagaccgtgcgccactgcagcgcccctgaggaccccatcttccgcttcagcagcctgcacagctaccccttccctggcaccatcaagagccgggacatgtcctggaagaggcaccacctgatccctgagacctttggagtgaagagaagaaggaagaggggccctgtggagagtgaccccctgcggggggagcccggcagcgcccgggctgctgtgtctgagctgatgcagctgttcccccggggcctgtttgaagatgccctgccccccatcgtgctgcggagccaggtgtacagcctggtgcctgacagaacagtggccgaccggcagctgaaggagctgcaggagcagggcgagatccgcatcgtgcagctgggctttgacctggatgcccacggcatcatcttcacagaggactaccgcaccagggtgtgtgactgtgtgctgaaggcctgtgatggccggccctatgctggagctgtgcagaagttcctggcctctgtgctgcctgcctgtggggacctgtccttccagcaggaccagatgacccagaccttcggcttccgggacagcgagatcacccacctggtgaatgccggcgtgctgactgtgagagatgctggctcctggtggctggccgtgcctggagctggccgcttcatcaagtactttgtgaagggccggcaggccgtgctgtccatggtgaggaaggccaagtaccgggagctgctgctgtctgagctgctgggcagaagagcccctgtggtggtgcggctgggcctgacctaccacgtgcatgacctgattggagcccagctggtggactgcatcagcaccaccagcggcaccctgctgcggctgcctgagacctag

SEQ ID NO: 169306 - DNA, 1107 bp, synthetic construct
  misc_feature 1..1107: note = Description of Artificial Sequence: Synthetic coding sequence
  source 1..1107: mol_type = other DNA
atgcagaagtggttcagcgcctttgatgatgccatcatccagaggcagtggagggccaaccccagccggggcggcggcggcgtgtccttcaccaaggaggtggacaccaacgtggccaccggggccccaccccggcggcagagggtgcccggccgggcctgcccctggagggagcccatccggggcagaagaggagcccggcctggaggaggagatgctgggggcaccccaggagagaccgtgcgccactgcagcgcccctgaggaccccatcttccgcttcagcagcctgcacagctaccccttccctggcaccatcaagagccgggacatgtcctggaagaggcaccacctgatccctgagacctttggagtgaagagaagaaggaagaggggccctgtggagagtgaccccctgcggggggagcccggcagcgcccgggctgctgtgtctgagctgatgcagctgttcccccggggcctgtttgaagatgccctgccccccatcgtgctgcggagccaggtgtacagcctggtgcctgacagaacagtggccgaccggcagctgaaggagctgcaggagcagggcgagatccgcatcgtgcagctgggctttgacctggatgcccacggcatcatcttcacagaggactaccgcaccagggtgtgtgactgtgtgctgaaggcctgtgatggccggccctatgctggagctgtgcagaagttcctggcctctgtgctgcctgcctgtggggacctgtccttccagcaggaccagatgacccagaccttcggcttccgggacagcgagatcacccacctggtgaatgccggcgtgctgactgtgagagatgctggctcctggtggctggccgtgcctggagctggccgcttcatcaagtactttgtgaagggccggcaggccgtgctgggcatggtgaggaaggccaagtaccgggagctgctgctgtctgagctgctgggcagaagagcccctgtggtggtgcggctgggcctgacctaccacgtgcatgacctgattggagcccagctggtggactgcatcagcaccaccagcggcaccctgctgcggctgcctgagacctag

SEQ ID NO: 169307 - DNA, 1095 bp, synthetic construct
  misc_feature 1..1095: note = Description of Artificial Sequence: Synthetic coding sequence
  source 1..1095: mol_type = other DNA
atgcagaagtggttcagcgcctttgatgatgccatcatccagaggcagtggagggccaaccccagccggggcggcggcggcgtgtccttcaccaaggaggtggacaccaacgtggccaccggggccccaccccggcggcagagggtgcccggccgggcctgcccctggagggagcccatccggggcagaagaggagcccggcctggaggaggagatgctgggggcaccccaggagagaccgtgcgccactgcagcgcccctgaggaccccatcttccgcttcagcagcctgcacagctaccccttccctggcaccatcaagagccgggacatgtcctggaagaggcaccacctgatccctgagacctttggagtgaagagaagaaggaagaggggccctgtggagagtgaccccctgcggggggagcccggcagcgcccgggctgctgtgtctgagctgatgcagctgttcccccggggcctgtttgaagatgccctgccccccatcgtgctgcggagccaggtgtacagcctggtgcctgacagaacagtggccgaccggcagctgaaggagctgcaggagcagggcgagatccgcatcgtgcagctgggctttgacctggatgcccacggcatcatcttcacagaggactaccgcaccagggtgctgaaggcctgtgatggccggccctatgctggagctgtgcagaagttcctggcctctgtgctgcctgcctgtggggacctgtccttccagcaggaccagatgacccagaccttcggcttccgggacagcgagatcacccacctggtgaatgccggcgtgctgactgtgagagatgctggctcctggtggctggccgtgcctggagctggccgcttcatcaagtactttgtgaagggccggcaggccgtgctgggcatggtgaggaaggccaagtaccgggagctgctgctgtctgagctgctgggcagaagagcccctgtggtggtgcggctgggcctgacctaccacgtgcatgacctgattggagcccagctggtggactgcatcagcaccaccagcggcaccctgctgcggctgcctgagacctag

SEQ ID NO: 169308 - DNA, 1095 bp, synthetic construct; identical to SEQ ID NO: 169304
  misc_feature 1..1095: note = Description of Artificial Sequence: Synthetic coding sequence
  source 1..1095: mol_type = other DNA

SEQ ID NO: 169309 - DNA, 1095 bp, synthetic construct; identical to SEQ ID NO: 169304
  misc_feature 1..1095: note = Description of Artificial Sequence: Synthetic coding sequence
  source 1..1095: mol_type = other DNA

SEQ ID NO: 169310 - DNA, 1095 bp, synthetic construct; identical to SEQ ID NO: 169304
  misc_feature 1..1095: note = Description of Artificial Sequence: Synthetic coding sequence
  source 1..1095: mol_type = other DNA

SEQ ID NO: 169311 - DNA, 1107 bp, synthetic construct; identical to SEQ ID NO: 169305
  misc_feature 1..1107: note = Description of Artificial Sequence: Synthetic coding sequence
  source 1..1107: mol_type = other DNA

SEQ ID NO: 169312 - DNA, 1107 bp, synthetic construct; identical to SEQ ID NO: 169305
  misc_feature 1..1107: note = Description of Artificial Sequence: Synthetic coding sequence
  source 1..1107: mol_type = other DNA

SEQ ID NO: 169313 - DNA, 1107 bp, synthetic construct; identical to SEQ ID NO: 169305
  misc_feature 1..1107: note = Description of Artificial Sequence: Synthetic coding sequence
  source 1..1107: mol_type = other DNA

SEQ ID NO: 169314 - DNA, 1095 bp, synthetic construct; identical to SEQ ID NO: 169304
  misc_feature 1..1095: note = Description of Artificial Sequence: Synthetic coding sequence
  source 1..1095: mol_type = other DNA

SEQ ID NO: 169315 - DNA, 1107 bp, synthetic construct; identical to SEQ ID NO: 169305
  misc_feature 1..1107: note = Description of Artificial Sequence: Synthetic coding sequence
  source 1..1107: mol_type = other DNA

SEQ ID NO: 169316 - DNA, 339 bp, synthetic construct
  misc_feature 1..339: note = Description of Artificial Sequence: Synthetic coding sequence
  source 1..339: mol_type = other DNA
atgcagaagtggttcagcgcctttgatgatgccatcatccagaggcagtggagggccaaccccagccggggcggcggcggcgtgtccttcaccaaggaggtggacaccaacgtggccaccggggccccaccccggcggcagagggtgcccggccgggcctgcccctggagggagcccatccggggcagaagaggagcccggcctggaggaggagatgctgggggcaccccaggagagaccgtgcgccactgcagcgcccctgaggaccccatcttccgcttcagcagcctgcacagctaccccttccctggcaccatcaagagccgggacatgtcctag

SEQ ID NO: 169317 - DNA, 966 bp, synthetic construct
  misc_feature 1..966: note = Description of Artificial Sequence: Synthetic coding sequence
  source 1..966: mol_type = other DNA
atgctggtgtgtgccagccccccacccctgcctgccctgaccggcctgagagatgacaagctgaccctgctgagcagcagccctggcctgggcggcaccccaggagaaacagtgcgccactgcagcgcccctgaggaccccatcttccgcttcagcagcctgcacagctaccccttccctggcaccatcaagagccgggacatgtcctggaagaggcaccacctgatccctgagaccttcggcgtgaagagaagaaggaagaggggccctgtggagagtgaccccctgcggggggagcccggcagcgcccgggctgctgtgtctgagctgatgcagctgttcccccggggcctgtttgaagatgccctgccccccatcgtgctgcggagccaggtgtacagcctggtgcctgacagaacagtggccgaccggcagctgaaggagctgcaggagcagggcgagatcagaattgtgcagctgggctttgacctggatgcccacggcatcatcttcacagaggactaccgcaccagggtgctgaaggcctgtgatggccggccctatgctggagctgtgcagaagttcctggcctctgtgctgcctgcctgtggggacctgtccttccagcaggaccagatgacccagaccttcggcttccgggacagcgagatcacccacctggtgaatgctggggtgctgactgtgagagatgctggctcctggtggctggccgtgcctggggccggccgcttcatcaagtactttgtgaagggccggcaggccgtgctgggcatggtgaggaaggccaagtaccgggagctgctgctgtctgagctgctgggccggcgggcccctgtggtggtgcggctgggcctgacctaccacgtgcatgacctgattggagcccagctggtggactgcatcagcaccaccagcggcaccctgctgcggctgcctgagacctag

SEQ ID NO: 169318 - DNA, 966 bp, synthetic construct
  misc_feature 1..966: note = Description of Artificial Sequence: Synthetic coding sequence
  source 1..966: mol_type = other DNA
atgctggtgtgtgccagccccccacccctgcctgccctgaccggcctgagagatgacaagctgaccctgctgagcagcagccctggcctgggcggcaccccaggagaaacagtgcgccactgcagcgcccctgaggaccccatcttccgcttcagcagcctgcacagctaccccttccctggcaccatcaagagccgggacatgtcctggaagaggcaccacctgatccctgagaccttcggcgtgaagagaagaaggaagaggggccctgtggagagtgaccccctgcggggggagcccggcagcgcccgggctgctgtgtctgagctgatgcagctgttcccccggggcctgtttgaagatgccctgccccccatcgtgctgcggagccaggtgtacagcctggtgcctgacagaacagtggccgaccggcagctgaaggagctgcaggagcagggcgagatcagaattgtgcagctgggctttgacctggatgcccacggcatcatcttcacagaggactaccgcaccagggtgctgaaggcctgtgatggccggccctatgctggagctgtgcagaagttcctggcctctgtgctgcctgcctgtggggacctgtccttccagcaggaccagatgacccagaccttcggcttccgggacagcgagatcacccacctggtgaatgctggggtgctgactgtgagagatgctggctcctggtggctggccgtgcctggggccggccgcttcatcaagtactttgtgaagggccggcaggccgtgctgtccatggtgaggaaggccaagtaccgggagctgctgctgtctgagctgctgggccggcgggcccctgtggtggtgcggctgggcctgacctaccacgtgcatgacctgattggagcccagctggtggactgcatcagcaccaccagcggcaccctgctgcggctgcctgagacctag

SEQ ID NO: 169319 - DNA, 966 bp, synthetic construct; identical to SEQ ID NO: 169318
  misc_feature 1..966: note = Description of Artificial Sequence: Synthetic coding sequence
  source 1..966: mol_type = other DNA

SEQ ID NO: 169320 - DNA, 966 bp, synthetic construct; identical to SEQ ID NO: 169318
  misc_feature 1..966: note = Description of Artificial Sequence: Synthetic coding sequence
  source 1..966: mol_type = other DNA

SEQ ID NO: 169321 - DNA, 966 bp, synthetic construct; identical to SEQ ID NO: 169318
  misc_feature 1..966: note = Description of Artificial Sequence: Synthetic coding sequence
  source 1..966: mol_type = other DNA

SEQ ID NO: 169322 - DNA, 1320 bp, synthetic construct
  misc_feature 1..1320: note = Description of Artificial Sequence: Synthetic coding sequence
  source 1..1320: mol_type = other DNA
atgcagaacctgaaggctgaccctgaggagctgttcaccaagctggagaagattggcaagggcagctttggagaggtgttcaagggcatcgacaacagaacccagaaggtggtggccatcaagatcatcgacctggaggaggctgaagatgaaattgaggacatccagcaggagatcaccgtgctgagccagtgtgacagcccctacgtgaccaagtactacggcagctacctgaaggacaccaagctgtggatcatcatggagtacctgggcggcggcagcgccctggacctgctggagcccggccccctggatgagacccagatcgccaccatcctgcgggagatcctgaagggcctggactacctgcacagcgagaagaagatccaccgggacatcaaggccgccaacgtgctgctgtctgaacatggagaggtgaagctggccgactttggagtggccggccagctgacagacacccagatcaagaggaacacctttgtgggcacccccttctggatggcccctgaggtgatcaagcagagcgcctatgacagcaaggctgacatctggagcctgggcatcacagccatcgagctggcccggggggagcccccccacagcgagctgcaccccatgaaggtgctcttcctgatccccaagaacaacccccccaccctggagggcaactacagcaagcccctgaaggagtttgtggaggcctgcctgaacaaggagcccagcttccggcccacagccaaggagctgctgaagcacaagttcatcctgagaaatgccaagaagaccagctacctgacagagctgattgaccgctacaagcgctggaaggccgagcagagccatgatgacagcagcagcgaggacagtgatgctgagacagatggccaggccagcggcggcagtgacagcggggactggatcttcaccatccgggagaaggaccccaagaacctggagaatggagccctgcagcccagcgacctggacaggaacaagatgaaggacatccccaagaggcccttcagccagtgcctgagcaccatcatcagccccctgtttgctgagctgaaggagaagagccaggcctgtggcggcaacctgggcagcattgaggagctgcggggggccatctacctggccgaggaggcctgccccggcatcagtgacaccatggtggcccagctggtgcagaggctgcagaggagcatccacggcaaccaggcccccccagactgccacctggcccaggtgcaggcctttggaggcagcggctgtgtgctgggcagccgctctgtgtag

SEQ ID NO: 169323 - DNA, 672 bp, synthetic construct
  misc_feature 1..672: note = Description of Artificial Sequence: Synthetic coding sequence
  source 1..672: mol_type = other DNA
atggcccctgaggtgatcaagcagagcgcctatgacagcaaggctgacatctggagcctgggcatcacagccatcgagctggcccggggggagcccccccacagcgagctgcaccccatgaaggtgctcttcctgatccccaagaacaacccccccaccctggagggcaactacagcaagcccctgaaggagtttgtggaggcctgcctgaacaaggagcccagcttccggcccacagccaaggagctgctgaagcacaagttcatcctgagaaatgccaagaagaccagctacctgacagagctgattgaccgctacaagcgctggaaggccgagcagagccatgatgacagcagcagtgaagattctgatgctgagacagatggccaggccagcggcggcagtgacagcggggactggatcttcaccatccgggagaaggaccccaagaacctggagaatggagccctgcagcccagcgacctggacaggaacaagctgaaggagaagagccaggcctgtggcggcaacctgggcagcattgaggagctgcggggggccatctacctggccgaggaggcctgccccggcatcagtgacaccatggtggcccagctggtgcagaggctgcagcgctacagcctgagcggcggcggcaccagcagccactag

SEQ ID NO: 169324 - DNA, 1332 bp, synthetic construct
  misc_feature 1..1332: note = Description of Artificial Sequence: Synthetic coding sequence
  source 1..1332: mol_type = other DNA
atggacagccgggcccagctgtggggcctggccctgaacaagagaagagccaccctgccccaccctgggggcagcaccaacctgaaggctgaccctgaggagctgttcaccaagctggagaagattggcaagggcagctttggagaggtgttcaagggcatcgacaacagaacccagaaggtggtggccatcaagatcatcgacctggaggaggctgaagatgaaattgaggacatccagcaggagatcaccgtgctgagccagtgtgacagcccctacgtgaccaagtactacggcagctacctgaaggacaccaagctgtggatcatcatggagtacctgggcggcggcagcgccctggacctgctggagcccggccccctggatgagacccagatcgccaccatcctgcgggagatcctgaagggcctggactacctgcacagcgagaagaagatccaccgggacatcaaggccgccaacgtgctgctgtctgaacatggagaggtgaagctggccgactttggagtggccggccagctgacagacacccagatcaagaggaacacctttgtgggcacccccttctggatggcccctgaggtgatcaagcagagcgcctatgacagcaaggctgacatctggagcctgggcatcacagccatcgagctggcccggggggagcccccccacagcgagctgcaccccatgaaggtgctcttcctgatccccaagaacaacccccccaccctggagggcaactacagcaagcccctgaaggagtttgtggaggcctgcctgaacaaggagcccagcttccggcccacagccaaggagctgctgaagcacaagttcatcctgagaaatgccaagaagaccagctacctgacagagctgattgaccgctacaagcgctggaaggccgagcagagccatgatgacagcagcagcgaggacagtgatgctgagacagatggccaggccagcggcggcagtgacagcggggactggatcttcaccatccgggagaaggaccccaagaacctggagaatggagccctgcagcccagcgacctggacaggaacaagatgaaggacatccccaagaggcccttcagccagtgcctgagcaccatcatcagccccctgtttgctgagctgaaggagaagagccaggcctgtggcggcaacctgggcagcattgaggagctgcggggggccatctacctggccgaggaggcctgccccggcatcagtgacaccatggtggcccagctggtgcagaggctgcagcgctacagcctgagcggcggcggcaccagcagccactag

SEQ ID NO: 169325 - DNA, 1296 bp, synthetic construct
  misc_feature 1..1296: note = Description of Artificial Sequence: Synthetic coding sequence
  source 1..1296: mol_type = other DNA
atggcccacagccctgtgcagagcggcctgcccggcatgcagaacctgaaggctgaccctgaggagctgttcaccaagctggagaagattggcaagggcagctttggagaggtgttcaagggcatcgacaacagaacccagaaggtggtggccatcaagatcatcgacctggaggaggctgaagatgaaattgaggacatccagcaggagatcaccgtgctgagccagtgtgacagcccctacgtgaccaagtactacggcagctacctgaaggacaccaagctgtggatcatcatggagtacctgggcggcggcagcgccctggacctgctggagcccggccccctggatgagacccagatcgccaccatcctgcgggagatcctgaagggcctggactacctgcacagcgagaagaagatccaccgggacatcaaggccgccaacgtgctgctgtctgaacatggagaggtgaagctggccgactttggagtggccggccagctgacagacacccagatcaagaggaacacctttgtgggcacccccttctggatggcccctgaggtgatcaagcagagcgcctatgacagcaaggctgacatctggagcctgggcatcacagccatcgagctggcccggggggagcccccccacagcgagctgcaccccatgaaggtgctcttcctgatccccaagaacaacccccccaccctggagggcaactacagcaagcccctgaaggagtttgtggaggcctgcctgaacaaggagcccagcttccggcccacagccaaggagctgctgaagcacaagttcatcctgagaaatgccaagaagaccagctacctgacagagctgattgaccgctacaagcgctggaaggccgagcagagccatgatgacagcagcagcgaggacagtgatgctgagacagatggccaggccagcggcggcagtgacagcggggactggatcttcaccatccgggagaaggaccccaagaacctggagaatggagccctgcagcccagcgacctggacaggaacaagatgaaggacatccccaagaggcccttcagccagtgcctgagcaccatcatcagccccctgtttgctgagctgaaggagaagagccaggcctgtggcggcaacctgggcagcattgaggagctgcggggggccatctacctggccgaggaggcctgccccggcatcagtgacaccatggtggcccagctggtgcagaggctgcagcgctacagcctgagcggcggcggcaccagcagccactag

SEQ ID NO: 169326 - DNA, 1239 bp, synthetic construct
  misc_feature 1..1239: note = Description of Artificial Sequence: Synthetic coding sequence
  source 1..1239: mol_type = other DNA
atggcccacagccctgtgcagagcggcctgcccggcatgcagaacctgaaggctgaccctgaggagctgttcaccaagctggagaagattggcaagggcagctttggagaggtgttcaagggcatcgacaacagaacccagaaggtggtggccatcaagatcatcgacctggaggaggctgaagatgaaattgaggacatccagcaggagatcaccgtgctgagccagtgtgacagcccctacgtgaccaagtactacggcagctacctgaagctggagcccggccccctggatgagacccagatcgccaccatcctgcgggagatcctgaagggcctggactacctgcacagcgagaagaagatccaccgggacatcaaggccgccaacgtgctgctgtctgagcacggggaggtgaagctggccgactttggagtggccggccagctgacagacacccagatcaagaggaacacctttgtgggcacccccttctggatggcccctgaggtgatcaagcagagcgcctatgacagcaaggctgacatctggagcctgggcatcacagccatcgagctggcccggggggagcccccccacagcgagctgcaccccatgaaggtgctcttcctgatccccaagaacaacccccccaccctggagggcaactacagcaagcccctgaaggagtttgtggaggcctgcctgaacaaggagcccagcttccggcccacagccaaggagctgctgaagcacaagttcatcctgagaaatgccaagaagaccagctacctgacagagctgattgaccgctacaagcgctggaaggccgagcagagccatgatgacagcagcagtgaagattctgatgctgagacagatggccaggccagcggcggcagtgacagcggggactggatcttcaccatccgggagaaggaccccaagaacctggagaatggagccctgcagcccagcgacctggacaggaacaagatgaaggacatccccaagaggcccttcagccagtgcctgagcaccatcatcagccccctgtttgctgagctgaaggagaagagccaggcctgtggcggcaacctgggcagcattgaggagctgcggggggccatctacctggccgaggaggcctgccccggcatcagtgacaccatggtggcccagctggtgcagaggctgcagcgctacagcctgagcggcggcggcaccagcagccactag

SEQ ID NO: 169327 - DNA, 1029 bp, synthetic construct
  misc_feature 1..1029: note = Description of Artificial Sequence: Synthetic coding sequence
  source 1..1029: mol_type = other DNA
atggcccacagccctgtgcagagcggcctgcccggcatgcagaacctgaaggctgaccctgaggagctgttcaccaagctggagaagattggcaagggcagctttggagaggtgttcaagggcatcgacaacagaacccagaaggtggtggccatcaagatcatcgacctggaggaggctgaagatgaaattgaggacatccagcaggagatcaccgtgctgagccagtgtgacagcccctacgtgaccaagtactacggcagctacctgaaggacaccaagctgtggatcatcatggagtacctgggcggcggcagcgccctggacctgctggagcccggccccctggatgagacccagatcgccaccatcctgcgggagatcctgaagggcctggactacctgcacagcgagaagaagatccaccgggacatcaaggccgccaacgtgctgctgtctgaacatggagaggtgaagctggccgactttggagtggccggccagctgacagacacccagatcaagaggaacacctttgtgggcacccccttctggatggcccctgaggtgatcaagcagagcgcctatgacagcaaggctgacatctggagcctgggcatcacagccatcgagctggcccggggggagcccccccacagcgagctgcaccccatgaaggtgctcttcctgatccccaagaacaacccccccaccctggagggcaactacagcaagcccctgaaggagtttgtggaggcctgcctgaacaaggagcccagcttccggcccacagccaaggagctgctgaagcacaagttcatcctgagaaatgccaagaagaccagctacctgacagagctgattgaccgctacaagcgctggaaggccgagcagagccatgatgacagcagcagcgaggacagtgatgctgagacagatggccaggccagcggcggcagtgacagcggggactggatcttcaccatccgggagtggagcagcagcgccatcggcctgggccagaagtag

SEQ ID NO: 169328 - DNA, 2991 bp, synthetic construct
  misc_feature 1..2991: note = Description of Artificial Sequence: Synthetic coding sequence
  source 1..2991: mol_type = other DNA
atggatgaggacacccactatgacaaggtggaggatgtggtgggcagccacattgaagatgctgtgaccttctgggcccagagcatcaacagaaacaaggacatcatgaagattggctgcagcctgtctgaggtgtgcccccaggccagctctgtgctgggcaacctggaccccaacaagatctacggcggcctcttcagcgaggaccagtgctggtaccgctgcaaggtgctgaagatcatctctgtggagaagtgcctggtgcgctacattgattatggcaacacagagatcctgaacagaagtgacatcgtggagatccccctggagctgcagttcagctctgtggccaagaagtacaagctgtggggcctgcacatccccagcgaccaggaggtgacccagtttgaccagggcaccaccttcctgggcagcctcatctttgagaaggagatcaagatgaggatcaaggccaccagtgaagatggcaccgtcatcgcccaggccgagtatggctctgtggacatcggggaggaggtgctgaagaagggctttgctgagaagtgccgcctggccagcaggacagacatctgtgaggagaagaagctggaccccggccagctggtgctgaggaacctgaagagccccatccccctgtggggccacaggagcaaccagagcaccttcagccggcccaagggccacctgtctgagaagatgaccctggacctgaaggatgaaaatgatgctggcaacctgatcaccttccccaaggagagcctggccgtgggggacttcaacctgggcagcaatgtgtccctggagaagatcaagcaggaccagaagctgattgaggagaatgagaagctgaagacagagaaggatgccctgctggagagctacaaggccctggagctgaaggtggagcagatcgcccaggagctgcagcaggagaaggctgctgctgtggacctgaccaaccacctggagtacaccctgaagacctacatcgacaccaggatgaagaacctggccgccaagatggagatcctgaaggagatgagacatgtggacatctctgtgcgctttgggaaggacctgagtgatgccatccaggtgctggatgagggctgcttcaccaccccagccagcctgaatggcctggagatcatctgggccgagtacagcctggcccaggagaacatcaagacctgtgaatatgtgtctgagggcaacatcctgattgcccagagaaatgagatgcagcagaagctgtacatgtctgtggaggacttcatcctggaggtggatgagagcagcctgaacaagaggctgaagaccctgcaggacctgtctgtgtccctggaggccgtgtatggccaggccaaggagggcgccaacagtgatgagatcctgaagaagttctatgactggaagtgtgacaagcgggaggagttcacctctgtgcgctcagaaacagatgccagcctgcaccggctggtggcctggttccagaggaccctgaaggtgtttgacctgtctgtggagggcagcctcatcagtgaagatgccatggacaacattgatgagatcctggagaagacagagagctctgtgtgcaaggagctggagatcgccctggtggaccagggagatgctgacaaggagatcatcagcaacacctacagccaggtgctgcagaagatccacagcgaggagcggctcatcgccaccgtgcaggccaagtacaaggacagcattgagttcaagaagcagctgattgagtacctgaacaagagccccagcgtggaccacctgctgagcatcaagaagaccctgaagagcctgaaggccctgctgcgctggaagctggtggagaagagcaacctggaggagagtgatgatcctgatggcagccagatcgagaagatcaaggaggagatcacccagctgaggaacaacgtgttccaggagatctaccacgagcgggaggagtatgagatgctgaccagcctggcccagaagtggttccctgagctgcccctgctgcaccctgagatcggcctgctgaagtacatgaacagcggcggcctgctgaccatgagcctggagcgggacctgctggatgctgagcccatgaaggagctgagcagcaagaggcccctggtgcgctctgaggtgaatggccagatcatcctgctgaagggctacagcgtggatgtggacacagaggccaaggtgattgaaagagctgccacctaccaccgggcctggagggaggccgagggggacagcggcctgctgcccctcatcttcctgttcctgtgcaagagtgaccccatggcctacctgatggtgccctactacccccgggccaacctgaatgctgtgcaggccaacatgcccctgaacagcgaggagaccctgaaggtgatgaagggcgtggcccagggcctgcacaccctgcacaaggctgacatcatccacggcagcctgcaccagaacaacgtgtttgccctgaaccgggagcagggcatcgtgggggactttgacttcaccaagtctgtgtcccagagggcctctgtgaacatgatggtgggggacctgagcctgatgagccctgagctgaagatgggcaagccagccagccctggcagtgacctgtatgcctacggctgcctgctgctgtggctgtctgtgcagaaccaggagtttgagatcaacaaggatggcatccccaaggtggaccagttccacctggatgacaaggtgaagagcctgctgtgcagcctcatctgctaccgcagctccatgacagctgagcaggtgctgaatgctgagtgcttcctgatgcccaaggagcagagcgtgcccaaccctgagaaggacacagagtacaccctgtacaagaaggaggaggagatcaagacagagaacctggacaagtgcatggagaagaccagaaatggagaggccaactttgactgctag

SEQ ID NO: 169329 - DNA, 3060 bp, synthetic construct
  misc_feature 1..3060: note = Description of Artificial Sequence: Synthetic coding sequence
  source 1..3060: mol_type = other DNA
atgtgggtgcagggccacagcagccgggccagcgccacagaatctgtgtccttctctggaattgtgcagatggatgaggacacccactatgacaaggtggaggatgtggtgggcagccacattgaagatgctgtgaccttctgggcccagagcatcaacagaaacaaggacatcatgaagattggctgcagcctgtctgaggtgtgcccccaggccagctctgtgctgggcaacctggaccccaacaagatctatggaggcctcttcagcgaggaccagtgctggtaccgctgcaaggtgctgaagatcatctctgtggagaagtgcctggtgcgctacatcgactatggcaacacagagatcctgaacagaagtgacatcgtggagatccccctggagctgcagttcagctctgtggccaagaagtacaagctgtggggcctgcacatccccagcgaccaggaggtgacccagtttgaccagggcaccaccttcctgggcagcctcatctttgagaaggagatcaagatgaggatcaaggccaccagtgaagatggcaccgtgattgcccaggccgagtatggctctgtggacattggagaggaggtgctgaagaagggctttgctgagaagtgccgcctggccagcaggacagacatctgtgaggagaagaagctggaccccggccagctggtgctgaggaacctgaagagccccatccccctgtggggccacaggagcaaccagagcaccttcagccggcccaagggccacctgtctgagaagatgaccctggacctgaaggatgaaaatgatgctggcaacctgatcaccttccccaaggagagcctggccgtgggggacttcaacctgggcagcaatgtgtccctggagaagatcaagcaggaccagaagctgattgaagaaaatgagaagctgaagacagagaaggatgccctgctggagagctacaaggccctggagctgaaggtggagcagatcgcccaggagctgcagcaggagaaggctgctgctgtggacctgaccaaccacctggagtacaccctgaagacctacatcgacaccaggatgaagaacctggccgccaagatggagatcctgaaggagatgagacatgtggacatctctgtgcgctttgggaaggacctgagtgatgccatccaggtgctggatgagggctgcttcaccaccccagccagcctgaatggcctggagatcatctgggccgagtacagcctggcccaggagaacatcaagacctgtgaatatgtgtctgagggcaacatcctgattgcccagagaaatgagatgcagcagaagctgtacatgtctgtggaggacttcatcctggaggtggatgagagcagcctgaacaagaggctgaagaccctgcaggacctgtctgtgtccctggaggccgtgtatggccaggccaaggagggcgccaacagtgatgagatcctgaagaagttctatgactggaagtgtgacaagcgggaggagttcacctctgtgcgctcagaaacagatgccagcctgcaccggctggtggcctggttccagaggaccctgaaggtgtttgacctgtctgtggagggcagcctcatcagtgaagatgccatggacaacattgatgagatcctggagaagacagagagctctgtgtgcaaggagctggagatcgccctggtggaccagggagatgctgacaaggagatcatcagcaacacctacagccaggtgctgcagaagatccacagcgaggagcggctgattgccaccgtgcaggccaagtacaaggacagcattgagttcaagaagcagctgattgagtacctgaacaagagccccagcgtggaccacctgctgagcatcaagaagaccctgaagagcctgaaggccctgctgcgctggaagctggtggagaagagcaacctggaggagagtgatgatcctgatggcagccagatcgagaagatcaaggaggagatcacccagctgagaaataatgtgttccaggagatctaccacgagcgggaggagtatgagatgctgaccagcctggcccagaagtggttccctgagctgcccctgctgcaccctgagatcggcctgctgaagtacatgaacagcggcggcctgctgaccatgagcctggagcgggacctgctggatgctgagcccatgaaggagctgagcagcaagaggcccctggtgcgctctgaggtgaatggccagatcatcctgctgaagggctacagcgtggatgtggacacagaggccaaggtgattgagcgggccgccacctaccaccgggcctggagggaggccgagggggacagcggcctgctgcccctcatcttcctgttcctgtgcaagagtgaccccatggcctacctgatggtgccctactacccccgggccaacctgaatgctgtgcaggccaacatgcccctgaacagcgaggagaccctgaaggtgatgaagggcgtggcccagggcctgcacaccctgcacaaggctgacatcatccacggcagcctgcaccagaacaacgtgtttgccctgaaccgggagcagggcatcgtgggggactttgacttcaccaagtctgtgtcccagagggcctctgtgaacatgatggtgggggacctgagcctgatgagccctgagctgaagatgggcaagccagccagccctggcagtgacctgtatgcctacggctgcctgctgctgtggctgtctgtgcagaaccaggagtttgagatcaacaaggatggcatccccaaggtggaccagttccacctggatgacaaggtgaagagcctgctgtgcagcctcatctgctaccgcagctccatgacagctgagcaggtgctgaatgctgagtgcttcctgatgcccaaggagcagagcgtgcccaaccctgagaaggacacagagtacaccctgtacaagaaggaggaggagatcaagacagagaacctggacaagtgcatggagaagaccagaaatggagaggccaactttgactgctag

SEQ ID NO: 169330 - DNA, 2991 bp, synthetic construct; identical to SEQ ID NO: 169328
  misc_feature 1..2991: note = Description of Artificial Sequence: Synthetic coding sequence
  source 1..2991: mol_type = other DNA

SEQ ID NO: 169331 - DNA, 285 bp, synthetic construct
  misc_feature 1..285: note = Description of Artificial Sequence: Synthetic coding sequence
  source 1..285: mol_type = other DNA
atggatgaggacacccactatgacaaggtggaggatgtggtgggcagccacattgaagatgctgtgaccttctgggcccagagcatcaacagaaacaaggacatcatgaagattggctgcagcctgtctgaggtgtgcccccaggccagctctgtgctgggcaacctggaccccaacaagatctacggcggcctcttcagcgaggaccagtgctggtaccgctgcaaggtgctgaagatcatctctgtggagaagtgcctggtgcgctacattgattatggatag

SEQ ID NO: 169332 - DNA, 132 bp, synthetic construct
  misc_feature 1..132: note = Description of Artificial Sequence: Synthetic coding sequence
  source 1..132: mol_type = other DNA
atggatgaggacacccactatgacaaggtggaggatgtggtgggcagccacattgaagatgctgtgaccttctgggcccagagcatcaacagaaacaaggacatcatgaagattggctgcagcctgtcctag

SEQ ID NO: 169333 - DNA, 2991 bp, synthetic construct
  misc_feature 1..2991: note = Description of Artificial Sequence: Synthetic coding sequence
  source 1..2991: mol_type = other DNA
atgtgggtgcagggccacagcagccgggccagcgccacagaatctgtgtccttctctggaattgtgcagatggatgaggacacccactatgacaaggtggaggatgtggtgggcagccacattgaagatgctgtgaccttctgggcccagagcatcaacagaaacaaggacatcatgaagattggctgcagcctgtctgaggtgtgcccccaggccagctctgtgctgggcaacctggaccccaacaagatctatggaggcctcttcagcgaggaccagtgctggtaccgctgcaaggtgctgaagatcatctctgtggagaagtgcctggtgcgctacatcgactatggcaacacagagatcctgaacagaagtgacatcgtggagatccccctggagctgcagttcagctctgtggccaagaagtacaagctgtggggcctgcacatccccagcgaccaggaggtgacccagtttgaccagggcaccaccttcctgggcagcctcatctttgagaaggagatcaagatgaggatcaaggccaccagtgaagatggcaccgtgattgcccaggccgagtatggctctgtggacattggagaggaggtgctgaagaagggctttgctgagaagtgccgcctggccagcaggacagacatctgtgaggagaagaagctggaccccggccagctggtgctgaggaacctgaagagccccatccccctgtggggccacaggagcaaccagagcaccttcagccggcccaagggccacctgtctgagaagatgaccctggacctgaaggatgaaaatgatgctggcaacctgatcaccttccccaaggagagcctggccgtgggggacttcaacctgggcagcaatgtgtccctggagaagatcaagcaggaccagaagctgattgaagaaaatgagaagctgaagacagagaaggatgccctgctggagagctacaaggccctggagctgaaggtggagcagatcgcccaggagctgcagcaggagaaggctgctgctgtggacctgaccaaccacctggagtacaccctgaagacctacatcgacaccaggatgaagaacctggccgccaagatggagatcctgaaggagatgagacatgtggacatctctgtgcgctttgggaaggacctgagtgatgccatccaggtgctggatgagggctgcttcaccaccccagccagcctgaatggcctggagatcatctgggccgagtacagcctggcccaggagaacatcaagacctgtgaatatgtgtctgagggcaacatcctgattgcccagagaaatgagatgcagcagaagctgtacatgtctgtggaggacttcatcctggaggtggatgagagcagcctgaacaagaggctgaagaccctgcaggacctgtctgtgtccctggaggccgtgtatggccaggccaaggagggcgccaacagtgatgagatcctgaagaagttctatgactggaagtgtgacaagcgggaggagttcacctctgtgcgctcagaaacagatgccagcctgcaccggctggtggcctggttccagaggaccctgaaggtgtttgacctgtctgtggagggcagcctcatcagtgaagatgccatggacaacattgatgagatcctggagaagacagagagctctgtgtgcaaggagctggagatcgccctggtggaccagggagatgctgacaaggagatcatcagcaacacctacagccaggtgctgcagaagatccacagcgaggagcggctgattgccaccgtgcaggccaagtacaaggacagcattgagttcaagaagcagctgattgagtacctgaacaagagccccagcgtggaccacctgctgagcatcaagaagaccctgaagagcctgaaggccctgctgcgctggaagctggtggagaagagcaacctggaggagagtgatgatcctgatggcagccagatcgagaagatcaaggaggagatcacccagctgagaaataatgtgttccaggagatctaccacgagcgggaggagtatgagatgctgaccagcctggcccagaagtggttccctgagctgcccctgctgcaccctgagatcggcctgctgaagtacatgaacagcggcggcctgctgaccatgagcctggagcgggacctgctggatgctgagcccatgaaggagctgagcagcaagaggcccctggtgcgctctgaggtgaatggccagatcatcctgctgaagggctacagcgtggatgtggacacagaggccaaggtgattgagcgggccgccacctaccaccgggcctggagggaggccgagggggacagcggcctgctgcccctcatcttcctgttcctgtgcaagagtgaccccatggcctacctgatggtgccctactacccccgggccaacctgaatgctgtgcaggccaacatgcccctgaacagcgaggagaccctgaaggtgatgaagggcgtggcccagggcctgcacaccctgcacaaggctgacatcatccacggcagcctgcaccagaacaacgtgtttgccctgaaccgggagcagggcatcgtgggggactttgacttcaccaagtctgtgtcccagagggcctctgtgaacatgatggtgggggacctgagcctgatgagccctgagctgaagatgggcaagccagccagccctggcagtgacctgtatgcctacggctgcctgctgctgtgggatgacaaggtgaagagcctgctgtgcagcctcatctgctaccgcagctccatgacagctgagcaggtgctgaatgctgagtgcttcctgatgcccaaggagcagagcgtgcccaaccctgagaaggacacagagtacaccctgtacaagaaggaggaggagatcaagacagagaacctggacaagtgcatggagaagaccagaaatggagaggccaactttgactgctag

SEQ ID NO: 169334 - DNA, 1545 bp, synthetic construct
  misc_feature 1..1545: note = Description of Artificial Sequence: Synthetic coding sequence
  source 1..1545: mol_type = other DNA
atggctgacagcggcctggacaagaagagcaccaagtgcccagactgcagcagcgccagccagaaggatgtgctgtgtgtgtgcagcagcaagaccagggtgccccctgtgctggtggtggagatgagccagaccagcagcatcggcagcgctgagagcctcatcagcctggagaggaagaaggagaagaacatcaacagagacatcaccagcaggaaggacctgcccagcaggaccagcaatgtggagaggaaggccagccagcagcagtggggccggggcaacttcacagagggcaaggtgccccacatcagaattgaaaatggagctgccatcgaggagatctacaccttcggccgcatcctgggcaagggcagctttggaattgtgattgaggccacagacaaggagacagagaccaagtgggccatcaagaaggtgaacaaggagaaggccggcagcagcgctgtgaagctgctggagcgggaggtgaacatcctgaagtctgtgaagcatgagcacatcatccacctggagcaggtgtttgagacccccaagaagatgtacctggtgatggagctgtgtgaagatggagagctgaaggagatcctggacaggaagggccacttctctgaaaatgagacccgctggatcatccagagcctggccagcgccatcgcctacctgcacaacaatgacatcgtgcaccgggacctgaagctggagaacatcatggtgaagagcagcctgattgatgacaacaatgagatcaacctgaacatcaaggtgacagactttggcctggccgtgaagaagcagagccgctctgaggccatgctgcaggccacctgtggcacccccatctacatggcccctgaggtgatcagcgcccatgactacagccagcagtgtgacatctggagcattggagtggtgatgtacatgctgctgcggggggagccccccttcctggccagcagcgaggagaagctgtttgagctgatcagaaaaggagagctgcactttgaaaatgctgtgtggaacagcatcagtgactgtgccaagtctgtgctgaagcagctgatgaaggtggaccctgcccaccgcatcacagccaaggagctgctggacaaccagtggctgaccggcaacaagctgagctctgtgcggcccaccaacgtgctggagatgatgaaggagtggaagaacaaccctgagagcgtggaggagaacaccacagaggagaagaacaagcccagcacagaggagaagctgaagagctaccagccctggggcaatgtgcctgatgccaactacaccagtgatgaggaggaggagaagcagagcacagcctatgagaagcagtttcctgccaccagcaaggacaactttgacatgtgcagcagcagcttcaccagcagcaagctgctgcctgctgagatcaagggggagatggagaagacccctgtgacccccagccagggcacagccaccaagtacccagccaagagcggggccctgagcaggaccaagaagaagctgtag

SEQ ID NO: 169335 - DNA, 1545 bp, synthetic construct; identical to SEQ ID NO: 169334
  misc_feature 1..1545: note = Description of Artificial Sequence: Synthetic coding sequence
  source 1..1545: mol_type = other DNA

SEQ ID NO: 169336 - DNA, 1347 bp, synthetic construct
  misc_feature 1..1347: note = Description of Artificial Sequence: Synthetic coding sequence
  source 1..1347: mol_type = other DNA
atggctgacagcggcctggacaagaagagcaccaagtgcccagactgcagcagcgccagccagaaggatgtgctgtgtgtgtgcagcagcaagaccagggtgccccctgtgctggtggtggagatgagccagaccagcagcatcggcagcgctgagagcctcatcagcctggagaggaagaaggagaagaacatcaacagagacatcaccagcaggaaggacctgcccagcaggaccagcaatgtggagaggaaggccagccagcagcagtggggccggggcaacttcacagagggcaaggtgccccacatcagaattgaaaatggagctgccatcgaggagatctacaccttcggccgcatcctgggcaagggcagctttggaattgtgattgaggccacagacaaggagacagagaccaagtgggccatcaagaaggtgaacaaggagaaggccggcagcagcgctgtgaagctgctggagcgggaggtgaacatcctgaagtctgtgaagcatgagcacatcatccacctggagcaggtgtttgagacccccaagaagatgtacctggtgatggagctgtgtgaagatggagagctgaaggagatcctggacaggaagggccacttctctgaaaatgagacccgctggatcatccagagcctggccagcgccatcgcctacctgcacaacaatgacatcgtgcaccgggacctgaagctggagaacatcatggtgaagagcagcctgattgatgacaacaatgagatcaacctgaacatcaaggtgacagactttggcctggccgtgaagaagcagagccgctctgaggccatgctgcaggccacctgtggcacccccatctacatggcccctgaggtgatcagcgcccatgactacagccagcagtgtgacatctggagcattggagtggtgatgtacatgctgctgcggggggagccccccttcctggccagcagcgaggagaagctgtttgagctgatcagaaaaggagagctgcactttgaaaatgctgtgtggaacagcatcagtgactgtgccaagtctgtgctgaagcagctgatgaaggtggaccctgcccaccgcatcacagccaaggagctgctggacaaccagtggctgaccagcacagcctatgagaagcagtttcctgccaccagcaaggacaactttgacatgtgcagcagcagcttcaccagcagcaagctgctgcctgctgagatcaagggggagatggagaagacccctgtgacccccagccagggcacagccaccaagtacccagccaagagcggggccctgagcaggaccaagaagaagctgtag

SEQ ID NO: 169337 - DNA, 192 bp, synthetic construct
  misc_feature 1..192: note = Description of Artificial Sequence: Synthetic coding sequence
  source 1..192: mol_type = other DNA
atggctgacagcggcctggacaagaagagcaccaagtgcccagactgcagcagcgccagccagaaggatgtgctgtgtgtgtgcagcagcaagaccagggtgccccctgtgctggtggtggagatgagccagaccagcagcatcggcagcgctgagagcctcatcagcctggagaggaagaaggagaagtag

SEQ ID NO: 169338 - DNA, 1545 bp, synthetic construct; identical to SEQ ID NO: 169334
  misc_feature 1..1545: note = Description of Artificial Sequence: Synthetic coding sequence
  source 1..1545: mol_type = other DNA

SEQ ID NO: 169339 - DNA, 114 bp, synthetic construct
  misc_feature 1..114: note = Description of Artificial Sequence: Synthetic coding sequence
  source 1..114: mol_type = other DNA
atggctgacagcggcctggacaagaagagcaccaagtgcccagactgcagcagcgccagccagaaggatgtgctgtgtgtgtgcagcagcaagaccagggtgccccctgtgtag

SEQ ID NO: 169340 - DNA, 516 bp, synthetic construct
  misc_feature 1..516: note = Description of Artificial Sequence: Synthetic coding sequence
  source 1..516: mol_type = other DNA
atggctgacagcggcctggacaagaagagcaccaagtgcccagactgcagcagcgccagccagaaggatgtgctgtgtgtgtgcagcagcaagaccagggtgccccctgtgctggtggtggagatgagccagaccagcagcatcggcagcgctgagagcctcatcagcctggagaggaagaaggagaagaacatcaacagagacatcaccagcaggaaggacctgcccagcaggaccagcaatgtggagaggaaggccagccagcagcagtggggccggggcaacttcacagagggcaaggtgccccacatcagaattgaaaatggagctgccatcgaggagatctacaccttcggccgcatcctgggcaagggcagctttggaattgtgattgaggccacagacaaggagacagagaccaagtgggccatcaagaaggtgaacaaggagaaggccggcagcagcgctgtgaagctgctggagcgggaggtgaacatcctgaagtctgtgaagtag

SEQ ID NO: 169341 - DNA, 90 bp, synthetic construct
  misc_feature 1..90: note = Description of Artificial Sequence: Synthetic coding sequence
  source 1..90: mol_type = other DNA
atggctgacagcggcctggacaagaagagcaccaagtgcccagactgcagcagcgccagccagaaggatgtgctgtgtgtgtgcagctag

SEQ ID NO: 169342 - DNA, 1206 bp, synthetic construct
  misc_feature 1..1206: note = Description of Artificial Sequence: Synthetic coding sequence
  source 1..1206: mol_type = other DNA
atggagaccgggaaggatggagcccggcggggcacccagagccctgagaggaagagaagaagccctgtgccccgggcccccagcaccaagctgcggcctgctgctgctgcccgggccatggaccctgtggccgctgaggcccctggagaggccttcctggcccggcggcggcctgagggcggcggcggcagcgcccggccccgctacagcctgctggccgagatcggccggggcagctatggagtggtgtatgaggccgtggccggccgcagcggggcccgggtggccgtgaagaagatccgctgtgatgccccagaaaatgtggagctggccctggccgagttctgggccctgaccagcctgaagagaagacaccagaatgtggtgcagtttgaagaatgtgtgctgcagagaaatggcctggcccagaggatgagccacggcaacaagagcagccagctgtacctgcggctggtggagaccagcctgaagggggagcgcatcctgggctacgccgaggagccctgctacctgtggtttgtgatggagttctgtgagggcggggacctgaaccagtatgtgctgagcagaagaccagaccctgccaccaacaagagcttcatgctgcagctgaccagcgccatcgccttcctgcacaagaaccacatcgtgcaccgggacctgaagccagacaacatcctgatcacagagaggagcggcacccccatcctgaaggtggccgactttggcctgagcaaggtgtgtgccggcctggccccccggggcaaggagggcaaccaggacaacaagaatgtgaatgtgaacaagtactggctgagcagcgcctgtggcagtgacttctacatggcccctgaggtgtgggagggccactacacagccaaggctgacatctttgccctgggcatcatcatctgggccatgattgagcgcatcaccttcattgattctgagaccaagaaggagctgctgggcacctacatcaagcagggcacagagatcgtgcctgtgggggaggccctgctggagaaccccaagatggagctgcacatcccccagaagaggaggacctccatgtctgagggcatcaagcagctgctgaaggacatgctggccgccaacccccaggacagaccagatgcctttgagctggagaccaggatggaccaggtgacctgtgccgcctag

SEQ ID NO: 169343 - DNA, 1605 bp, synthetic construct
  misc_feature 1..1605: note = Description of Artificial Sequence: Synthetic coding sequence
  source 1..1605: mol_type = other DNA
atgggccaccaggagagccccctggcccgggccccagctggaggagctgcctacgtgaagaggctgtgcaagggcctgtcctggagggagcacgtggagagccacggcagcctgggcgcccaggccagccctgccagcgctgctgctgctgagggcagcgccacccggcgggcccgggccgccaccagcagagctgcccggagccggcggcagcccggccctggagctgaccacccccaggccggggcccctgggggcaagagagctgccaggaagtggaggtgtgccggccaggtgaccatccagggccctgccccaccccggcccagggctggaagaagagatgaagctggaggagcccgggccgcccccctgctgctgcccccacctcctgctgccatggagaccgggaaggatggagcccggcggggcacccagagccctgagaggaagaggaggagccctgtgccccgggcccccagcaccaagctgcggcctgctgctgctgcccgggccatggaccctgtggccgctgaggcccctggagaggccttcctggccaggagaagacctgagggcggcggcggcagcgcccggccccgctacagcctgctggccgagatcggccggggcagctatggagtggtgtatgaagctgtggccggccgcagcggggcccgggtggccgtgaagaagatccgctgtgatgccccagaaaatgtggagctggccctggccgagttctgggccctgaccagcctgaagaggaggcaccagaatgtggtgcagtttgaggagtgtgtgctgcagagaaatggcctggcccagaggatgagccacggcaacaagagcagccagctgtacctgcggctggtggagaccagcctgaagggggagcgcatcctgggctatgcagaggagccctgctacctgtggtttgtgatggagttctgtgagggcggggacctgaaccagtatgtgctgagccggcggccagaccctgccaccaacaagagcttcatgctgcagctgaccagcgccatcgccttcctgcacaagaaccacatcgtgcaccgggacctgaagccagacaacatcctgatcacagagaggagcggcacccccatcctgaaggtggccgactttggcctgagcaaggtgtgtgccggcctggccccccggggcaaggagggcaaccaggacaacaagaatgtgaatgtgaacaagtactggctgagcagcgcctgtggcagtgacttctacatggcccctgaggtgtgggagggccactacacagccaaggctgacatctttgccctgggcatcatcatctgggccatgattgaaagaatcaccttcatcgacagcgagaccaagaaggagctgctgggcacctacatcaagcagggcacagaaattgtgcctgtgggggaggccctgctggagaaccccaagatggagctgcacatcccccagaagaggaggacctccatgtctgagggcatcaagcagctgctgaaggacatgctggccgccaacccccaggacagaccagatgcctttgagctggagaccaggatggaccaggtgacctgtgccgcctag

SEQ ID NO: 169344 - DNA, 489 bp, synthetic construct
  misc_feature 1..489: note = Description of Artificial Sequence: Synthetic coding sequence
  source 1..489: mol_type = other DNA
atggaccctgtggccgctgaggcccctggagaggccttcctggccaggagaagacctgagggcggcggcggcagcgcccggccccgctacagcctgctggccgagatcggccggggcagctatggagtggtgtatgaagctgtggccggccgcagcggggcccgggtggccgtgaagaagatccgctgtgatgccccagaaaatgtggagctggccctggccgagttctgggccctgaccagcctgaagaggaggcaccagaatgtggtgcagtttgaggagtgtgtgctgcagagaaatggcctggcccagaggatgagccacggcaacaagagcagccagctgtacctgcggctggtggagaccagcctgaagggccgcttcctgggcacccacagcctgaccaccagccccccagaagatggccggggctaccgctggtggccaggccgcctggccatcagccggcagctggaccctgccatgtag

SEQ ID NO: 169345 - DNA, 3948 bp, synthetic construct
  misc_feature 1..3948: note = Description of Artificial Sequence: Synthetic coding sequence
  source 1..3948: mol_type = other DNA
atggagaagtaccacgtgctggagatgattggagagggcagctttggccgggtgtacaagggccgcaggaagtacagcgcccaggtggtggccctgaagttcatccccaagctgggccgctctgagaaggagctgaggaacctgcagcgggagattgagatcatgaggggcctgcggcaccccaacatcgtgcacatgctggacagctttgaaacagacaaggaggtggtggtggtgacagattatgcagagggggagctgttccagatcctggaggatgatggcaagctgcctgaggaccaggtgcaggccatcgccgcccagctggtgtctgccctgtactacctgcacagccaccgcatcctgcaccgggacatgaagccccagaacatcctgctggccaagggcggcggcatcaagctgtgtgactttggatttgcccgggccatgagcaccaacaccatggtgctgaccagcatcaagggcacccccctgtacatgagccctgagctggtggaggagcggccctatgaccacacagctgacctgtggagcgtgggctgcatcctgtatgagctggccgtgggcaccccacccttctacgccaccagcatcttccagctggtgtccctcatcctgaaggaccctgtgcgctggcccagcaccatcagcccctgcttcaagaacttcctgcagggcctgctgaccaaggacccccggcagaggctgtcctggccagacctgctgtaccaccccttcatcgccggccacgtgaccatcatcacagagcctgctggccctgacctgggcacccccttcaccagccggctgcccccagagctgcaggtgctgaaggatgagcaggcccaccggctggcccccaagggcaaccagagccgcatcctgacccaggcctacaagaggatggccgaggaggccatgcagaagaagcaccagaacacaggccctgccctggagcaggaggacaagaccagcaaggtggcccctggaacagcccccctgccccggctgggcgccaccccccaggagagcagcctgctggccggcatcctggccagcgagctgaagagctcctgggccaagtctggaactggagaggtgcccagcgccccccgggagaacagaaccaccccagactgtgagcgggccttccctgaggagaggcctgaggtgctgggccagaggagcacagatgtggtggacctggagaatgaggagccagacagcgacaatgagtggcagcacctgctggagaccacagagcctgtgcccatccagctgaaggcccccctgaccctgctgtgcaacccagacttctgccagaggatccagagccagctgcatgaagctgggggccagatcctgaagggcatcctggagggcgccagccacatcctgcctgccttccgggtgctgagcagcctgctgagcagctgcagcgacagcgtggccctgtacagcttctgccgggaggccggcctgcccggcctgctgctgagcctgctgcggcacagccaggagagcaacagcctgcagcagcagagctggtacggcaccttcctgcaggacctgatggctgtgatccaggcctactttgcctgcaccttcaacctggagaggagccagaccagtgacagcctgcaggtgttccaggaggccgccaacctcttcctggacctgctgggcaagctgctggcccagccagatgacagcgagcagaccctgcggcgggacagcctgatgtgcttcaccgtgctgtgtgaggccatggatggcaacagccgggccatcagcaaggccttctacagcagcctgctgaccacccagcaggtggtgctggatggcctgctgcacggcctgactgtgccccagctgcctgtgcacaccccccagggcgccccccaggtgtcccagcccctgcgggagcagagcgaggacatccctggggccatcagcagcgccctggccgccatctgcacagcccctgtgggcctgcctgactgctgggatgccaaggagcaggtgtgctggcacctggccaaccagctgacagaggacagcagccagctgcggcccagcctcatcagcggcctgcagcaccccatcctgtgcctgcacctgctgaaggtgctgtacagctgctgcctggtgtctgagggcctgtgccgcctgctgggccaggagcccctggccctggagagcctcttcatgctgatccagggcaaggtgaaggtggtggactgggaggagagcacagaggtgaccctgtacttcctgagcctgctggtgttccggctgcagaacctgccctgtggcatggagaagctgggcagtgatgtggccaccctcttcacccacagccacgtggtgtccctggtgtctgctgctgcctgcctgctgggccagctgggccagcagggcgtgacctttgacctgcagcccatggagtggatggctgctgccacccacgccctgagcgccccagctgaggtgcggctgaccccacctggcagctgtggcttctatgatggcctgctgatcctgctgctgcagctgctgacagagcagggcaaggccagcctcatccgggacatgagcagcagcgagatgtggacagtgctgtggcaccgcttctccatggtgctgcggctgcctgaggaggccagcgcccaggagggggagctgagcctgagcagcccccccagccctgagccagactggaccctcatcagcccccagggcatggccgccctgctgagcctggccatggccaccttcacccaggagccccagctgtgcctgagctgcctgagccagcacggcagcatcctgatgagcatcctgaagcacctgctgtgccccagcttcctgaaccagctgcggcaggccccccacggcagcgagttcctgcctgtggtggtgctgtctgtgtgccagctgctgtgcttcccctttgccctggacatggatgctgacctgctgattggagtgctggccgacctgcgggacagcgaggtggccgcccacctgctgcaggtgtgctgctaccacctgcccctgatgcaggtggagctgcccatcagcctgctgacccggctggccctgatggaccccaccagcctgaaccagtttgtgaacacagtgtctgccagccccaggaccatcgtgtccttcctgtctgtggccctgctgagtgaccagcccctgctgaccagtgacctgctgagcctgctggcccacacagcccgggtgctgagccccagccacctgtccttcatccaggagctgctggccggcagtgatgagagctaccggcccctgcggagcctgctgggccaccctgagaacagcgtgcgggcccacacctaccgcctgctgggccacctgctgcagcacagcatggccctgcggggggccctgcagagccagagcggcctgctgagcctgctgctgctgggcctgggggacaaggaccctgtggtgcgctgcagcgccagctttgctgtgggcaatgctgcctaccaggccggccccctgggccctgccctggccgctgctgtgcccagcatgacccagctgctgggggacccccaggccggcatcagaagaaatgtggccagcgccctgggcaacctgggccctgagggcctgggggaggagctgctgcagtgtgaggtgccccagaggctgctggagatggcctgtggggacccccagcccaacgtgaaggaggccgccctgattgccctgcggagcctgcagcaggagcccggcatccaccaggtgctggtgtccctgggcgccagcgagaagctgagcctgctgagcctgggcaaccagagcctgccccacagcagccccaggcctgccagcgccaagcactgcaggaagctgatccacctgctgcggcctgcccacagcatgtag

SEQ ID NO: 169346 - DNA, 3885 bp, synthetic construct
  misc_feature 1..3885: note = Description of Artificial Sequence: Synthetic coding sequence
  source 1..3885: mol_type = other DNA
atggagaagtaccacgtgctggagatgattggagagggcagctttggccgggtgtacaagggccgcaggaagtacagcgcccaggtggtggccctgaagttcatccccaagctgggccgctctgagaaggagctgaggaacctgcagcgggagattgagatcatgaggggcctgcggcaccccaacatcgtgcacatgctggacagctttgaaacagacaaggaggtggtggtggtgacagattatgcagagggggagctgttccagatcctggaggatgatggcaagctgcctgaggaccaggtgcaggccatcgccgcccagctggtgtctgccctgtactacctgcacagccaccgcatcctgcaccgggacatgaagccccagaacatcctgctggccaagggcggcggcatcaagctgtgtgactttggatttgcccgggccatgagcaccaacaccatggtgctgaccagcatcaagggcacccccctgtacatgagccctgagctggtggaggagcggccctatgaccacacagctgacctgtggagcgtgggctgcatcctgtatgagctggccgtgggcaccccacccttctacgccaccagcatcttccagctggtgtccctcatcctgaaggaccctgtgcgctggcccagcaccatcagcccctgcttcaagaacttcctgcagggcctgctgaccaaggacccccggcagaggctgtcctggccagacctgctgtaccaccccttcatcgccggccacgtgaccatcatcacagagcctgctggccctgacctgggcacccccttcaccagccggctgcccccagagctgcaggtgctgaaggatgagcaggcccaccggctggcccccaagggcaaccagagccgcatcctgacccaggcctacaagaggatggccgaggaggccatgcagaagaagcaccagaacacaggccctgccctggagcaggaggacaagaccagcaaggtggcccctggaacagcccccctgccccggctgggcgccaccccccaggagagcagcctgctggccggcatcctggccagcgagctgaagagctcctgggccaagtctggaactggagaggtgcccagcgccccccgggagaacagaaccaccccagactgtgagcgggccttccctgaggagaggcctgaggtgctgggccagaggagcacagatgtggtggacctggagaatgaggagccagacagcgacaatgagtggcagcacctgctggagaccacagagcctgtgcccatccagctgaaggcccccctgaccctgctgtgcaacccagacttctgccagaggatccagagccagctgcatgaagctgggggccagatcctgaagggcatcctggagggcgccagccacatcctgcctgccttccgggtgctgagcagcctgctgagcagctgcagcgacagcgtggccctgtacagcttctgccgggaggccggcctgcccggcctgctgctgagcctgctgcggcacagccaggagagcaacagcctgcagcagcagagctggtacggcaccttcctgcaggacctgatggctgtgatccaggcctactttgcctgcaccttcaacctggagaggagccagaccagtgacagcctgcaggtgttccaggaggccgccaacctcttcctggacctgctgggcaagctgctggcccagccagatgacagcgagcagaccctgcggcgggacagcctgatgtgcttcaccgtgctgtgtgaggccatggatggcaacagccgggccatcagcaaggccttctacagcagcctgctgaccacccagcaggtggtgctggatggcctgctgcacggcctgactgtgccccagctgcctgtgcacaccccccagggcgccccccaggtgtcccagcccctgcgggagcagagcgaggacatccctggggccatcagcagcgccctggccgccatctgcacagcccctgtgggcctgcctgactgctgggatgccaaggagcaggtgtgctggcacctggccaaccagctgacagaggacagcagccagctgcggcccagcctcatcagcggcctgcagcaccccatcctgtgcctgcacctgctgaaggtgctgtacagctgctgcctggtgtctgagggcctgtgccgcctgctgggccaggagcccctggccctggagagcctcttcatgctgatccagggcaaggtgaaggtggtggactgggaggagagcacagaggtgaccctgtacttcctgagcctgctggtgttccggctgcagaacctgccctgtggcatggagaagctgggcagtgatgtggccaccctcttcacccacagccacgtggtgtccctggtgtctgctgctgcctgcctgctgggccagctgggccagcagggcgtgacctttgacctgcagcccatggagtggatggctgctgccacccacgccctgagcgccccagctgagctgctgacagagcagggcaaggccagcctcatccgggacatgagcagcagcgagatgtggacagtgctgtggcaccgcttctccatggtgctgcggctgcctgaggaggccagcgcccaggagggggagctgagcctgagcagcccccccagccctgagccagactggaccctcatcagcccccagggcatggccgccctgctgagcctggccatggccaccttcacccaggagccccagctgtgcctgagctgcctgagccagcacggcagcatcctgatgagcatcctgaagcacctgctgtgccccagcttcctgaaccagctgcggcaggcccctcatggcagcgagttcctgcctgtggtggtgctgtctgtgtgccagctgctgtgcttcccctttgccctggacatggatgctgacctgctgattggagtgctggccgacctgcgggacagcgaggtggccgcccacctgctgcaggtgtgctgctaccacctgcccctgatgcaggtggagctgcccatcagcctgctgacccggctggccctgatggaccccaccagcctgaaccagtttgtgaacacagtgtctgccagccccaggaccatcgtgtccttcctgtctgtggccctgctgagtgaccagcccctgctgaccagtgacctgctgagcctgctggcccacacagcccgggtgctgagccccagccacctgtccttcatccaggagctgctggccggcagtgatgagagctaccggcccctgcggagcctgctgggccacccagaaaattctgtgcgggcccacacctaccgcctgctgggccacctgctgcagcacagcatggccctgcggggggccctgcagagccagagcggcctgctgagcctgctgctgctgggcctgggggacaaggaccctgtggtgcgctgcagcgccagctttgctgtgggcaatgctgcctaccaggccggccccctgggccctgccctggccgctgctgtgcccagcatgacccagctgctgggggacccccaggccggcatcagaagaaatgtggccagcgccctgggcaacctgggccctgagggcctgggggaggagctgctgcagtgtgaggtgccccagaggctgctggagatggcctgtggggacccccagcccaacgtgaaggaggccgccctgattgccctgcggagcctgcagcaggagcccggcatccaccaggtgctggtgtccctgggcgccagcgagaagctgagcctgctgagcctgggcaaccagagcctgccccacagcagccccaggcctgccagcgccaagcactgcaggaagctgatccacctgctgcggcctgcccacagcatgtag

SEQ ID NO: 169347 - DNA, 3885 bp, synthetic construct
  misc_feature 1..3885: note = Description of Artificial Sequence: Synthetic coding sequence
  source 1..3885: mol_type = other DNA
atggagaagtaccacgtgctggagatgattggagagggcagctttggccgggtgtacaagggccgcaggaagtacagcgcccaggtggtggccctgaagttcatccccaagctgggccgctctgagaaggagctgaggaacctgcagcgggagattgagatcatgaggggcctgcggcaccccaacatcgtgcacatgctggacagctttgaaacagacaaggaggtggtggtggtgacagattatgcagagggggagctgttccagatcctggaggatgatggcaagctgcctgaggaccaggtgcaggccatcgccgcccagctggtgtctgccctgtactacctgcacagccaccgcatcctgcaccgggacatgaagccccagaacatcctgctggccaagggcggcggcatcaagctgtgtgactttggatttgcccgggccatgagcaccaacaccatggtgctgaccagcatcaagggcacccccctgtacatgagccctgagctggtggaggagcggccctatgaccacacagctgacctgtggagcgtgggctgcatcctgtatgagctggccgtgggcaccccacccttctacgccaccagcatcttccagctggtgtccctcatcctgaaggaccctgtgcgctggcccagcaccatcagcccctgcttcaagaacttcctgcagggcctgctgaccaaggacccccggcagaggctgtcctggccagacctgctgtaccaccccttcatcgccggccacgtgaccatcatcacagagcctgctggccctgacctgggcacccccttcaccagccggctgcccccagagctgcaggtgctgaaggatgagcaggcccaccggctggcccccaagggcaaccagagccgcatcctgacccaggcctacaagaggatggccgaggaggccatgcagaagaagcaccagaacacaggccctgccctggagcaggaggacaagaccagcaaggtggcccctggaacagcccccctgccccggctgggcgccaccccccaggagagcagcctgctggccggcatcctggccagcgagctgaagagctcctgggccaagtctggaactggagaggtgcccagcgccccccgggagaacagaaccaccccagactgtgagcgggccttccctgaggagaggcctgaggtgctgggccagaggagcacagatgtggtggacctggagaatgaggagccagacagcgacaatgagtggcagcacctgctggagaccacagagcctgtgcccatccagctgaaggcccccctgaccctgctgtgcaacccagacttctgccagaggatccagagccagctgcatgaagctgggggccagatcctgaagggcatcctggagggcgccagccacatcctgcctgccttccgggtgctgagcagcctgctgagcagctgcagcgacagcgtggccctgtacagcttctgccgggaggccggcctgcccggcctgctgctgagcctgctgcggcacagccaggagagcaacagcctgcagcagcagagctggtacggcaccttcctgcaggacctgatggctgtgatccaggcctactttgcctgcaccttcaacctggagaggagccagaccagtgacagcctgcaggtgttccaggaggccgccaacctcttcctggacctgctgggcaagctgctggcccagccagatgacagcgagcagaccctgcggcgggacagcctgatgtgcttcaccgtgctgtgtgaggccatggatggcaacagccgggccatcagcaaggccttctacagcagcctgctgaccacccagcaggtggtgctggatggcctgctgcacggcctgactgtgccccagctgcctgtgcacaccccccagggcgccccccaggtgtcccagcccctgcgggagcagagcgaggacatccctggggccatcagcagcgccctggccgccatctgcacagcccctgtgggcctgcctgactgctgggatgccaaggagcaggtgtgctggcacctggccaaccagctgacagaggacagcagccagctgcggcccagcctcatcagcggcctgcagcaccccatcctgtgcctgcacctgctgaaggtgctgtacagctgctgcctggtgtctgagggcctgtgccgcctgctgggccaggagcccctggccctggagagcctcttcatgctgatccagggcaaggtgaaggtggtggactgggaggagagcacagaggtgaccctgtacttcctgagcctgctggtgttccggctgcagaacctgccctgtggcatggagaagctgggcagtgatgtggccaccctcttcacccacagccacgtggtgtccctggtgtctgctgctgcctgcctgctgggccagctgggccagcagggcgtgacctttgacctgcagcccatggagtggatggctgctgccacccacgccctgagcgccccagctgagatgagctgtgagcagggcaaggccagcctcatccgggacatgagcagcagcgagatgtggacagtgctgtggcaccgcttctccatggtgctgcggctgcctgaggaggccagcgcccaggagggggagctgagcctgagcagcccccccagccctgagccagactggaccctcatcagcccccagggcatggccgccctgctgagcctggccatggccaccttcacccaggagccccagctgtgcctgagctgcctgagccagcacggcagcatcctgatgagcatcctgaagcacctgctgtgccccagcttcctgaaccagctgcggcaggcccctcatggcagcgagttcctgcctgtggtggtgctgtctgtgtgccagctgctgtgcttcccctttgccctggacatggatgctgacctgctgattggagtgctggccgacctgcgggacagcgaggtggccgcccacctgctgcaggtgtgctgctaccacctgcccctgatgcaggtggagctgcccatcagcctgctgacccggctggccctgatggaccccaccagcctgaaccagtttgtgaacacagtgtctgccagccccaggaccatcgtgtccttcctgtctgtggccctgctgagtgaccagcccctgctgaccagtgacctgctgagcctgctggcccacacagcccgggtgctgagccccagccacctgtccttcatccaggagctgctggccggcagtgatgagagctaccggcccctgcggagcctgctgggccacccagaaaattctgtgcgggcccacacctaccgcctgctgggccacctgctgcagcacagcatggccctgcggggggccctgcagagccagagcggcctgctgagcctgctgctgctgggcctgggggacaaggaccctgtggtgcgctgcagcgccagctttgctgtgggcaatgctgcctaccaggccggccccctgggccctgccctggccgctgctgtgcccagcatgacccagctgctgggggacccccaggccggcatcagaagaaatgtggccagcgccctgggcaacctgggccctgagggcctgggggaggagctgctgcagtgtgaggtgccccagaggctgctggagatggcctgtggggacccccagcccaacgtgaaggaggccgccctgattgccctgcggagcctgcagcaggagcccggcatccaccaggtgctggtgtccctgggcgccagcgagaagctgagcctgctgagcctgggcaaccagagcctgccccacagcagccccaggcctgccagcgccaagcactgcaggaagctgatccacctgctgcggcctgcccacagcatgtag

SEQ ID NO: 169348 - DNA, 840 bp, synthetic construct
  misc_feature 1..840: note = Description of Artificial Sequence: Synthetic coding sequence
  source 1..840: mol_type = other DNA
atggagaagtaccacgtgctggagatgattggagagggcagctttggccgggtgtacaagggccgcaggaagtacagcgcccaggtggtggccctgaagttcatccccaagctgggccgctctgagaaggagctgaggaacctgcagcgggagattgagatcatgaggggcctgcggcaccccaacatcgtgcacatgctggacagctttgaaacagacaaggaggtggtggtggtgacagattatgcagagggggagctgttccagatcctggaggatgatggcaagctgcctgaggaccaggtgcaggccatcgccgcccagctggtgtctgccctgtactacctgcacagccaccgcatcctgcaccgggacatgaagccccagaacatcctgctggccaagggcggcggcatcaagctgtgtgactttggatttgcccgggccatgagcaccaacaccatggtgctgaccagcatcaagggcacccccctgtacatgagccctgagctggtggaggagcggccctatgaccacacagctgacctgtggagcgtgggctgcatcctgtatgagctggccgtgggcaccccacccttctacgccaccagcatcttccagctggtgtccctcatcctgaaggaccctgtgcgctggcccagcaccatcagcccctgcttcaagaacttcctgcagggcctgctgaccaaggacccccggcagaggctgtcctggccagacctgctgtaccaccccttcatcgccggccacgtgaccatcatcacagagcctgctggccctgacctgggcacccccttcaccagccggctgcccccatag

SEQ ID NO: 169349 - DNA, 3948 bp, synthetic construct; identical to SEQ ID NO: 169345
  misc_feature 1..3948: note = Description of Artificial Sequence: Synthetic coding sequence
  source 1..3948: mol_type = other DNA

SEQ ID NO: 169350 - DNA, 1056 bp, synthetic construct
  misc_feature 1..1056: note = Description of Artificial Sequence: Synthetic coding sequence
  source 1..1056: mol_type = other DNA
atgaggttcaccttccccctgatggccatcgtgctggagatcgccatgattgtgctgtttggcctgtttgtggagtatgaaacagaccagacagtgctggagcagctgaacatcaccaagcccacagacatgggcatcttctttgagctgtaccccctcttccaggatgtgcacgtgatgatctttgtgggcttcggcttcctgatgaccttcctgaagaagtatggcttcagctctgtgggcatcaacctgctggtggccgccctgggcctgcagtggggcaccatcgtgcagggcatcctgcagagccagggccagaagttcaacatcggcatcaagaacatgatcaatgctgacttctctgctgccaccgtgctgatcagctttggagctgtgctgggcaagaccagccccacccagatgctgatcatgaccatcctggagatcgtgttctttgcccacaatgagtacctggtgtctgagatcttcaaggccagtgacatcggggcctccatgaccatccacgcctttggagcctacttcggcctggccgtggccggcatcctgtaccgcagcggcctgaggaagggccatgaaaatgaggagagcgcctactacagcgacctgtttgccatgattggcaccctcttcctgtggatgttctggcccagcttcaacagcgccatcgccgagcccggggacaagcagtgccgggccatcgtgaacacctacttcagcctggccgcctgtgtgctgacagcctttgccttcagcagcctggtggagcaccggggcaagctgaacatggtgcacatccagaatgccaccctggccggcggcgtggccgtgggcacctgtgccgacatggccatccaccccttcggctccatgatcatcggcagcattgctggcatggtgtctgtgctgggctacaagttcctgactgtgtatggccacgccggcagctgcaccggcttcctgtacagaaacagcagctgctggaggagtgatgaccgcttcaacagcaaggtggccagcctgggcacagccatctag

SEQ ID NO: 169351 - DNA, 1389 bp, synthetic construct
  misc_feature 1..1389: note = Description of Artificial Sequence: Synthetic coding sequence
  source 1..1389: mol_type = other DNA
atggagaccgtgcagctgagaaatccaccccggcggcagctgaagaagctggatgaggacagcctgaccaagcagcctgaggaggtgtttgatgtgctggagaagctgggggagggcagctatggctctgtgtacaaggccatccacaaggagaccggccagatcgtggccatcaagcaggtgcctgtggagagtgacctgcaggagatcatcaaggagatcagcatcatgcagcagtgtgacagcccccacgtggtgaagtactacggcagctacttcaagaacacagacctgtggatcgtgatggagtactgtggggccggctctgtgtctgacatcatccggctgaggaacaagaccctgacagaagatgagatcgccaccatcctgcagagcaccctgaagggcctggagtacctgcacttcatgaggaagatccaccgggacatcaaggccggcaacatcctgctgaacacagagggccacgccaagctggccgactttggagtggccggccagctgacagacaccatggccaagaggaacacagtgattggcacccccttctggatggcccctgaggtgatccaggagatcggctacaactgtgtggccgacatctggagcctgggcatcacagccatcgagatggccgagggcaagccaccctatgctgacatccaccccatgagggccatcttcatgatccccaccaaccccccacccaccttcaggaagccagagctgtggagcgacaacttcacagactttgtgaagcagtgcctggtgaagagccctgagcagagggccacagccacccagctgctgcagcacccctttgtgcgcagcgccaagggcgtgtccatcctgcgggacctgatcaatgaggccatggatgtgaagctgaagaggcaggagagccagcagcgggaggtggaccaggatgatgaggagaacagcgaggaggatgagatggattctggcaccatggtgcgggctgtgggagatgagatgggcaccgtgcgggtggccagcaccatgacagatggagccaacaccatgattgaacatgatgacaccctgcccagccagctgggcaccatggtgatcaatgcagaagatgaggaggaggagggcaccatgaagagaagagatgagaccatgcagcctgccaagcccagcttcctggagtactttgagcagaaggagaaggagaaccagatcaacagctttgggaagtctgtgcccggccccctgaagaacagcagtgactggaagatcccccaggatggagactatgagttcaagaccagccaggagcagcagagcggcaaggacatctgcatccagaactgccagggcaacctgctgtgccgctatgccttctag

SEQ ID NO: 169352 - DNA, 1464 bp, synthetic construct
  misc_feature 1..1464: note = Description of Artificial Sequence: Synthetic coding sequence
  source 1..1464: mol_type = other DNA
atggagaccgtgcagctgagaaatccaccccggcggcagctgaagaagctggatgaggacagcctgaccaagcagcctgaggaggtgtttgatgtgctggagaagctgggggagggcagctatggctctgtgtacaaggccatccacaaggagaccggccagatcgtggccatcaagcaggtgcctgtggagagtgacctgcaggagatcatcaaggagatcagcatcatgcagcagtgtgacagcccccacgtggtgaagtactacggcagctacttcaagaacacagacctgtggatcgtgatggagtactgtggggccggctctgtgtctgacatcatccggctgaggaacaagaccctgacagaagatgagatcgccaccatcctgcagagcaccctgaagggcctggagtacctgcacttcatgaggaagatccaccgggacatcaaggccggcaacatcctgctgaacacagagggccacgccaagctggccgactttggagtggccggccagctgacagacaccatggccaagaggaacacagtgattggcacccccttctggatggcccctgaggtgatccaggagatcggctacaactgtgtggccgacatctggagcctgggcatcacagccatcgagatggccgagggcaagccaccctatgctgacatccaccccatgagggccatcttcatgatccccaccaaccccccacccaccttcaggaagccagagctgtggagcgacaacttcacagactttgtgaagcagtgcctggtgaagagccctgagcagagggccacagccacccagctgctgcagcacccctttgtgcgcagcgccaagggcgtgtccatcctgcgggacctgatcaatgaggccatggatgtgaagctgaagaggcaggagagccagcagcgggaggtggaccaggatgatgaggagaacagcgaggaggatgagatggattctggcaccatggtgcgggctgtgggagatgagatgggcaccgtgcgggtggccagcaccatgacagatggagccaacaccatgattgaacatgatgacaccctgcccagccagctgggcaccatggtgatcaatgcagaagatgaggaggaggagggcaccatgaagagaagagatgagaccatgcagcctgccaagcccagcttcctggagtactttgagcagaaggagaaggagaaccagatcaacagctttgggaagtctgtgcccggccccctgaagaacagcagtgactggaagatcccccaggatggagactatgagttcctgaagtcctggacagtggaggacctgcagaagaggctgctggccctggaccccatgatggagcaggagattgaggagatccggcagaagtaccagagcaagaggcagcccatcctggatgccatcgaggccaagaagaggcggcagcagaacttctag

SEQ ID NO: 169353 - DNA, 1389 bp, synthetic construct; identical to SEQ ID NO: 169351
  misc_feature 1..1389: note = Description of Artificial Sequence: Synthetic coding sequence
  source 1..1389: mol_type = other DNA

SEQ ID NO: 169354 - DNA, 1299 bp, synthetic construct
  misc_feature 1..1299: note = Description of Artificial Sequence: Synthetic coding sequence
  source 1..1299: mol_type = other DNA
atggagaccgtgcagctgagaaatccaccccggcggcagctgaagaagctggatgaggacagcctgaccaagcagcctgaggaggtgtttgatgtgctggagaagctgggggagggcagctatggctctgtgtacaaggccatccacaaggagaccggccagatcgtggccatcaagcaggtgcctgtggagagtgacctgcaggagatcatcaaggagatcagcatcatgcagcagtgtgacagcccccacgtggtgaagtactacggcagctacttcaagaacacagacctgtggatcgtgatggagtactgtggggccggctctgtgtctgacatcatccggctgaggaacaagacagacaccatggccaagaggaacacagtcatcggcacccccttctggatggcccctgaggtgatccaggagatcggctacaactgtgtggccgacatctggagcctgggcatcacagccatcgagatggccgagggcaagccaccctatgctgacatccaccccatgagggccatcttcatgatccccaccaaccccccacccaccttcaggaagccagagctgtggagcgacaacttcacagactttgtgaagcagtgcctggtgaagagccctgagcagagggccacagccacccagctgctgcagcacccctttgtgcgcagcgccaagggcgtgtccatcctgcgggacctgatcaatgaggccatggatgtgaagctgaagaggcaggagagccagcagcgggaggtggaccaggatgatgaagaaaattctgaagaagatgagatggacagcggcaccatggtgcgggctgtgggagatgagatgggcaccgtgcgggtggccagcaccatgacagatggagccaacaccatgattgaacatgatgacaccctgcccagccagctgggcaccatggtgatcaatgcagaagatgaggaggaggagggcaccatgaagagaagagatgagaccatgcagcctgccaagcccagcttcctggagtactttgagcagaaggagaaggagaaccagatcaacagctttgggaagtctgtgcccggccccctgaagaacagcagtgactggaagatcccccaggatggagactatgagttcctgaagtcctggacagtggaggacctgcagaagaggctgctggccctggaccccatgatggagcaggagattgaggagatccggcagaagtaccagagcaagaggcagcccatcctggatgccatcgaggccaagaagaggcggcagcagaacttctag

SEQ ID NO: 169355 - DNA, 1254 bp, synthetic construct
  misc_feature 1..1254: note = Description of Artificial Sequence: Synthetic coding sequence
  source 1..1254: mol_type = other DNA
atgaagagaagagccagtgacagaggagctggggagaccagcgcccgggccaaggccctgggcagcggcatcagcggcaacaatgccaagagagctggccccttcatcctgggcccccggctgggcaacagccctgtgcccagcatcgtgcagtgcctggccaggaaggatggaacagatgacttctaccagctgaagatcctgaccctggaggagcggggggaccagggcatcgagagccaggaggagcggcagggcaagatgctgctgcacacagagtacagcctgctgagcctgctgcacacccaggatggagtggtgcaccaccacggcctcttccaggacaggacctgtgagatcgtggaggacacagagagcagcaggatggtgaagaagatgaagaagaggatctgcctggtgctggactgcctgtgtgcccatgacttcagtgacaagacagctgacctgatcaacctgcagcactacgtgatcaaggagaagaggctgtctgagcgggagaccgtggtgatcttctatgatgtggtgcgggtggtggaggccctgcaccagaagaacatcgtgcaccgggacctgaagctgggcaacatggtgctgaacaagaggacccaccgcatcaccatcaccaacttctgcctgggcaagcacctggtgtctgagggggacctgctgaaggaccagaggggcagccctgcctacatcagcccagatgtgctgagcggccggccctaccggggcaagcccagcgacatgtgggccctgggcgtggtgctcttcaccatgctgtatggccagttccccttctatgacagcatcccccaggagctgttcaggaagatcaaggctgctgagtacaccatcccagaagatggccgggtgtctgaaaatacagtgtgcctgatcaggaagctgctggtgctggacccccagcagaggctggccgctgctgatgtgctggaggccctgagcgccatcatcgcctcctggcagagcctgagcagcctgagcggccccctgcaggtggtgcctgacattgatgaccagatgagcaatgctgacagcagccaggaggtgtcctggggcggccagatgggccactacccagccccccgggaccggctgctgggcgccggccgggcccgggcagaggtggccgccacccggcggccccagagcttcctgggcctgctgccccagccctggggcggcaagggccgcctgcagagcagcgcctag

SEQ ID NO: 169356 - DNA, 1308 bp, synthetic construct
  misc_feature 1..1308: note = Description of Artificial Sequence: Synthetic coding sequence
  source 1..1308: mol_type = other DNA
atgaagagaagagccagtgacagaggagctggggagaccagcgcccgggccaaggccctgggcagcggcatcagcggcaacaatgccaagagagctggccccttcatcctgggcccccggctgggcaacagccctgtgcccagcatcgtgcagtgcctggccaggaaggatggaacagatgacttctaccagctgaagatcctgaccctggaggagcggggggaccagggcatcgagagccaggaggagcggcagggcaagatgctgctgcacacagagtacagcctgctgagcctgctgcacacccaggatggagtggtgcaccaccacggcctcttccaggacaggacctgtgagatcgtggaggacacagagagcagcaggatggtgaagaagatgaagaagaggatctgcctggtgctggactgcctgtgtgcccatgacttcagtgacaagacagctgacctgatcaacctgcagcactacgtgatcaaggagaagaggctgtctgagcgggagaccgtggtgatcttctatgatgtggtgcgggtggtggaggccctgcaccagaagaacatcgtgcaccgggacctgaagctgggcaacatggtgctgaacaagaggacccaccgcatcaccatcaccaacttctgcctgggcaagcacctggtgtctgagggggacctgctgaaggaccagaggggcagccctgcctacatcagcccagatgtgctgagcggccggccctaccggggcaagcccagcgacatgtgggccctgggcgtggtgctcttcaccatgctgtatggccagttccccttctatgacagcatcccccaggagctgttcaggaagatcaaggctgctgagtacaccatcccagaagatggccgggtgtctgaaaatacagtgtgcctgatcaggaagctgctggtgctggacccccagcagaggctggccgctgctgatgtgctggaggccctgagcgccatcatcgcctcctggcagagcctgagcagcctgagcggccccctgcaggtggtgcctgacattgatgaccagatgagcaatgctgacagcagccaggaggccaaggtgacagaagaatgttcccagtatgaatttgagaactacatgaggcagcagctgctgctggccgaggagaagagcagcatccatgatgcccgctcctgggtgcccaagaggcagtttggcagcgcccctcctgtgcggcggctgggccatgatgcccagcccatgaccagcctggacacagccatcctggcccagcgctacctgaggaagtag

SEQ ID NO: 169357 - DNA, 1323 bp, synthetic construct
  misc_feature 1..1323: note = Description of Artificial Sequence: Synthetic coding sequence
  source 1..1323: mol_type = other DNA
atgaagagaagagccagtgacagaggagctggggagaccagcgcccgggccaaggccctgggcagcggcatcagcggcaacaatgccaagagagctggccccttcatcctggccctgtgtgctgtgggcccccggctgggcaacagccctgtgcccagcatcgtgcagtgcctggccaggaaggatggaacagatgacttctaccagctgaagatcctgaccctggaggagcggggggaccagggcatcgagagccaggaggagcggcagggcaagatgctgctgcacacagagtacagcctgctgagcctgctgcacacccaggatggagtggtgcaccaccacggcctcttccaggacaggacctgtgaaattgtggaggacacagagagcagcaggatggtgaagaagatgaagaagaggatctgcctggtgctggactgcctgtgtgcccatgacttcagtgacaagacagctgacctgatcaacctgcagcactacgtgatcaaggagaagaggctgtctgagcgggagaccgtggtgatcttctatgatgtggtgcgggtggtggaggccctgcaccagaagaacatcgtgcaccgggacctgaagctgggcaacatggtgctgaacaagaggacccaccgcatcaccatcaccaacttctgcctgggcaagcacctggtgtctgagggggacctgctgaaggaccagaggggcagccctgcctacatcagcccagatgtgctgagcggccggccctaccggggcaagcccagcgacatgtgggccctgggcgtggtgctcttcaccatgctgtatggccagttccccttctatgacagcatcccccaggagctgttcaggaagatcaaggctgctgagtacaccatcccagaagatggccgggtgtctgagaacacagtgtgcctgatcaggaagctgctggtgctggacccccagcagaggctggccgctgctgatgtgctggaggccctgagcgccatcatcgcctcctggcagagcctgagcagcctgagcggccccctgcaggtggtgcctgacattgatgaccagatgagcaatgctgacagcagccaggaggccaaggtgacagaggagtgcagccagtatgaatttgagaactacatgaggcagcagctgctgctggccgaggagaagagcagcatccatgatgcccgctcctgggtgcccaagaggcagtttggaagtgcccctcctgtgcggcggctgggccatgatgcccagcccatgaccagcctggacacagccatcctggcccagcgctacctgaggaagtag

SEQ ID NO: 169358 - DNA, 1308 bp, synthetic construct; identical to SEQ ID NO: 169356
  misc_feature 1..1308: note = Description of Artificial Sequence: Synthetic coding sequence
  source 1..1308: mol_type = other DNA

SEQ ID NO: 169359 - DNA, 1092 bp, synthetic construct
  misc_feature 1..1092: note = Description of Artificial Sequence: Synthetic coding sequence
  source 1..1092: mol_type = other DNA
atggccatgaggcagacccccctgacctgcagcggccacaccaggcctgtggtggacctggccttcagcggcatcaccccctacggctacttcctgatcagcgcctgcaagggagctggccagcacctgccccggctgagcggccagcatgatggcaagcccatgctgcggcagggcgacacaggagactggattggcaccttcctgggccacaagggagctgtgtggggcgccaccctgaacaaggatgccaccaaggccgccacagctgctgctgacttcaccgccaaggtgtgggatgctgtgtctggagatgagctgatgaccctggcccacaagcacatcgtgaagacagtggacttcacccaggacagcaactacctgctgaccggcggccaggacaagctgctgcgcatctatgacctgaacaagccagaggccgagcccaaggagatcagcggccacaccagcggcatcaagaaggccctgtggtgcagcgaggacaagcagatcctgtctgcagatgacaagacagtgcggctgtgggaccacgccaccatgacagaggtgaagagcctgaacttcaacatgtctgtgtcctccatggagtacatccctgagggggagatcctggtgatcacctacggccgcagcatcgccttccacagcgctgtgtccctggaccccatcaagagctttgaggccccagccaccatcaacagcgccagcctgcaccctgagaaggagttcctggtggccggcggggaggacttcaagctgtacaagtatgactacaacagcggggaggagctggagagctacaagggccacttcggccccatccactgtgtgcgcttctccccagatggagagctgtatgccagcggctctgaagatggcaccctgcggctgtggcagacagtggtgggcaagacctacggcctgtggaagtgtgtgctgcctgaagaagattctggagagctggccaagcccaagattggcttccctgagaccacagaggaggagctggaggagatcgcctctgaaaattctgactgcatcttccccagcgccccagatgtgaaggcctag

SEQ ID NO: 169360 - DNA, 1053 bp, synthetic construct
  misc_feature 1..1053: note = Description of Artificial Sequence: Synthetic coding sequence
  source 1..1053: mol_type = other DNA
atggccatgaggcagacccccctgacctgcagcggccacaccaggcctgtggtggacctggccttcagcggcatcaccccctacggctacttcctgatcagcgcctgcaaggatggcaagcccatgctgcggcagggcgacaccggggactggattggcaccttcctgggccacaagggagctgtgtggggcgccaccctgaacaaggatgccaccaaggccgccacagctgctgctgacttcaccgccaaggtgtgggatgctgtgtctggagatgagctgatgaccctggcccacaagcacatcgtgaagacagtggacttcacccaggacagcaactacctgctgactggaggccaggacaagctgctgcgcatctatgacctgaacaagccagaggccgagcccaaggagatcagcggccacaccagcggcatcaagaaggccctgtggtgcagcgaggacaagcagatcctgtctgcagatgacaagacagtgcggctgtgggaccacgccaccatgacagaggtgaagagcctgaacttcaacatgtctgtgtcctccatggagtacatccctgagggggagatcctggtgatcacctacggccgcagcatcgccttccacagcgctgtgtccctggaccccatcaagagctttgaggccccagccaccatcaacagcgccagcctgcaccctgagaaggagttcctggtggccggaggagaggacttcaagctgtacaagtatgactacaacagcggggaggagctggagagctacaagggccacttcggccccatccactgtgtgcgcttctccccagatggagagctgtatgccagcggctctgaagatggcaccctgcggctgtggcagacagtggtgggcaagacctacggcctgtggaagtgtgtgctgcctgaggaggacagcggggagctggccaagcccaagattggcttccctgagaccacagaggaggagctggaggagatcgccagcgagaacagcgactgcatcttccccagcgccccagatgtgaaggcctag

SEQ ID NO: 169361 - DNA, 771 bp, synthetic construct
  misc_feature 1..771: note = Description of Artificial Sequence: Synthetic coding sequence
  source 1..771: mol_type = other DNA
atgaccctggcccacaagcacatcgtgaagacagtggacttcacccaggacagcaactacctgctgactggaggccaggacaagctgctgcgcatctatgacctgaacaagccagaggccgagcccaaggagatcagcggccacaccagcggcatcaagaaggccctgtggtgcagcgaggacaagcagatcctgtctgcagatgacaagacagtgcggctgtgggaccacgccaccatgacagaggtgaagagcctgaacttcaacatgtctgtgtcctccatggagtacatccctgagggggagatcctggtgatcacctacggccgcagcatcgccttccacagcgctgtgtccctggaccccatcaagagctttgaggccccagccaccatcaacagcgccagcctgcaccctgagaaggagttcctggtggccggaggagaggacttcaagctgtacaagtatgactacaacagcggggaggagctggagagctacaagggccacttcggccccatccactgtgtgcgcttctccccagatggagagctgtatgccagcggctctgaagatggcaccctgcggctgtggcagacagtggtgggcaagacctacggcctgtggaagtgtgtgctgcctgaggaggacagcggggagctggccaagcccaagattggcttccctgagaccacagaggaggagctggaggagatcgccagcgagaacagcgactgcatcttccccagcgccccagatgtgaaggcctag

SEQ ID NO: 169362 - DNA, 1707 bp, synthetic construct
  misc_feature 1..1707: note = Description of Artificial Sequence: Synthetic coding sequence
  source 1..1707: mol_type = other DNA
atgaagaacaagatccaggtggtggtgctggagaatgaaggcctgcagcagcagctgaagagccagaggcaggaggagaccctgcgggagcagaccctgctggatgccagcggcaacatgcacaacagctggatcaccactggagaagattctggagtgggggagaccagcaagaggcccttcagccatgacaatgctgactttgggaaggccgccagcgctggggagcagctggagctggagaagctgaagctgacctatgaggagaagtgtgaaattgaggagagccagctgaagttcctgagaaatgacctggccgagtaccagaggacctgtgaggacctgaaggagcagctgaagcacaaggagttcctgctggccgccaacacctgcaacagagtgggcggcctgtgcctgaagtgtgcccagcacgaggccgtgctgagccagacccacaccaacgtgcacatgcagaccatcgagcggctggtgaaggagagagatgacctgatgtctgccctggtgtctgtgcgcagcagcctggccgacacccagcagcgggaggccagcgcctatgagcaggtgaagcaggtgctgcagatcagcgaggaggccaactttgagaagaccaaggccctgatccagtgtgaccagctgaggaaggagctggagcggcaggccgagcggctggagaaggagctggccagccagcaggagaagagggccatcgagaaggacatgatgaagaaggagatcaccaaggagcgggagtacatgggcagcaagatgctgatcctgagccagaacatcgcccagctggaggcccaggtggagaaggtgaccaaggagaagatcagcgccatcaaccagctggaggagatccagagccagctggccagccgggagatggatgtgaccaaggtgtgtggggagatgagataccagctgaacaagaccaacatggagaaggatgaggccgagaaggagcaccgggagttccgggccaagaccaacagagacctggagatcaaggaccaggagattgagaagctgagaattgagctggatgagagcaagcagcacctggagcaggagcagcagaaggccgccctggcccgggaggagtgcctgcggctgacagagctgctgggggagagcgagcaccagctgcacctgacccggcaggagaaggacagcatccagcagagcttcagcaaggaggccaaggcccaggccctgcaggcccagcagcgggagcaggagctgacccagaagatccagcagatggaggcccagcacgacaagacagaaaatgagcagtacctgctgctgaccagccagaacaccttcctgaccaagctgaaggaggagtgctgcaccctggccaagaagctggagcagatcagccagaagaccaggtctgagatcgcccagctgagccaggagaagcgctacacctatgacaagctgggcaagctgcagaggagaaatgaggagctggaggagcagtgtgtgcagcacggccgggtgcatgagaccatgaagcagaggctgcggcagctggacaagcacagccaggccacagcccagcagctggtgcagctgctgagcaagcagaaccagctgctgctggagcggcagagcctgtctgaggaggtggaccggctgcggacccagctgcccagcatgccccagagcgactgctag

SEQ ID NO: 169363 - DNA, 2013 bp, synthetic construct
  misc_feature 1..2013: note = Description of Artificial Sequence: Synthetic coding sequence
  source 1..2013: mol_type = other DNA
atggccaagagccctgagaacagcaccctggaggagatcctgggccagtaccagaggagcctgcgggagcacgccagccgcagcatccaccagctgacctgtgccctgaaggagggagatgtgaccatcggagaagatgcccccaacctgtccttcagcacctctgtgggcaatgaagatgccaggacagcctggccagagctgcagcagagccatgctgtgaaccagctgaaggacctgctgcggcagcaggccgacaaggagagcgaggtgagccccagcagaagaaggaagatgagccccctgcggagcctggagcacgaggagaccaacatgcccaccatgcatgacctggtgcacaccatcaatgaccagagccagtacatccaccacctggaggccgaggtgaagttctgcaaggaggagctgagcggcatgaagaacaagatccaggtggtggtgctggagaatgaaggcctgcagcagcagctgaagagccagaggcaggaggagaccctgcgggagcagaccctgctggatgccagcgagaagctgaagctgacctatgaggagaagtgtgaaattgaggagagccagctgaagttcctgagaaatgacctggccgagtaccagaggacctgtgaggacctgaaggagcagctgaagcacaaggagttcctgctggccgccaacacctgcaacagagtgggcggcctgtgcctgaagtgtgcccagcacgaggccgtgctgagccagacccacaccaacgtgcacatgcagaccatcgagcggctggtgaaggagagagatgacctgatgtctgccctggtgtctgtgcgcagcagcctggccgacacccagcagcgggaggccagcgcctatgagcaggtgaagcaggtgctgcagatcagcgaggaggccaactttgagaagaccaaggccctgatccagtgtgaccagctgaggaaggagctggagcggcaggccgagcggctggagaaggagctggccagccagcaggagaagagggccatcgagaaggacatgatgaagaaggagatcaccaaggagcgggagtacatgggcagcaagatgctgatcctgagccagaacatcgcccagctggaggcccaggtggagaaggtgaccaaggagaagatcagcgccatcaaccagctggaggagatccagagccagctggccagccgggagatggatgtgaccaaggtgtgtggggagatgagataccagctgaacaagaccaacatggagaaggatgaggccgagaaggagcaccgggagttccgggccaagaccaacagagacctggagatcaaggaccaggagattgagaagctgagaattgagctggatgagagcaagcagcacctggagcaggagcagcagaaggccgccctggcccgggaggagtgcctgcggctgacagagctgctgggggagagcgagcaccagctgcacctgacccggcaggagaaggacagcatccagcagagcttcagcaaggaggccaaggcccaggccctgcaggcccagcagcgggagcaggagctgacccagaagatccagcagatggaggcccagcacgacaagacagaaaatgagcagtacctgctgctgaccagccagaacaccttcctgaccaagctgaaggaggagtgctgcaccctggccaagaagctggagcagatcagccagaagaccaggtctgagatcgcccagctgagccaggagaagcgctacacctatgacaagctgggcaagctgcagaggagaaatgaggagctggaggagcagtgtgtgcagcacggccgggtgcatgagaccatgaagcagaggctgcggcagctggacaagcacagccaggccacagcccagcagctggtgcagctgctgagcaagcagaaccagctgctgctggagcggcagagcctgtctgaggaggtggaccggctgcggacccagctgcccagcatgccccagagcgactgctag

SEQ ID NO: 169364 - DNA, 2142 bp, synthetic construct
  misc_feature 1..2142: note = Description of Artificial Sequence: Synthetic coding sequence
  source 1..2142: mol_type = other DNA
atggccaagagccctgagaacagcaccctggaggagatcctgggccagtaccagaggagcctgcgggagcacgccagccgcagcatccaccagctgacctgtgccctgaaggagggagatgtgaccatcggagaagatgcccccaacctgtccttcagcacctctgtgggcaatgaagatgccaggacagcctggccagagctgcagcagagccatgctgtgaaccagctgaaggacctgctgcggcagcaggccgacaaggagagcgaggtgagccccagcagaagaaggaagatgagccccctgcggagcctggagcacgaggagaccaacatgcccaccatgcatgacctggtgcacaccatcaatgaccagagccagtacatccaccacctggaggccgaggtgaagttctgcaaggaggagctgagcggcatgaagaacaagatccaggtggtggtgctggagaatgaaggcctgcagcagcagctgaagagccagaggcaggaggagaccctgcgggagcagaccctgctggatgccagcggcaacatgcacaacagctggatcaccaccggggaggacagcggcgtgggggagaccagcaagaggcccttcagccatgacaatgctgactttgggaaggccgccagcgctggggagcagctggagctggagaagctgaagctgacctatgaggagaagtgtgaaattgaggagagccagctgaagttcctgagaaatgacctggccgagtaccagaggacctgtgaggacctgaaggagcagctgaagcacaaggagttcctgctggccgccaacacctgcaacagagtgggcggcctgtgcctgaagtgtgcccagcatgaagctgtgctgagccagacccacaccaacgtgcacatgcagaccatcgagcggctggtgaaggagagagatgacctgatgtctgccctggtgtctgtgcgcagcagcctggccgacacccagcagcgggaggccagcgcctatgagcaggtgaagcaggtgctgcagatcagcgaggaggccaactttgagaagaccaaggccctgatccagtgtgaccagctgaggaaggagctggagcggcaggccgagcggctggagaaggagctggccagccagcaggagaagagggccatcgagaaggacatgatgaagaaggagatcaccaaggagcgggagtacatgggcagcaagatgctgatcctgagccagaacatcgcccagctggaggcccaggtggagaaggtgaccaaggagaagatcagcgccatcaaccagctggaggagatccagagccagctggccagccgggagatggatgtgaccaaggtgtgtggggagatgagataccagctgaacaagaccaacatggagaaggatgaagctgagaaggagcaccgggagttccgggccaagaccaacagagacctggagatcaaggaccaggagattgagaagctgcgcatcgagctggatgagagcaagcagcacctggagcaggagcagcagaaggccgccctggcccgggaggagtgcctgcggctgacagagctgctgggggagagcgagcaccagctgcacctgacccggcaggagaaggacagcatccagcagagcttcagcaaggaggccaaggcccaggccctgcaggcccagcagcgggagcaggagctgacccagaagatccagcagatggaggcccagcacgacaagacagaaaatgagcagtacctgctgctgaccagccagaacaccttcctgaccaagctgaaggaggagtgctgcaccctggccaagaagctggagcagatcagccagaagaccaggagtgaaattgcccagctgagccaggagaagcgctacacctatgacaagctgggcaagctgcagaggagaaatgaggagctggaggagcagtgtgtgcagcacggccgggtgcatgagaccatgaagcagaggctgcggcagctggacaagcacagccaggccacagcccagcagctggtgcagctgctgagcaagcagaaccagctgctgctggagcggcagagcctgtctgaggaggtggaccggctgcggacccagctgcccagcatgccccagagcgactgctag

SEQ ID NO: 169365 - DNA, 1083 bp, synthetic construct
  misc_feature 1..1083: note = Description of Artificial Sequence: Synthetic coding sequence
  source 1..1083: mol_type = other DNA
atggccaagagccctgagaacagcaccctggaggagatcctgggccagtaccagaggagcctgcgggagcacgccagccgcagcatccaccagctgacctgtgccctgaaggagggagatgtgaccatcggagaagatgcccccaacctgtccttcagcacctctgtgggcaatgaagatgccaggacagcctggccagagctgcagcagagccatgctgtgaaccagctgaaggacctgctgcggcagcaggccgacaaggagagcgaggtgagccccagcagaagaaggaagatgagccccctgcggagcctggagcacgaggagaccaacatgcccaccatgcatgacctggtgcacaccatcaatgaccagagccagtacatccaccacctggaggccgaggtgaagttctgcaaggaggagctgagcggcatgaagaacaagatccaggtggtggtgctggagaatgaaggcctgcagcagcagctgaagagccagaggcaggaggagaccctgcgggagcagaccctgctggatgccagcggcaacatgcacaacagctggatcaccaccggggaggacagcggcgtgggggagaccagcaagaggcccttcagccatgacaatgctgactttgggaaggccgccagcgctggggagcagctggagctggagaagctgaagctgacctatgaggagaagtgtgaaattgaggagagccagctgaagttcctgagaaatgacctggccgagtaccagaggacctgtgaggacctgaaggagcagctgaagcacaaggagttcctgctggccgccaacacctgcaacagagtgggcggcctgtgcctgaagtgtgcccagcatgaagctgtgctgagccagacccacaccaacgtgcacatgcagaccatcgagcggctggtgaaggagagagatgacctgatgtctgccctggtgtctgtgcgcagcagcctggccgacacccagcagcgggaggccagcgcctatgagcaggtgaagcaggtgctgcagatcagcgaggaggccaactttgagaagaccaagcaccccagccagtag

SEQ ID NO: 169366 - DNA, 1245 bp, synthetic construct
  misc_feature 1..1245: note = Description of Artificial Sequence: Synthetic coding sequence
  source 1..1245: mol_type = other DNA
ctgctggatgccagcgagaagctgaagctgacctatgaggagaagtgtgaaattgaggagagccagctgaagttcctgagaaatgacctggccgagtaccagaggacctgtgaggacctgaaggagcagctgaagcacaaggagttcctgctggccgccaacacctgcaacagagtgggcggcctgtgcctgaagtgtgcccagcatgaagctgtgctgagccagacccacaccaacgtgcacatgcagaccatcgagcggctggtgaaggagagagatgacctgatgtctgccctggtgtctgtgcgcagcagcctggccgacacccagcagcgggaggccagcgcctatgagcaggtgaagcaggtgctgcagatcagcgaggaggccaactttgagaagaccaaggccctgatccagtgtgaccagctgaggaaggagctggagcggcaggccgagcggctggagaaggagctggccagccagcaggagaagagggccatcgagaaggacatgatgaagaaggagatcaccaaggagcgggagtacatgggcagcaagatgctgatcctgagccagaacatcgcccagctggaggcccaggtggagaaggtgaccaaggagaagatcagcgccatcaaccagctggaggagatccagagccagctggccagccgggagatggatgtgaccaaggtgtgtggggagatgagataccagctgaacaagaccaacatggagaaggatgaagctgagaaggagcaccgggagttccgggccaagaccaacagagacctggagatcaaggaccaggagattgagaagctgcgcatcgagctggatgagagcaagcagcacctggagcaggagcagcagaaggccgccctggcccgggaggagtgcctgcggctgacagagctgctgggggagagcgagcaccagctgcacctgaccaggtctgagatcgcccagctgagccaggagaagcgctacacctatgacaagctgggcaagctgcagaggagaaatgaggagctggaggagcagtgtgtgcagcacggccgggtgcatgagaccatgaagcagaggctgcggcagctggacaagcacagccaggccacagcccagcagctggtgcagctgctgagcaagcagaaccagctgctgctggagcggcagagcctgtctgaggaggtggaccggctgcggacccagctgcccagcatgccccagagcgactgctag

SEQ ID NO: 169367 - DNA, 729 bp, synthetic construct
  misc_feature 1..729: note = Description of Artificial Sequence: Synthetic coding sequence
  source 1..729: mol_type = other DNA
atggatgacctgtgtgaggccaacggcacctttgccatcagcctcttcaagatcctgggggaggaggacaacagcagaaatgtgttcttcagccccatgagcatcagcagcgccctggccatggtgttcatgggcgccaagggcagcacagctgcccagatgagccaggccctgtgcctgtacaaggatggagacatccaccggggcttccagagcctgctgtctgaggtgaacagaacaggcacccagtacctgctgaggacagccaaccggctgtttggagagaagacctgtgacttcctgcctgacttcaaggagtactgccagaagttctaccaggccgagctggaggagctgagctttgctgaggacacagaagaatgtaggaagcacatcaatgactgggtggccgagaagacagagggcaagatcagcgaggtgctggatgctggcaccgtggaccccctgaccaagctggtgctggtgaatgccatctacttcaagggcaagtggaatgagcagtttgacaggaagtacacccggggcatgctgttcaagaccaatgaggagaagaagacagtgcagatgatgttcaaggaggccaagttcaagatgggctatgcagatgaggtgcacacccaggtgctggagctgccctacgtggaggaggagctgtccatggtgatcctgctgcctgatgacaacacagacctggccgtgaaggagtag

SEQ ID NO: 169368 - DNA, 1335 bp, synthetic construct
  misc_feature 1..1335: note = Description of Artificial Sequence: Synthetic coding sequence
  source 1..1335: mol_type = other DNA
atgaaggtggtgcccagcctgctgctgtctgtgctgctggcccaggtgtggctggtgcccggcctggcccccagcccccagagccctgagaccccagccccccagaaccagaccagccgggtggtgcaggcccccaaggaggaggaggaggatgagcaggaggccagcgaggagaaggccagcgaggaggagaaggcctggctgatggccagccggcagcagctggccaaggagaccagcaactttggcttcagcctgctgaggaagatctccatgagacatgatggcaacatggtgttcagccccttcggcatgagcctggccatgacaggcctgatgctgggcgccaccggccccacagagacccagatcaagaggggcctgcacctgcaggccctgaagcccaccaagccaggcctgctgcccagcctcttcaagggcctgcgggagaccctgagcaggaacctggagctgggcctgacccagggcagctttgccttcatccacaaggactttgatgtgaaggagaccttcttcaacctgagcaagcgctactttgacacagaatgtgtgcccatgaacttcagaaatgccagccaggccaagaggctgatgaaccactacatcaacaaggagacccggggcaagatccccaagctgtttgatgagatcaaccctgagaccaagctgatcctggtggactacatcctcttcaagggcaagtggctgaccccatttgaccccgtcttcacagaggtggacaccttccacctggacaagtacaagaccatcaaggtgcccatgatgtacggggccggcaagtttgccagcacctttgacaagaacttccgctgccacgtgctgaagctgccctaccagggcaatgccaccatgctggtggtgctgatggagaagatgggagaccacctggccctggaggactacctgaccacagacctggtggagacctggctgaggaacatgaagaccaggaacatggaggtgttcttccccaagttcaagctggaccagaagtatgagatgcatgagctgctgcggcagatgggcatccgccgcatcttcagcccctttgctgacctgtctgagctgagcgccactggaagaaacctgcaggtgtcccgggtgctgcagaggacagtcatcgaggtggatgagcggggcacagaagctgtggccggcatcctgtctgagatcacagcctacagcatgcctcctgtgatcaaggtggaccggcccttccacttcatgatctatgaggagaccagcggcatgctgctcttcctgggccgggtggtgaaccccaccctgctgtag

SEQ ID NO: 169369 - DNA, 1335 bp, synthetic construct; identical to SEQ ID NO: 169368
  misc_feature 1..1335: note = Description of Artificial Sequence: Synthetic coding sequence
  source 1..1335: mol_type = other DNA

SEQ ID NO: 169370 - DNA, 1335 bp, synthetic construct; identical to SEQ ID NO: 169368
  misc_feature 1..1335: note = Description of Artificial Sequence: Synthetic coding sequence
  source 1..1335: mol_type = other DNA

SEQ ID NO: 169371 - DNA, 1455 bp, synthetic construct
  misc_feature 1..1455: note = Description of Artificial Sequence: Synthetic coding sequence
  source 1..1455: mol_type = other DNA
atgagccgcagcacccaggagctgctgggctaccactgccgcctgcaggacaagctgcaggagcaggagggcagcctggccgctgagggccgccacagcctggccagcgctgctgaccacatgaaggtggtgcccagcctgctgctgtctgtgctgctggcccaggtgtggctggtgcccggcctggcccccagcccccagagccctgagaccccagccccccagaaccagaccagccgggtggtgcaggcccccaaggaggaggaggaggatgagcaggaggccagcgaggagaaggccagcgaggaggagaaggcctggctgatggccagccggcagcagctggccaaggagaccagcaactttggcttcagcctgctgaggaagatctccatgagacatgatggcaacatggtgttcagccccttcggcatgagcctggccatgacaggcctgatgctgggcgccaccggccccacagagacccagatcaagaggggcctgcacctgcaggccctgaagcccaccaagccaggcctgctgcccagcctcttcaagggcctgcgggagaccctgagcaggaacctggagctgggcctgacccagggcagctttgccttcatccacaaggactttgatgtgaaggagaccttcttcaacctgagcaagcgctactttgacacagaatgtgtgcccatgaacttcagaaatgccagccaggccaagaggctgatgaaccactacatcaacaaggagacccggggcaagatccccaagctgtttgatgagatcaaccctgagaccaagctgatcctggtggactacatcctcttcaagggcaagtggctgaccccatttgaccccgtcttcacagaggtggacaccttccacctggacaagtacaagaccatcaaggtgcccatgatgtacggggccggcaagtttgccagcacctttgacaagaacttccgctgccacgtgctgaagctgccctaccagggcaatgccaccatgctggtggtgctgatggagaagatgggagaccacctggccctggaggactacctgaccacagacctggtggagacctggctgaggaacatgaagaccaggaacatggaggtgttcttccccaagttcaagctggaccagaagtatgagatgcatgagctgctgcggcagatgggcatccgccgcatcttcagcccctttgctgacctgtctgagctgagcgccactggaagaaacctgcaggtgtcccgggtgctgcagaggacagtcatcgaggtggatgagcggggcacagaagctgtggccggcatcctgtctgagatcacagcctacagcatgcctcctgtgatcaaggtggaccggcccttccacttcatgatctatgaggagaccagcggcatgctgctcttcctgggccgggtggtgaaccccaccctgctgtag

SEQ ID NO: 169372 - DNA, 288 bp, synthetic construct
  misc_feature 1..288: note = Description of Artificial Sequence: Synthetic coding sequence
  source 1..288: mol_type = other DNA
atggagaggatgctgcccctgctggccctgggcctgctggccgccggcttctgcccagctgtgctgtgccaccccaacagccccctggatgaggagaacctgacccaggagaaccaggaccggggcacccacgtggacctgggcctggccagcgccaacgtggactttgccttcagcctgtacaagcacccccaccgctggagcatccggctgtgcctgatgtacctgcggcgggcccagaagcacctgctgccccagcagagcaagagccccagcttcctgcactag

SEQ ID NO: 169373 - DNA, 1272 bp, synthetic construct
  misc_feature 1..1272: note = Description of Artificial Sequence: Synthetic coding sequence
  source 1..1272: mol_type = other DNA
atggagaggatgctgcccctgctggccctgggcctgctggccgccggcttctgcccagctgtgctgtgccaccccaacagccccctggatgaggagaacctgacccaggagaaccaggaccggggcacccacgtggacctgggcctggccagcgccaacgtggactttgccttcagcctgtacaagcagctggtgctgaaggccccagacaagaatgtcatcttcagccccctgagcatcagcacagccctggccttcctgagcctgggcgcccacaacaccaccctgacagagatcctgaagggcctgaagttcaacctgacagagaccagcgaggccgagatccaccagagcttccagcacctgctgcggaccctgaaccagagcagtgatgagctgcagctgtccatgggaaatgccatgtttgtgaaggagcagctgagcctgctggaccgcttcacagaagatgccaagaggctgtatggcagcgaggcctttgccacagacttccaggacagcgctgctgccaagaagctgatcaatgactatgtgaagaatggcacccggggcaagatcacagacctgatcaaggacctggacagccagaccatgatggtgctggtgaactacatcttcttcaaggccaagtgggagatgccctttgacccccaggacacccaccagagccgcttctacctgagcaagaagaagtgggtgatggtgcccatgatgagcctgcaccacctgaccatcccctacttcagagatgaggagctgagctgcaccgtggtggagctgaagtacacaggaaatgccagcgccctcttcatcctgcctgaccaggacaagatggaggaggtggaggccatgctgctgcctgagaccctgaagcgctggagggacagcctggagttccgggagatcggggagctgtacctgcccaagttcagcatcagccgggactacaacctgaatgacatcctgctgcagctgggcatcgaggaggccttcaccagcaaggctgacctgagcggcatcactggagccaggaacctggccgtgtcccaggtggtgcacaaggctgtgctggatgtgtttgaggagggcacagaggccagcgctgccacagctgtgaagatcaccctgctgagcgccctggtggagaccaggaccatcgtgcgcttcaaccggcccttcctgatgatcatcgtgcccacagacacccagaacatcttcttcatgagcaaggtgaccaaccccaagcaggcctag

SEQ ID NO: 169374 - DNA, 1272 bp, synthetic construct; identical to SEQ ID NO: 169373
  misc_feature 1..1272: note = Description of Artificial Sequence: Synthetic coding sequence
  source 1..1272: mol_type = other DNA

SEQ ID NO: 169375 - DNA, 1272 bp, synthetic construct; identical to SEQ ID NO: 169373
  misc_feature 1..1272: note = Description of Artificial Sequence: Synthetic coding sequence
  source 1..1272: mol_type = other DNA

SEQ ID NO: 169376 - DNA, 1347 bp, synthetic construct
  misc_feature 1..1347: note = Description of Artificial Sequence: Synthetic coding sequence
  source 1..1347: mol_type = other DNA
atgaagatccactacagccggcagacagccctggagagcaccagctacatccagctgcctgaggccgagctgaggatggagaggatgctgcccctgctggccctgggcctgctggccgccggcttctgcccagctgtgctgtgccaccccaacagccccctggatgaggagaacctgacccaggagaaccaggaccggggcacccacgtggacctgggcctggccagcgccaacgtggactttgccttcagcctgtacaagcagctggtgctgaaggccccagacaagaatgtcatcttcagccccctgagcatcagcacagccctggccttcctgagcctgggcgcccacaacaccaccctgacagagatcctgaagggcctgaagttcaacctgacagagaccagcgaggccgagatccaccagagcttccagcacctgctgcggaccctgaaccagagcagtgatgagctgcagctgtccatgggaaatgccatgtttgtgaaggagcagctgagcctgctggaccgcttcacagaagatgccaagaggctgtatggcagcgaggcctttgccacagacttccaggacagcgctgctgccaagaagctgatcaatgactatgtgaagaatggcacccggggcaagatcacagacctgatcaaggacctggacagccagaccatgatggtgctggtgaactacatcttcttcaaggccaagtgggagatgccctttgacccccaggacacccaccagagccgcttctacctgagcaagaagaagtgggtgatggtgcccatgatgagcctgcaccacctgaccatcccctacttcagagatgaggagctgagctgcaccgtggtggagctgaagtacacaggaaatgccagcgccctcttcatcctgcctgaccaggacaagatggaggaggtggaggccatgctgctgcctgagaccctgaagcgctggagggacagcctggagttccgggagattggagagctgtacctgcccaagttcagcatcagccgggactacaacctgaatgacatcctgctgcagctgggcatcgaggaggccttcaccagcaaggctgacctgagcggcatcaccggggccaggaacctggccgtgtcccaggtggtgcacaaggctgtgctggatgtgtttgaggagggcacagaggccagcgctgccacagctgtgaagatcaccctgctgagcgccctggtggagaccaggaccatcgtgcgcttcaaccggcccttcctgatgatcatcgtgcccacagacacccagaacatcttcttcatgagcaaggtgaccaaccccaagcaggcctag

SEQ ID NO: 169377 - DNA, 918 bp, synthetic construct
  misc_feature 1..918: note = Description of Artificial Sequence: Synthetic coding sequence
  source 1..918: mol_type = other DNA
atggagaggatgctgcccctgctggccctgggcctgctggccgccggcttctgcccagctgtgctgtgccaccccaacagccccctggatgaggagaacctgacccaggagaaccaggaccggggcacccacgtggacctgggcctggccagcgccaacgtggactttgccttcagcctgtacaagcagctggtgctgaaggccccagacaagaatgtcatcttcagccccctgagcatcagcacagccctggccttcctgagcctgggcgcccacaacaccaccctgacagagatcctgaagggcctgaagttcaacctgacagagaccagcgaggccgagatccaccagagcttccagcacctgctgcggaccctgaaccagagcagtgatgagctgcagctgtccatgggaaatgccatgtttgtgaaggagcagctgagcctgctggaccgcttcacagaagatgccaagaggctgtatggcagcgaggcctttgccacagacttccaggacagcgctgctgccaagaagctgatcaatgactatgtgaagaatggcacccggggcaagatcacagacctgatcaaggacctggacagccagaccatgatggtgctggtgaactacatcttcttcaaggccaagtgggagatgccctttgacccccaggacacccaccagagccgcttctacctgagcaagaagaagtgggtgatggtgcccatgatgagcctgcaccacctgaccatcccctacttcagagatgaggagctgagctgcaccgtggtggagctgaagtacacaggaaatgccagcgccctcttcatcctgcctgaccaggacaagatggaggaggtggaggccatgctgctgcctgagaccctgaagcgctggagggacagcctggagttctag

SEQ ID NO: 169378 - DNA, 1284 bp, synthetic construct
  misc_feature 1..1284: note = Description of Artificial Sequence: Synthetic coding sequence
  source 1..1284: mol_type = other DNA
atgcacctgattgactacctgctgctgctgctggtgggcctgctggccctgagccacggccagctgcacgtggagcatgatggagagagctgcagcaacagcagccaccagcagatcctggagaccggggagggcagccccagcctgaagatcgccccagccaatgctgactttgccttccgcttctactacctgattgccagcgagaccccaggcaagaacatcttcttcagccccctgagcatctctgctgcctatgccatgctgagcctgggcgcctgcagccacagccgcagccagatcctggagggcctgggcttcaacctgacagagctgtctgagagtgatgtgcaccggggcttccagcacctgctgcacaccctgaacctgcccggccacggcctggagaccagggtgggcagcgccctcttcctgagccacaacctgaagttcctggccaagttcctgaatgacaccatggctgtgtatgaggccaagctgttccacaccaacttctatgacacagtgggcaccatccagctgatcaatgaccacgtgaagaaggagacccggggcaagatcgtggacctggtgtctgagctgaagaaggatgtgctgatggtgctggtgaactacatctacttcaaggccctgtgggagaagcccttcatcagcagcaggaccacccccaaggacttctacgtggatgagaacaccaccgtgcgggtgcccatgatgctgcaggaccaggagcaccactggtacctgcatgaccgctacctgccctgcagcgtgctgaggatggactacaagggagatgccaccgtcttcttcatcctgcccaaccagggcaagatgagagaaattgaggaggtgctgaccccagagatgctgatgcgctggaacaacctgctgaggaagaggaacttctacaagaagctggagctgcacctgcccaagttcagcatcagcggcagctatgtgctggaccagatcctgccccggctgggcttcacagacctcttcagcaagtgggccgacctgagcggcatcaccaagcagcagaagctggaggccagcaagagcttccacaaggccaccctggatgtggatgaagctggaacagaagctgctgctgccaccagctttgccatcaagttcttcagcgcccagaccaacagacacatcctgcgcttcaaccggcccttcctggtggtgatcttcagcaccagcacccagagcgtgctcttcctgggcaaggtggtggaccccaccaagccctag

SEQ ID NO: 169379 - DNA, 1284 bp, synthetic construct; identical to SEQ ID NO: 169378
  misc_feature 1..1284: note = Description of Artificial Sequence: Synthetic coding sequence
  source 1..1284: mol_type = other DNA

SEQ ID NO: 169380 - DNA, 1284 bp, synthetic construct; identical to SEQ ID NO: 169378
  misc_feature 1..1284: note = Description of Artificial Sequence: Synthetic coding sequence
  source 1..1284: mol_type = other DNA

SEQ ID NO: 169381 - DNA, 1218 bp, synthetic construct
  misc_feature 1..1218: note = Description of Artificial Sequence: Synthetic coding sequence
  source 1..1218: mol_type = other DNA
atgcccctgctgctgtacacctgcctgctgtggctgcccaccagcggcctgtggacagtgcaggccatggaccccaatgctgcctacgtgaacatgagcaaccaccaccggggcctggccagcgccaacgtggactttgccttcagcctgtacaagcacctggtggccctgagccccaagaagaacatcttcatcagccctgtgtccatctccatggccctggccatgctgagcctgggcacctgtggccacacccgggcccagctgctgcagggcctgggcttcaacctgacagagaggagtgaaacagagatccaccagggcttccagcacctgcaccagctgtttgccaagagtgacaccagcctggagatgaccatgggaaatgccctcttcctggatggcagcctggagctgctggagagcttctctgctgacatcaagcactactatgaaagtgaggtgctggccatgaacttccaggactgggccacagccagccggcagatcaacagctatgtgaagaacaagacccagggcaagatcgtggacctcttcagcggcctggacagccctgccatcctggtgctggtgaactacatcttcttcaagggcacctggacccagccctttgacctggccagcacccgggaggagaacttctacgtggatgagaccaccgtggtgaaggtgcccatgatgctgcagagcagcaccatctcctacctgcatgacagcgagctgccctgccagctggtgcagatgaactacgtgggcaatggcaccgtcttcttcatcctgcctgacaagggcaagatgaacacagtgattgctgccctgagccgggacaccatcaaccgctggagcgctggcctgaccagcagccaggtggacctgtacatccccaaggtgaccatctctggagtgtatgacctgggagatgtgctggaggagatgggcattgctgacctcttcaccaaccaggccaacttcagccgcatcacccaggatgcccagctgaagagcagcaaggtggtgcacaaggctgtgctgcagctgaatgaggagggcgtggacacagctggcagcactggagtgaccctgaacctgaccagcaagcccatcatcctgcgcttcaaccagcccttcatcatcatgatctttgaccacttcacctggagcagcctcttcctggcccgggtgatgaaccctgtgtag

SEQ ID NO: 169382 - DNA, 411 bp, synthetic construct
  misc_feature 1..411: note = Description of Artificial Sequence: Synthetic coding sequence
  source 1..411: mol_type = other DNA
atgcccctgctgctgtacacctgcctgctgtggctgcccaccagcggcctgtggacagtgcaggccatggaccccaatgctgcctacgtgaacatgagcaaccaccaccggggcctggccagcgccaacgtggactttgccttcagcctgtacaagcacctggtggccctgagccccaagaagaacatcttcatcagccctgtgtccatctccatggccctggccatgctgagcctgggcacctgtggccacacccgggcccagctgctgcagggcctgggcttcaacctgacagagaggagtgaaacagagatccaccagggcttccagcacctgcaccagctgtttgccaagagtgacaccagcctggagatgaccatgggaaatgccctcttcctggatggcagctag

SEQ ID NO: 169383 - DNA, 1194 bp, synthetic construct
  misc_feature 1..1194: note = Description of Artificial Sequence: Synthetic coding sequence
  source 1..1194: mol_type = other DNA
atggacagcctggccaccagcatcaaccagtttgccctggagctgagcaagaagctggccgagagcgcccagggcaagaacatcttcttcagctcctggagcatcagcaccagcctgaccatcgtgtacctgggcgccaagggcaccacagctgcccagatggcccaggtgctgcagttcaacagagaccagggcgtgaagtgtgaccctgagagcgagaagaagaggaagatggagttcaacctgagcaacagcgaggagatccacagcgacttccagaccctcatcagcgagatcctgaagcccaatgatgactacctgctgaagacagccaatgccatctatggagagaagacctacgccttccacaacaagtacctggaggacatgaagacctactttggagctgagccccagcctgtgaactttgtggaggccagtgaccagatcaggaaggacatcaacagctgggtggagcggcagacagagggcaagatccagaacctgctgcctgatgacagcgtggacagcaccaccaggatgatcctggtgaatgccctgtacttcaagggcatctgggagcaccagttcctggtgcagaacaccacagagaagcccttccgcatcaatgagaccaccagcaagcctgtgcagatgatgttcatgaagaagaagctgcacatcttccacatcgagaagcccaaggctgtgggcctgcagctgtactacaagagccgggacctgagcctgctgatcctgctgcctgaggacatcaatggcctggagcagctggagaaggccatcacctatgagaagctgaatgagtggaccagcgctgacatgatggagctgtatgaggtgcagctgcacctgcccaagttcaagctggaggacagctatgacctgaagagcaccctgagctccatgggcatgtctgatgccttcagccagagcaaggctgacttcagcggcatgagcagcgccaggaacctcttcctgagcaatgtgttccacaaggcctttgtggagatcaatgagcagggcacagaagctgctgctggcagcggcagcgagattgacatccgcatccgggtgcccagcattgagttcaatgccaaccaccccttcctgttcttcatccgccacaacaagaccaacaccatcctcttctacggccgcctgtgcagcccctag

SEQ ID NO: 169384 - DNA, 1020 bp, synthetic construct
  misc_feature 1..1020: note = Description of Artificial Sequence: Synthetic coding sequence
  source 1..1020: mol_type = other DNA
atggacagcctgggcgctgtgtccacccggctgggctttgacctcttcaaggagctgaagaagaccaatgatggcaacatcttcttcagccctgtgggcatcctgacagccatcggcatggtgctgctgggcaccaggggggccacagccagccagctggaggaggtgttccacagcgagaaggagaccaagagcagccgcatcaaggccgaggagaaggaggtgattgaaaatacagaagctgtgcaccagcagttccagaagttcctgacagagatcagcaagctgaccaatgactatgagctgaacatcaccaaccggctgtttggagagaagacctacctgttcctgcagaagtacctggactatgtggagaagtactaccacgccagcctggagcctgtggactttgtgaatgctgctgatgagagcaggaagaagatcaacagctgggtggagagcaagaccaatgagaagatcaaggacctcttcccagatggcagcatcagcagcagcaccaagctggtgctggtgaacatggtgtacttcaagggccagtgggaccgggagttcaagaaggagaacaccaaggaggagaagttctggatgaacaagatcatcgacaagatcagccctgagaagctggtggagtggaccagccctggccacatggaggagaggaaggtgaacctgcacctgcccaggtttgaggtggaggatggctatgacctggaggccgtgctggccgccatgggcatgggagatgccttcagcgagcacaaggctgactacagcggcatgagcagcggcagcggcctgtatgcccagaagttcctgcacagcagctttgtggccgtgacagaggagggcacagaagctgctgctgccactggaattggcttcaccgtgaccagcgcccctggccatgaaaatgtgcactgcaaccaccccttcctgttcttcatccgccacaatgaaagcaacagcatcctcttcttcggccgcttcagcagcccctag

SEQ ID NO: 169385 - DNA, 1176 bp, synthetic construct
  misc_feature 1..1176: note = Description of Artificial Sequence: Synthetic coding sequence
  source 1..1176: mol_type = other DNA
atggacagcctgggcgctgtgtccacccggctgggctttgacctcttcaaggagctgaagaagaccaatgatggcaacatcttcttcagccctgtgggcatcctgacagccatcggcatggtgctgctgggcaccaggggggccacagccagccagctggaggaggtgttccacagcgagaaggagaccaagagcagccgcatcaaggccgaggagaaggaggtgattgaaaatacagaagctgtgcaccagcagttccagaagttcctgacagagatcagcaagctgaccaatgactatgagctgaacatcaccaaccggctgtttggagagaagacctacctgttcctgcagaagtacctggactatgtggagaagtactaccacgccagcctggagcctgtggactttgtgaatgctgctgatgagagcaggaagaagatcaacagctgggtggagagcaagaccaatgagaagatcaaggacctcttcccagatggcagcatcagcagcagcaccaagctggtgctggtgaacatggtgtacttcaagggccagtgggaccgggagttcaagaaggagaacaccaaggaggagaagttctggatgaacaagagcaccagcaagtctgtgcagatgatgacccagagccacagcttctccttcaccttcctggaggacctgcaggccaagatcctgggcatcccctacaagaacaatgacctgtccatgtttgtgctgctgcccaatgacattgatggcctggagaagatcatcgacaagatcagccctgagaagctggtggagtggaccagccctggccacatggaggagaggaaggtgaacctgcacctgcccaggtttgaggtggaggatggctatgacctggaggccgtgctggccgccatgggcatgggagatgccttcagcgagcacaaggctgactacagcggcatgagcagcggcagcggcctgtatgcccagaagttcctgcacagcagctttgtggccgtgacagaggagggcacagaagctgctgctgccactggaattggcttcaccgtgaccagcgcccctggccatgaaaatgtgcactgcaaccaccccttcctgttcttcatccgccacaatgaaagcaacagcatcctcttcttcggccgcttcagcagcccctag

SEQ ID NO: 169386 - DNA, 930 bp, synthetic construct
  misc_feature 1..930: note = Description of Artificial Sequence: Synthetic coding sequence
  source 1..930: mol_type = other DNA
atggacagcctgggcgctgtgtccacccggctgggctttgacctcttcaaggagctgaagaagaccaatgatggcaacatcttcttcagccctgtgggcatcctgacagccatcggcatggtgctgctgggcaccaggggggccacagccagccagctggaggaggtgttccacagcgagaaggagaccaagagcagccgcatcaaggccgaggagaaggaggtggagaagatcaaggacctcttcccagatggcagcatcagcagcagcaccaagctggtgctggtgaacatggtgtacttcaagggccagtgggaccgggagttcaagaaggagaacaccaaggaggagaagttctggatgaacaagagcaccagcaagtctgtgcagatgatgacccagagccacagcttctccttcaccttcctggaggacctgcaggccaagatcctgggcatcccctacaagaacaatgacctgtccatgtttgtgctgctgcccaatgacattgatggcctggagaagatcatcgacaagatcagccctgagaagctggtggagtggaccagccctggccacatggaggagaggaaggtgaacctgcacctgcccaggtttgaggtggaggatggctatgacctggaggccgtgctggccgccatgggcatgggagatgccttcagcgagcacaaggctgactacagcggcatgagcagcggcagcggcctgtatgcccagaagttcctgcacagcagctttgtggccgtgacagaggagggcacagaagctgctgctgccactggaattggcttcaccgtgaccagcgcccctggccatgaaaatgtgcactgcaaccaccccttcctgttcttcatccgccacaatgaaagcaacagcatcctcttcttcggccgcttcagcagcccctag

SEQ ID NO: 169387 - DNA, 1173 bp, synthetic construct
  misc_feature 1..1173: note = Description of Artificial Sequence: Synthetic coding sequence
  source 1..1173: mol_type = other DNA
atgaacagcctgtctgaggccaacaccaagttcatgtttgacctcttccagcagttcaggaagagcaaggagaacaacatcttctacagccccatcagcatcaccagcgccctgggcatggtgctgctgggcgccaaggacaacacagcccagcagatcaagaaggtgctgcactttgaccaggtgacagagaacaccaccgggaaggccgccacctaccacgtggacagaagtggaaatgtgcaccaccagttccagaagctgctgacagagttcaacaagagcacagatgcctatgagctgaagatcgccaacaagctgtttggagagaagacctacctgttcctgcaggagtacctggatgccatcaagaagttctaccagacctctgtggagagcgtggactttgccaatgcccctgaggagagcaggaagaagatcaacagctgggtggagagccagaccaatgagaagatcaagaacctgatccctgagggcaacatcggcagcaacaccaccctggtgctggtgaatgccatctacttcaagggccagtgggagaagaagttcaacaaggaggacaccaaggaggagaagttctggcccaacaagaacacctacaagagcatccagatgatgaggcagtacaccagcttccactttgccagcctggaggatgtgcaggccaaggtgctggagatcccctacaagggcaaggacctgtccatgattgtgctgctgcccaatgaaattgatggcctgcagaagctggaggagaagctgacagctgagaagctgatggagtggaccagcctgcagaacatgagggagaccagggtggacctgcacctgccccgcttcaaggtggaggagagctatgacctgaaggacaccctgcggaccatgggcatggtggacatcttcaatggagatgctgacctgagcggcatgacaggcagccggggcctggtgctgagcggcgtgctgcacaaggcctttgtggaggtgacagaggagggcgctgaggccgctgctgccacagctgtggtgggcttcggcagcagccccaccagcaccaatgaggagttccactgcaaccaccccttcctgttcttcatccggcagaacaagaccaacagcatcctcttctacggccgcttcagcagcccctag

SEQ ID NO: 169388 - DNA, 1173 bp, synthetic construct
  misc_feature 1..1173: note = Description of Artificial Sequence: Synthetic coding sequence
  source 1..1173: mol_type = other DNA
atgaacagcctgtctgaggccaacaccaagttcatgtttgacctcttccagcagttcaggaagagcaaggagaacaacatcttctacagccccatcagcatcaccagcgccctgggcatggtgctgctgggcgccaaggacaacacagcccagcagatcagcaaggtgctgcactttgaccaggtgacagagaacaccacagagaaggccgccacctaccacgtggacagaagtggaaatgtgcaccaccagttccagaagctgctgacagagttcaacaagagcacagatgcctatgagctgaagatcgccaacaagctgtttggagagaagacctaccagttcctgcaggagtacctggatgccatcaagaagttctaccagacctctgtggagagcacagactttgccaatgcccctgaggagagcaggaagaagatcaacagctgggtggagagccagaccaatgagaagatcaagaacctcttcccagatggcaccatcggaaatgacaccaccctggtgctggtgaatgccatctacttcaagggccagtgggagaacaagttcaagaaggagaacaccaaggaggagaagttctggcccaacaagaacacctacaagtctgtgcagatgatgaggcagtacaacagcttcaactttgccctgctggaggatgtgcaggccaaggtgctggagatcccctacaagggcaaggacctgtccatgattgtgctgctgcccaatgaaattgatggcctgcagaagctggaggagaagctgacagctgagaagctgatggagtggaccagcctgcagaacatgagggagacctgtgtggacctgcacctgccccgcttcaagatggaggagagctatgacctgaaggacaccctgcggaccatgggcatggtgaacatcttcaatggagatgctgacctgagcggcatgacctggagccacggcctgtctgtgtccaaggtgctgcacaaggcctttgtggaggtgacagaggagggcgtggaggccgctgctgccacagctgtggtggtggtggagctgagcagccccagcaccaatgaggagttctgctgcaaccaccccttcctgttcttcatccggcagaacaagaccaacagcatcctcttctacggccgcttcagcagcccctag

SEQ ID NO: 169389 - DNA, 1017 bp, synthetic construct
  misc_feature 1..1017: note = Description of Artificial Sequence: Synthetic coding sequence
  source 1..1017: mol_type = other DNA
atgaacagcctgtctgaggccaacaccaagttcatgtttgacctcttccagcagttcaggaagagcaaggagaacaacatcttctacagccccatcagcatcaccagcgccctgggcatggtgctgctgggcgccaaggacaacacagcccagcagatcagcaaggtgctgcactttgaccaggtgacagagaacaccacagagaaggccgccacctaccacgtggacagaagtggaaatgtgcaccaccagttccagaagctgctgacagagttcaacaagagcacagatgcctatgagctgaagatcgccaacaagctgtttggagagaagacctaccagttcctgcaggagtacctggatgccatcaagaagttctaccagacctctgtggagagcacagactttgccaatgcccctgaggagagcaggaagaagatcaacagctgggtggagagccagaccaatgagaagatcaagaacctcttcccagatggcaccatcggaaatgacaccaccctggtgctggtgaatgccatctacttcaagggccagtgggagaacaagttcaagaaggagaacaccaaggaggagaagttctggcccaacaagctggaggagaagctgacagctgagaagctgatggagtggaccagcctgcagaacatgagggagacctgtgtggacctgcacctgccccgcttcaagatggaggagagctatgacctgaaggacaccctgcggaccatgggcatggtgaacatcttcaatggagatgctgacctgagcggcatgacctggagccacggcctgtctgtgtccaaggtgctgcacaaggcctttgtggaggtgacagaggagggcgtggaggccgctgctgccacagctgtggtggtggtggagctgagcagccccagcaccaatgaggagttctgctgcaaccaccccttcctgttcttcatccggcagaacaagaccaacagcatcctcttctacggccgcttcagcagcccctag

SEQ ID NO: 169390 - DNA, 1128 bp, synthetic construct
  misc_feature 1..1128: note = Description of Artificial Sequence: Synthetic coding sequence
  source 1..1128: mol_type = other DNA
atggatgccctgcagctggccaacagcgcctttgctgtggacctcttcaagcagctgtgtgagaaggagcccctgggcaatgtgctcttcagccccatctgcctgagcaccagcctgagcctggcccaggtgggcgccaagggggacacagccaatgagatcggccaggtgctgcactttgaaaatgtgaaggatgtgcccttcggcttccagacagtgaccagtgatgtgaacaagctgagcagcttctacagcctgaagctgatcaagaggctgtatgtggacaagagcctgaacctgagcacagagttcatcagcagcaccaagaggccctatgccaaggagctggagaccgtggacttcaaggacaagctggaggagaccaagggccagatcaacaacagcatcaaggacctgacagatggccactttgagaacatcctggccgacaacagcgtgaatgaccagaccaagatcctggtggtgaatgctgcctactttgtgggcaagtggatgaagaagttcagcgagagcgagaccaaggagtgccccttccgggtgaacaagacagacaccaagcctgtgcagatgatgaacatggaggccaccttctgcatgggcaacatcgacagcatcaactgcaagatcatcgagctgcccttccagaacaagcacctgtccatgttcatcctgctgcccaaggatgtggaggatgagagcacaggcctggagaagattgagaagcagctgaacagcgagagcctgagccagtggaccaaccccagcaccatggccaatgccaaggtgaagctgagcatccccaagttcaaggtggagaagatgattgaccccaaggcctgcctggagaacctgggcctgaagcacatcttcagcgaggacaccagtgacttcagcggcatgtctgagaccaagggcgtggccctgagcaatgtcatccacaaggtgtgcctggagatcacagaagatggaggagacagcattgaggtgcctggggcccgcatcctgcagcacaaggatgagctgaatgctgaccaccccttcatctacatcatccgccacaacaagaccaggaacatcatcttcttcggcaagttctgcagcccctag

SEQ ID NO: 169391 - DNA, 390 bp, synthetic construct
  misc_feature 1..390: note = Description of Artificial Sequence: Synthetic coding sequence
  source 1..390: mol_type = other DNA
atggatgccctgcagctggccaacagcgcctttgctgtggacctcttcaagcagctgtgtgagaaggagcccctgggcaatgtgctcttcagccccatctgcctgagcaccagcctgagcctggcccaggtgggcgccaagggggacacagccaatgagatcggccaggtgctgcactttgaaaatgtgaaggatgtgcccttcggcttccagacagtgaccagtgatgtgaacaagctgagcagcttctacagcctgaagctgatcaagaggctgtatgtggacaagagcctgaacctgagcacagagttcatcagcagcaccaagaggccctatgccaaggagctggagaccgtggacttcaaggacaagctggaggagaccaagtag

SEQ ID NO: 169392 - DNA, 1131 bp, synthetic construct
  misc_feature 1..1131: note = Description of Artificial Sequence: Synthetic coding sequence
  source 1..1131: mol_type = other DNA
atggatgtgctggccgaggccaacggcacctttgccctgaacctgctgaagaccctgggcaaggacaacagcaagaatgtgttcttcagccccatgtccatgagctgtgccctggccatggtgtacatgggcgccaagggcaacacagctgcccagatggcccagatcctgtccttcaacaagagcggcggcggcggggacatccaccagggcttccagagcctgctgacagaggtgaacaagacaggcacccagtacctgctgaggatggccaaccggctgtttggagagaagagctgtgacttcctgagcagcttccgggacagctgccagaagttctaccaggccgagatggaggagctggacttcatctctgctgtggagaagagcaggaagcacatcaacacctgggtggccgagaagacagagggcaagattgctgagctgctgagccctggctctgtggaccccctgacccggctggtgctggtgaatgctgtgtacttccggggcaactgggatgagcagtttgacaaggagaacacagaggagcggctcttcaaggtgtccaagaatgaggagaagcctgtgcagatgatgttcaagcagagcaccttcaagaagacctacatcggggagatcttcacccagatcctggtgctgccctacgtgggcaaggagctgaacatgatcatcatgctgcctgatgagaccacagacctgaggacagtggagaaggagctgacctatgagaagtttgtggagtggacccggctggacatgatggatgaggaggaggtggaggtgtccctgccccgcttcaagctggaggagagctatgacatggagagcgtgctgaggaacctgggcatgacagatgcctttgagctgggcaaggctgacttcagcggcatgagccagacagacctgagcctgagcaaggtggtgcacaagagctttgtggaggtgaatgaggagggcacagaggccgccgccgccacagctgccatcatgatgatgagatgtgccaggtttgtgccccgcttctgtgccgaccaccccttcctgttcttcatccagcacagcaagaccaacggcatcctcttctgtggccgcttcagcagcccctag

SEQ ID NO: 169393 - DNA, 546 bp, synthetic construct
  misc_feature 1..546: note = Description of Artificial Sequence: Synthetic coding sequence
  source 1..546: mol_type = other DNA
tgactgaacctgctgaagaccctgggcaaggacaacagcaagaatgtgttcttcagccccatgtccatgagctgtgccctggccatggtgtacatgggcgccaagggcaacacagctgcccagatggcccagatcctgtccttcaacaagagcggcggcggcggggacatccaccagggcttccagagcctgctgacagaggtgaacaagacaggcacccagtacctgctgaggatggccaaccgggagagctatgacatggagagcgtgctgaggaacctgggcatgacagatgcctttgagctgggcaaggctgacttcagcggcatgagccagacagacctgagcctgagcaaggtggtgcacaagagctttgtggaggtgaatgaggagggcacagaagctgctgctgccacagctgccatcatgatgatgagatgtgccaggtttgtgccccgcttctgtgccgaccaccccttcctgttcttcatccagcacagcaagaccaacggcatcctcttctgtggccgcttcagcagcccctag

SEQ ID NO: 169394 - DNA, 1131 bp, synthetic construct; identical to SEQ ID NO: 169392
  misc_feature 1..1131: note = Description of Artificial Sequence: Synthetic coding sequence
  source 1..1131: mol_type = other DNA

SEQ ID NO: 169395 - DNA, 1131 bp, synthetic construct; identical to SEQ ID NO: 169392
  misc_feature 1..1131: note = Description of Artificial Sequence: Synthetic coding sequence
  source 1..1131: mol_type = other DNA

SEQ ID NO: 169396 - DNA, 1131 bp, synthetic construct; identical to SEQ ID NO: 169392
  misc_feature 1..1131: note = Description of Artificial Sequence: Synthetic coding sequence
  source 1..1131: mol_type = other DNA

SEQ ID NO: 169397 - DNA, 1131 bp, synthetic construct; identical to SEQ ID NO: 169392
  misc_feature 1..1131: note = Description of Artificial Sequence: Synthetic coding sequence
  source 1..1131: mol_type = other DNA

SEQ ID NO: 169398 - DNA, 1131 bp, synthetic construct; identical to SEQ ID NO: 169392
  misc_feature 1..1131: note = Description of Artificial Sequence: Synthetic coding sequence
  source 1..1131: mol_type = other DNA

SEQ ID NO: 169399 - DNA, 579 bp, synthetic construct
  misc_feature 1..579: note = Description of Artificial Sequence: Synthetic coding sequence
  source 1..579: mol_type = other DNA
atggatgtgctggccgaggccaacggcacctttgccctgaacctgctgaagaccctgggcaaggacaacagcaagaatgtgttcttcagccccatgtccatgagctgtgccctggccatggtgtacatgggcgccaagggcaacacagctgcccagatggcccagatcctgtccttcaacaagagcggcggcggcggggacatccaccagggcttccagagcctgctgacagaggtgaacaagacaggcacccagtacctgctgaggatggccaaccgggagagctatgacatggagagcgtgctgaggaacctgggcatgacagatgcctttgagctgggcaaggctgacttcagcggcatgagccagacagacctgagcctgagcaaggtggtgcacaagagctttgtggaggtgaatgaggagggcacagaggccgccgccgccacagctgccatcatgatgatgagatgtgccaggtttgtgccccgcttctgtgccgaccaccccttcctgttcttcatccagcacagcaagaccaacggcatcctcttctgtggccgcttcagcagcccctag

SEQ ID NO: 169400 - DNA, 1143 bp, synthetic construct
  misc_feature 1..1143: note = Description of Artificial Sequence: Synthetic coding sequence
  source 1..1143: mol_type = other DNA
atggccagcctggccgccgccaatgctgagttctgcttcaacctcttccgggagatggatgacaaccagggcaatggaaatgtgttcttcagcagcctgagcctgtttgctgccctggccctggtgcggctgggcgcccaggatgacagcctgagccagattgacaagctgctgcacgtgaacacagccagcggctacggcaacagcagcaacagccagagcggcctgcagagccagctgaagagggtcttcagtgacatcaatgccagccacaaggactatgacctgagcatcgtgaatggcctgtttgctgagaaggtgtatggcttccacaaggactacattgaatgtgccgagaagctgtatgatgccaaggtggagcgggtggacttcaccaaccacctggaggacaccaggaggaacatcaacaagtgggtggagaatgagacccacggcaagatcaagaatgtcatcggggagggcggcatcagcagcagcgctgtgatggtgctggtgaatgctgtgtacttcaagggcaagtggcagagcgccttcaccaagtctgagaccatcaactgccacttcaagagccccaagtgcagcggcaaggctgtggccatgatgcaccaggagaggaagttcaacctgtctgtgattgaggaccccagcatgaagatcctggagctgcgctacaacggcggcatcaacatgtatgtgctgctgcctgaaaatgacctgtctgaaattgagaacaagctgaccttccagaacctgatggagtggaccaaccccaggaggatgaccagcaaatatgtggaggtgttcttcccccagttcaagattgagaagaactatgagatgaagcagtacctgcgggccctgggcctgaaggacatctttgatgagagcaaggctgacctgagcggcatcgccagcggcggccgcctgtacatcagcaggatgatgcacaagagctacatcgaggtgacagaggagggcacagaggccacagctgccaccggcagcaacatcgtggagaagcagctgccccagagcaccctcttccgggctgaccaccccttcctgtttgtgatcaggaaggatgacatcatcctcttcagcggcaaggtgtcctgcccctag

SEQ ID NO: 169401 - DNA, 1143 bp, synthetic construct; identical to SEQ ID NO: 169400
  misc_feature 1..1143: note = Description of Artificial Sequence: Synthetic coding sequence
  source 1..1143: mol_type = other DNA

SEQ ID NO: 169402 - DNA, 387 bp, synthetic construct
  misc_feature 1..387: note = Description of Artificial Sequence: Synthetic coding sequence
  source 1..387: mol_type = other DNA
atggccagcctggccgccgccaatgctgagttctgcttcaacctcttccgggagatggatgacaaccagggcaatggaaatgtgttcttcagcagcctgagcctgtttgctgccctggccctggtgcggctgggcgcccaggatgacagcctgagccagattgacaagctgctgcacgtgaacacagccagcggctacggcaacagcagcaacagccagagcggcctgcagagccagctgaagagggtcttcagtgacatcaatgccagccacaaggactatgacctgagcatcgtgaatggcctgtttgctgagaaggtgtatggcttccacaaggactacattgaatgtgccgagaagctgtatgatgccaaggtggagaggtag

SEQ ID NO: 169403 - DNA, 387 bp, synthetic construct; identical to SEQ ID NO: 169402
  misc_feature 1..387: note = Description of Artificial Sequence: Synthetic coding sequence
  source 1..387: mol_type = other DNA

SEQ ID NO: 169404 - DNA, 498 bp, synthetic construct
  misc_feature 1..498: note = Description of Artificial Sequence: Synthetic coding sequence
  source 1..498: mol_type = other DNA
atggccagcctggccgccgccaatgctgagttctgcttcaacctcttccgggagatggatgacaaccagggcaatggaaatgtgttcttcagcagcctgagcctgtttgctgccctggccctggtgcggctgggcgcccaggatgacagcctgagccagattgacaagctgctgcacgtgaacacagccagcggctacggcaacagcagcaacagccagagcggcctgcagagccagctgaagagggtcttcagtgacatcaatgccagccacaaggactatgacctgagcatcgtgaatggcctgtttgctgagaaggtgtatggcttccacaaggactacattgaatgtgccgagaagctgtatgatgccaaggtggagcgggtggacttcaccaaccacctggaggacaccaggaggaacatcaacaagtgggtggagaatgagacccacggcaagatcaagaatgtcatcggggagggcggcatcagcagctag

SEQ ID NO: 169405 - DNA, 1092 bp, synthetic construct
  misc_feature 1..1092: note = Description of Artificial Sequence: Synthetic coding sequence
  source 1..1092: mol_type = other DNA
atggccagcctggccgccgccaatgctgagttctgcttcaacctcttccgggagatggatgacaaccagggcaatggaaatgtgttcttcagcagcctgagcctgtttgctgccctggccctggtgcggctgggcgcccaggatgacagcctgagccagattgacaagagcggcctgcagagccagctgaagagggtcttcagtgacatcaatgccagccacaaggactatgacctgagcatcgtgaatggcctgtttgctgagaaggtgtatggcttccacaaggactacattgaatgtgccgagaagctgtatgatgccaaggtggagcgggtggacttcaccaaccacctggaggacaccaggaggaacatcaacaagtgggtggagaatgagacccacggcaagatcaagaatgtgattggagagggcggcatcagcagcagcgctgtgatggtgctggtgaatgctgtgtacttcaagggcaagtggcagagcgccttcaccaagtctgagaccatcaactgccacttcaagagccccaagtgcagcggcaaggctgtggccatgatgcaccaggagaggaagttcaacctgtctgtgattgaggaccccagcatgaagatcctggagctgcgctacaatggaggcatcaacatgtatgtgctgctgcctgaaaatgacctgtctgaaattgagaacaagctgaccttccagaacctgatggagtggaccaaccccaggaggatgaccagcaaatatgtggaggtgttcttcccccagttcaagattgagaagaactatgagatgaagcagtacctgcgggccctgggcctgaaggacatctttgatgagagcaaggctgacctgtctggaattgccagcggcggccgcctgtacatcagcaggatgatgcacaagagctacatcgaggtgacagaggagggcacagaggccacagctgccaccggcagcaacatcgtggagaagcagctgccccagagcaccctcttccgggctgaccaccccttcctgtttgtgatcaggaaggatgacatcatcctcttcagcggcaaggtgtcctgcccctag

SEQ ID NO: 169406 - DNA, 1143 bp, synthetic construct; identical to SEQ ID NO: 169400
  misc_feature 1..1143: note = Description of Artificial Sequence: Synthetic coding sequence
  source 1..1143: mol_type = other DNA

SEQ ID NO: 169407 - DNA, 1125 bp, synthetic construct
  misc_feature 1..1125: note = Description of Artificial Sequence: Synthetic coding sequence
  source 1..1125: mol_type = other DNA
atggatgacctgtgtgaggccaacggcacctttgccatcagcctcttcaagatcctgggggaggaggacaacagcagaaatgtgttcttcagccccatgagcatcagcagcgccctggccatggtgttcatgggcgccaagggcagcacagctgcccagatgagccaggccctgtgcctgtacaaggatggagacatccaccggggcttccagagcctgctgtctgaggtgaacagaacaggcacccagtacctgctgaggacagccaaccggctgtttggagagaagacctgtgacttcctgcctgacttcaaggagtactgccagaagttctaccaggccgagctggaggagctgagctttgctgaggacacagaagaatgtaggaagcacatcaatgactgggtggccgagaagacagagggcaagatcagcgaggtgctggatgctggcaccgtggaccccctgaccaagctggtgctggtgaatgccatctacttcaagggcaagtggaatgagcagtttgacaggaagtacacccggggcatgctgttcaagaccaatgaggagaagaagacagtgcagatgatgttcaaggaggccaagttcaagatgggctatgcagatgaggtgcacacccaggtgctggagctgccctacgtggaggaggagctgtccatggtgatcctgctgcctgatgacaacacagacctggccgtggtggagaaggccctgacctatgagaagttcaaggcctggaccaacagcgagaagctgaccaagagcaaggtgcaggtgttcctgccccggctgaagctggaggagagctatgacctggagcccttcctgcggcggctgggcatgattgatgcctttgatgaggccaaggctgacttcagcggcatgagcacagagaagaatgtgcccctgagcaaggtggcccacaagtgctttgtggaggtgaatgaggagggcacagaggccgccgccgccacagctgtggtgaggaacagccgctgcagcaggatggagccccgcttctgtgccgaccaccccttcctgttcttcatccgccaccacaagaccaactgcatcctcttctgtggccgcttcagcagcccctag

SEQ ID NO: 169408 - DNA, 1125 bp, synthetic construct; identical to SEQ ID NO: 169407
  misc_feature 1..1125: note = Description of Artificial Sequence: Synthetic coding sequence
  source 1..1125: mol_type = other DNA

SEQ ID NO: 169409 - DNA, 495 bp, synthetic construct
  misc_feature 1..495: note = Description of Artificial Sequence: Synthetic coding sequence
  source 1..495: mol_type = other DNA
atggatgacctgtgtgaggccaacggcacctttgccatcagcctcttcaagatcctgggggaggaggacaacagcagaaatgtgttcttcagccccatgagcatcagcagcgccctggccatggtgttcatgggcgccaagggcagcacagctgcccagatgagccaggccctgtgcctgtacaaggatggagacatccaccggggcttccagagcctgctgtctgaggtgaacagaacaggcacccagtacctgctgaggacagccaaccggctgtttggagagaagacctgtgacttcctgcctgacttcaaggagtactgccagaagttctaccaggccgagctggaggagctgagctttgctgaggacacagaagaatgtaggaagcacatcaatgactgggtggccgagaagacagagggcaagatcagcgaggtgctggatgctggcaccgtggaccccctgaccaagctggtgctggtgaatgcctag

SEQ ID NO: 169410 - DNA, 375 bp, synthetic construct
  misc_feature 1..375: note = Description of Artificial Sequence: Synthetic coding sequence
  source 1..375: mol_type = other DNA
atggatgacctgtgtgaggccaacggcacctttgccatcagcctcttcaagatcctgggggaggaggacaacagcagaaatgtgttcttcagccccatgagcatcagcagcgccctggccatggtgttcatgggcgccaagggcagcacagctgcccagatgagccaggccctgtgcctgtacaaggatggagacatccaccggggcttccagagcctgctgtctgaggtgaacagaacaggcacccagtacctgctgaggacagccaaccggctgtttggagagaagacctgtgacttcctgcctgacttcaaggagtactgccagaagttctaccaggccgagctggaggagctgagctttgctgaagattag

SEQ ID NO: 169411 - DNA, 579 bp, synthetic construct
  misc_feature 1..579: note = Description of Artificial Sequence: Synthetic coding sequence
  source 1..579: mol_type = other DNA
atgctgttcaagaccaatgaggagaagaagacagtgcagatgatgttcaaggaggccaagttcaagatgggctatgcagatgaggtgcacacccaggtgctggagctgccctacgtggaggaggagctgtccatggtgatcctgctgcctgatgacaacacagacctggccgtggtggagaaggccctgacctatgagaagttcaaggcctggaccaacagcgagaagctgaccaagagcaaggtgcaggtgttcctgccccggctgaagctggaggagagctatgacctggagcccttcctgcggcggctgggcatgattgatgcctttgatgaggccaaggctgacttcagcggcatgagcacagagaagaatgtgcccctgagcaaggtggcccacaagtgctttgtggaggtgaatgaggagggcacagaggccgccgccgccacagctgtggtgaggaacagccgctgcagcaggatggagccccgcttctgtgccgaccaccccttcctgttcttcatccgccaccacaagaccaactgcatcctcttctgtggccgcttcagcagcccctag

SEQ ID NO: 169412 - DNA, 1131 bp, synthetic construct
  misc_feature 1..1131: note = Description of Artificial Sequence: Synthetic coding sequence
  source 1..1131: mol_type = other DNA
atggagaccctgagcaatgccagcggcacctttgccatccggctgctgaagatcctgtgccaggacaaccccagccacaacgtgttctgcagccctgtgtccatcagcagcgccctggccatggtgctgctgggcgccaagggcaacacagccacccagatggcccaggccctgagcctgaacacagaggaggacatccaccgggccttccagagcctgctgacagaggtgaacaaggccggcacccagtacctgctgaggacagccaaccggctgtttggagagaagacctgccagttcctgagcaccttcaaggagagctgcctgcagttctaccacgccgagctgaaggagctgtccttcatccgggctgctgaggagagcaggaagcacatcaacacctgggtgtccaagaagacagagggcaagattgaggagctgctgcccggcagcagcattgatgctgagacccggctggtgctggtgaatgccatctacttcaagggcaagtggaatgagccctttgatgagacctacacccgggagatgcccttcaagatcaaccaggaggagcagaggcctgtgcagatgatgtaccaggaggccaccttcaagctggcccacgtgggggaggtgcgggcccagctgctggagctgccctatgccaggaaggagctgagcctgctggtgctgctgcctgatgatggagtggagctgagcacagtggagaagagcctgacctttgagaagctgacagcctggaccaagccagactgcatgaagagcacagaggtggaggtgctgctgcccaagttcaagctgcaggaggactatgacatggagagcgtgctgcggcacctgggcatcgtggatgccttccagcagggcaaggctgacctgagcgccatgtctgctgagcgggacctgtgcctgagcaagtttgtgcacaagagctttgtggaggtgaatgaggagggcacagaagctgctgctgccagcagctgctttgtggtggccgagtgctgcatggagagcggcccccgcttctgtgccgaccaccccttcctgttcttcatccgccacaacagagccaacagcatcctcttctgtggccgcttcagcagcccctag

SEQ ID NO: 169413 - DNA, 1104 bp, synthetic construct
  misc_feature 1..1104: note = Description of Artificial Sequence: Synthetic coding sequence
  source 1..1104: mol_type = other DNA
atgagcagccccccaccagcccggagcggcttctaccggcaggaggtgaccaagacagcctgggaggtgcgggctgtgtacagagacctgcagcctgtgggcagcggggcctacggggctgtgtgcagcgctgtggatggccgcactggagccaaggtggccatcaagaagctgtaccggcccttccagagcgagctgtttgccaagagggcctaccgggagctgcggctgctgaagcacatgagacatgaaaatgtgattggcctgctggatgtgttcaccccagatgagaccctggatgacttcacagacttctacctggtgatgcccttcatgggcacagacctgggcaagctgatgaagcatgagaagctgggagaagatcgcatccagttcctggtgtaccagatgctgaagggcctgcgctacatccacgccgccggcatcatccaccgggacctgaagccaggcaacctggccgtgaatgaagactgtgagctgaagatcctggactttggcctggcccggcaggccgacagcgagatgacaggctacgtggtgacccgctggtaccgggcccctgaggtgatcctgaactggatgagatacacccagacagtggacatctggagcgtgggctgcatcatggccgagatgatcaccgggaagaccctcttcaagggcagtgaccacctggaccagctgaaggagatcatgaaggtgacaggcaccccacctgctgagtttgtgcagaggctgcagagtgatgaggccaagaactacatgaagggcctgcctgagctggagaagaaggactttgccagcatcctgaccaatgccagccccctggccgtgaacctgctggagaagatgctggtgctggatgctgagcagagggtgacagctggggaggccctggcccacccctactttgagagcctgcatgacacagaagatgagccccaggtgcagaagtatgatgacagctttgatgatgtggacaggaccctggatgagtggaagagggtgacctacaaggaggtgctgtccttcaagccaccccggcagctgggcgcccgggtgtccaaggagacccccctgtag

SEQ ID NO: 169414 - DNA, 1500 bp, synthetic construct
  misc_feature 1..1500: note = Description of Artificial Sequence: Synthetic coding sequence
  source 1..1500: mol_type = other DNA
atgaagcacagcctgaatgccctgctgatcttcctgatcatcaccagcgcctggggcggcagcaagggccccctggaccagctggagaagggcggggagacagcccagagcgctgacccccagtgggagcagctgaacaacaagaacctgtccatgcccctgctgcctgctgacttccacaaggagaacacagtgaccaatgactggatccctgagggggaggaggatgatgactacctggacctggagaagatcttctctgaagatgatgactacattgatattgtggacagcctgtctgtgagccccacagacagtgatgtgtctgctggcaacatcctgcagctgttccacggcaagagccgcatccagaggctgaacatcctgaatgccaagtttgccttcaacctgtacagagtgctgaaggaccaggtgaacacctttgacaacatcttcatcgcccctgtgggcatcagcacagccatgggcatgatcagcctgggcctgaagggggagacccatgagcaggtgcacagcatcctgcacttcaaggactttgtgaatgccagcagcaaatatgagatcaccaccatccacaacctcttcaggaagctgacccacaggctcttcagaagaaactttggctacaccctgcggtctgtgaatgacctgtacatccagaagcagttccccatcctgctggacttcaagaccaaggtgcgggagtactactttgctgaggcccagattgctgacttcagtgaccctgccttcatcagcaagaccaacaaccacatcatgaagctgaccaagggcctcatcaaggatgccctggagaacattgatcctgccacccagatgatgatcctgaactgcatctacttcaagggctcctgggtgaacaagtttcctgtggagatgacccacaaccacaacttccggctgaatgaaagagaggtggtgaaggtgtccatgatgcagaccaagggcaacttcctggccgccaatgaccaggagctggactgtgacatcctgcagctggagtatgtgggcggcatctccatgctgattgtggtgccccacaagatgagcggcatgaagaccctggaggcccagctgaccccccgggtggtggagcgctggcagaagtccatgaccaacagaacccgggaggtgctgctgcccaagttcaagctggagaagaactacaacctggtggagagcctgaagctgatgggcatccgcatgctgtttgacaagaatggaaacatggccggcatcagtgaccagagaattgccatcgacctcttcaagcaccagggcaccatcaccgtgaatgaggagggcacccaggccaccaccgtgaccaccgtgggcttcatgcccctgagcacccaggtgcgcttcaccgtggaccggcccttcctgttcctgatctatgagcacaggaccagctgcctgctcttcatgggccgggtggccaaccccagccgctcctag

SEQ ID NO: 169415 - DNA, 1197 bp, synthetic construct
  misc_feature 1..1197: note = Description of Artificial Sequence: Synthetic coding sequence
  source 1..1197: mol_type = other DNA
atgaactggcacctgcccctcttcctgctggcctctgtgaccctgcccagcatctgcagccacttcaaccccctgagcctggaggagctgggcagcaacacaggcatccaggtgttcaaccagatcgtgaagagccggccccatgacaacatcgtcatcagcccccacggcatcgcctctgtgctgggcatgctgcagctgggcgcagatggccgcaccaagaagcagctggccatggtgatgagatatggagtgaatggagtgggcaagatcctgaagaagatcaacaaggccatcgtgtccaagaagaacaaggacatcgtgacagtggccaatgctgtgtttgtgaagaatgccagcgagattgaggtgccctttgtgaccaggaacaaggatgtgttccagtgtgaggtgagaaatgtgaactttgaggaccctgccagcgcctgtgacagcatcaatgcctgggtgaagaatgagacccgggacatgattgacaacctgctgagcccagacctgattgatggagtgctgacccggctggtgctggtgaatgctgtgtacttcaagggcctgtggaagagccgcttccagcctgagaacaccaagaagaggacctttgtggccgcagatggcaagagctaccaggtgcccatgctggcccagctgagcgtcttccgctgtggcagcaccagcgccccaaatgacctgtggtacaacttcatcgagctgccctaccatggagagagcatctccatgctgattgccctgcccacagagagcagcacccccctgagcgccatcatcccccacatcagcaccaagaccatcgacagctggatgagcatcatggtgcccaagagggtgcaggtgatcctgcccaagttcaccgctgtggcccagacagacctgaaggagcccctgaaggtgctgggcatcacagacatgtttgacagcagcaaggccaactttgccaagatcaccactggaagtgagaacctgcacgtgagccacatcctgcagaaggccaagattgaggtgtctgaagatggcaccaaggccagcgctgccaccacagccatcctgattgcccggagcagccccccctggttcatcgtggaccggcccttcctgttcttcatccgccacaaccccaccggggctgtgctcttcatgggccagatcaacaagccctag

SEQ ID NO: 169416 - DNA, 1194 bp, synthetic construct
  misc_feature 1..1194: note = Description of Artificial Sequence: Synthetic coding sequence
  source 1..1194: mol_type = other DNA
atgaactggcacctgcccctcttcctgctggcctctgtgaccctgcccagcatctgcagccacttcaaccccctgagcctggaggagctgggcagcaacacaggcatccaggtgttcaaccagatcgtgaagagccggccccatgacaacatcgtcatcagcccccacggcatcgcctctgtgctgggcatgctgcagctgggcgcagatggccgcaccaagaagcagctggccatggtgatgagatatggagtgaatggagtgggcaagatcctgaagaagatcaacaaggccatcgtgtccaagaagaacaaggacatcgtgacagtggccaatgctgtgtttgtgaagaatgccagcgagattgaggtgccctttgtgaccaggaacaaggatgtgttccagtgtgaggtgagaaatgtgaactttgaggaccctgccagcgcctgtgacagcatcaatgcctgggtgaagaatgagacccgggacatgattgacaacctgctgagcccagacctgattgatggagtgctgacccggctggtgctggtgaatgctgtgtacttcaagggcctgtggaagagccgcttccagcctgagaacaccaagaagaggacctttgtggccgcagatggcaagagctaccaggtgcccatgctggcccagctgagcgtcttccgctgtggcagcaccagcgccccaaatgacctgtggtacaacttcatcgagctgccctaccatggagagagcatctccatgctgattgccctgcccacagagagcagcacccccctgagcgccatcatcccccacatcagcaccaagaccatcgacagctggatgagcatcatggtgcccaagagggtgcaggtgatcctgcccaagttcaccgctgtggcccagacagacctgaaggagcccctgaaggtgctgggcatcacagacatgtttgacagcagcaaggccaactttgccaagatcaccaggtctgagaacctgcacgtgagccacatcctgcagaaggccaagattgaggtgtctgaagatggcaccaaggccagcgctgccaccacagccatcctgattgcccggagcagccccccctggttcatcgtggaccggcccttcctgttcttcatccgccacaaccccactggagctgtgctcttcatgggccagatcaacaagccctag

SEQ ID NO: 169417 - DNA, 1194 bp, synthetic construct; identical to SEQ ID NO: 169416
  misc_feature 1..1194: note = Description of Artificial Sequence: Synthetic coding sequence
  source 1..1194: mol_type = other DNA

SEQ ID NO: 169418 - DNA, 129 bp, synthetic construct
  misc_feature 1..129: note = Description of Artificial Sequence: Synthetic coding sequence
  source 1..129: mol_type = other DNA
atgaactggcacctgcccctcttcctgctggcctctgtgaccctgcccagcatctgcagccacttcaaccccctgagcctggaggagctgggcagcaacacaggcatccaggtgttcaaccagatctag

SEQ ID NO: 169419 - DNA, 831 bp, synthetic construct
  misc_feature 1..831: note = Description of Artificial Sequence: Synthetic coding sequence
  source 1..831: mol_type = other DNA
atgaactggcacctgcccctcttcctgctggcctctgtgaccctgcccagcatctgcagccacttcaaccccctgagcctggaggagctgggcagcaacacaggcatccaggtgttcaaccagatcgtgaagagccggccccatgacaacatcgtcatcagcccccacggcatcgcctctgtgctgggcatgctgcagctgggcgcagatggccgcaccaagaagcagctggccatggtgatgagatatggagtgaatggagtgggcaagatcctgaagaagatcaacaaggccatcgtgtccaagaagaacaaggacatcgtgacagtggccaatgctgtgtttgtgaagaatgccagcgagattgaggtgccctttgtgaccaggaacaaggatgtgttccagtgtgaggtgagaaatgtgaactttgaggaccctgccagcgcctgtgacagcatcaatgcctgggtgaagaatgagacccgggacatgattgacaacctgctgagcccagacctgattgatggagtgctgacccggctggtgctggtgaatgctgtgtacttcaagggcctgtggaagagccgcttccagcctgagaacaccaagaagaggacctttgtggccgcagatggcaagagctaccaggtgcccatgctggcccagctgagcgtcttccgctgtggcagcaccagcgccccaaatgacctgtggtacaacttcatcgagctgccctaccatggagagagcatctccatgctgattgccctgcccacagagagcagcacccccctgagcgccatcatcccccacatcagcaccaagacctag

SEQ ID NO: 169420 - DNA, 1230 bp, synthetic construct
  misc_feature 1..1230: note = Description of Artificial Sequence: Synthetic coding sequence
  source 1..1230: mol_type = other DNA
atgtctgactgccgcagcagcctggtggagggcaccatgaactggcacctgcccctcttcctgctggcctctgtgaccctgcccagcatctgcagccacttcaaccccctgagcctggaggagctgggcagcaacacaggcatccaggtgttcaaccagatcgtgaagagccggccccatgacaacatcgtcatcagcccccacggcatcgcctctgtgctgggcatgctgcagctgggcgcagatggccgcaccaagaagcagctggccatggtgatgagatatggagtgaatggagtgggcaagatcctgaagaagatcaacaaggccatcgtgtccaagaagaacaaggacatcgtgacagtggccaatgctgtgtttgtgaagaatgccagcgagattgaggtgccctttgtgaccaggaacaaggatgtgttccagtgtgaggtgagaaatgtgaactttgaggaccctgccagcgcctgtgacagcatcaatgcctgggtgaagaatgagacccgggacatgattgacaacctgctgagcccagacctgattgatggagtgctgacccggctggtgctggtgaatgctgtgtacttcaagggcctgtggaagagccgcttccagcctgagaacaccaagaagaggacctttgtggccgcagatggcaagagctaccaggtgcccatgctggcccagctgagcgtcttccgctgtggcagcaccagcgccccaaatgacctgtggtacaacttcatcgagctgccctaccatggagagagcatctccatgctgattgccctgcccacagagagcagcacccccctgagcgccatcatcccccacatcagcaccaagaccatcgacagctggatgagcatcatggtgcccaagagggtgcaggtgatcctgcccaagttcaccgctgtggcccagacagacctgaaggagcccctgaaggtgctgggcatcacagacatgtttgacagcagcaaggccaactttgccaagatcaccaggtctgagaacctgcacgtgagccacatcctgcagaaggccaagattgaggtgtctgaagatggcaccaaggccagcgctgccaccacagccatcctgattgcccggagcagccccccctggttcatcgtggaccggcccttcctgttcttcatccgccacaaccccactggagctgtgctcttcatgggccagatcaacaagccctag

SEQ ID NO: 169421 - DNA, 264 bp, synthetic construct
  misc_feature 1..264: note = Description of Artificial Sequence: Synthetic coding sequence
  source 1..264: mol_type = other DNA
atgaactggcacctgcccctcttcctgctggcctctgtgaccctgcccagcatctgcagccacttcaaccccctgagcctggaggagctgggcagcaacacaggcatccaggtgttcaaccagatcgtgaagagccggccccatgacaacatcgtcatcagcccccacggcatcgcctctgtgctgggcatgctgcagctgggcgcagatggccgcaccaagaagcagctggccatggtgatgagatatggagtgaatggatag

SEQ ID NO: 169422 - DNA, 1257 bp, synthetic construct
  misc_feature 1..1257: note = Description of Artificial Sequence: Synthetic coding sequence
  source 1..1257: mol_type = other DNA
atgcaggccctggtgctgctgctgtgcatcggggccctgctgggccacagcagctgccagaacccagccagccccccagaggagggcagcccagaccctgacagcactggagccctggtggaggaggaggaccccttcttcaaggtgcctgtgaacaagctggccgctgctgtgagcaactttggctatgacctgtacagagtgcgcagcagcaccagccccaccaccaacgtgctgctgagccccctgtctgtggccacagccctgagcgccctgagcctgggcgctgagcagaggacagagagcatcatccaccgggccctgtactatgacctgatcagcagcccagacatccacggcacctacaaggagctgctggacacagtgacagccccccagaagaacctgaagagcgccagccgcatcgtgtttgagaagaagctgcgcatcaagagcagctttgtggcccccctggagaagagctatggcacccggccccgggtgctgaccggcaacccccggctggacctgcaggagatcaacaactgggtgcaggcccagatgaagggcaagctggcccggagcaccaaggagatcccagatgagatcagcatcctgctgctgggcgtggcccacttcaagggccagtgggtgaccaagtttgacagcaggaagaccagcctggaggacttctacctggatgaggagaggacagtgcgggtgcccatgatgtctgaccccaaggctgtgctgcgctatggcctggacagcgacctgagctgcaagatcgcccagctgcccctgaccggctccatgagcatcatcttcttcctgcccctgaaggtgacccagaacctgaccctgattgaggagagcctgaccagcgagttcatccatgacatcgaccgggagctgaagacagtgcaggccgtgctgactgtgcccaagctgaagctgtcctatgaaggagaggtgaccaagagcctgcaggagatgaagctgcagagcctgtttgacagcccagacttcagcaagatcaccgggaagcccatcaagctgacccaggtggagcaccgggccggctttgagtggaatgaagatggagctggcaccacccccagccctggcctgcagcctgcccacctgaccttccccctggactaccacctgaaccagcccttcatctttgtgctgcgggacacagacacaggagccctgctcttcatcggcaagatcctggacccccggggcccctag

SEQ ID NO: 169423 - DNA, 1233 bp, synthetic construct
  misc_feature 1..1233: note = Description of Artificial Sequence: Synthetic coding sequence
  source 1..1233: mol_type = other DNA
atggccttcctgggcctcttcagcctgctggtgctgcagagcatggccactggagccaccttccctgaggaggccatcgctgacctgtctgtgaacatgtacaaccggctgcgggccaccggggaggatgagaacatcctcttcagccccctgagcatcgccctggccatgggcatgatggagctgggcgcccagggcagcacccagaaggagatccgccacagcatgggctatgacagcctgaagaatggagaggagttctccttcctgaaggagttcagcaacatggtgacagccaaggagagccagtatgtgatgaagatcgccaacagcctgtttgtgcagaatggcttccacgtgaatgaggagttcctgcagatgatgaagaagtacttcaatgctgctgtgaaccacgtggacttcagccagaatgtggccgtggccaactacatcaacaagtgggtggagaacaacaccaacaacctggtgaaggacctggtgagcccccgggactttgatgctgccacctacctggccctgatcaatgctgtgtacttcaagggcaactggaagagccagttccggcctgagaacaccaggaccttctccttcaccaaggatgatgagagcgaggtgcagatccccatgatgtaccagcagggcgagttctactatggagagttcagtgatggcagcaatgaagctgggggcatctaccaggtgctggagatcccctatgaaggagatgagatctccatgatgctggtgctgagccggcaggaggtgcccctggccaccctggagcccctggtgaaggcccagctggtggaggagtgggccaacagcgtgaagaagcagaaggtggaggtgtacctgccccgcttcaccgtggagcaggagattgacctgaaggatgtgctgaaggccctgggcatcacagagatcttcatcaaggatgccaacctgaccggcctgagtgacaacaaggagatcttcctgagcaaggccatccacaagagcttcctggaggtgaatgaggagggcagcgaggccgctgctgtgtctggcatgattgccatcagcaggatggctgtgctgtacccccaggtgattgtggaccaccccttcttcttcctgatccggaacagaagaacaggcaccatcctcttcatgggccgggtgatgcaccctgagaccatgaacaccagcggccatgactttgaggagctgtag

SEQ ID NO: 169424 - DNA, 1233 bp, synthetic construct; identical to SEQ ID NO: 169423
  misc_feature 1..1233: note = Description of Artificial Sequence: Synthetic coding sequence
  source 1..1233: mol_type = other DNA

SEQ ID NO: 169425 - DNA, 738 bp, synthetic construct
  misc_feature 1..738: note = Description of Artificial Sequence: Synthetic coding sequence
  source 1..738: mol_type = other DNA
atggccttcctgggcctcttcagcctgctggtgctgcagagcatggccactggagccaccttccctgaggaggccatcgctgacctgtctgtgaacatgtacaaccggctgcgggccaccggggaggatgagaacatcctcttcagccccctgagcatcgccctggccatgggcatgatggagctgggcgcccagggcagcacccagaaggagatccgccacagcatgggctatgacagcctgaagaatggagaggagttctccttcctgaaggagttcagcaacatggtgacagccaaggagagccagtatgtgatgaagatcgccaacagcctgtttgtgcagaatggcttccacgtgaatgaggagttcctgcagatgatgaagaagtacttcaatgctgctgtgaaccacgtggacttcagccagaatgtggccgtggccaactacatcaacaagtgggtggagaacaacaccaacaacctggtgaaggacctggtgagcccccgggactttgatgctgccacctacctggccctgatcaatgctgtgtacttcaagggcaactggaagagccagttccggcctgagaacaccaggaccttctccttcaccaaggatgatgagagcgaggtgcagatccccatgatgtaccagcagggcgagttctactatggagagttcagtgatggcagcaatgaagctgggggcatctaccaggtgctggagatcccctag

SEQ ID NO: 169426 - DNA, 483 bp, synthetic construct
  misc_feature 1..483: note = Description of Artificial Sequence: Synthetic coding sequence
  source 1..483: mol_type = other DNA
atggccttcctgggcctcttcagcctgctggtgctgcagagcatggccactggagccaccttccctgaggaggccatcgctgacctgtctgtgaacatgtacaaccggctgcgggccaccggggaggatgagaacatcctcttcagccccctgagcatcgccctggccatgggcatgatggagctgggcgcccagggcagcacccagaaggagatccgccacagcatgggctatgacagcctgaagaatggagaggagttctccttcctgaaggagttcagcaacatggtgacagccaaggagagccagtatgtgatgaagatcgccaacagcctgtttgtgcagaatggcttccacgtgaatgaggagttcctgcagatgatgaagaagtacttcaatgctgctgtgaaccacgtggacttcagccagaatgtggccgtggccaactacatcaacaagtgggtggagaacaacaccaactag

SEQ ID NO: 169427 - DNA, 591 bp, synthetic construct
  misc_feature 1..591: note = Description of Artificial Sequence: Synthetic coding sequence
  source 1..591: mol_type = other DNA
atggtgggcggcctgaagaggaagcacagcgacctggaggaggaggaggagcgctgggagtggagccctgctggcctgcagagctaccagcaggccctgctgcgcatcagcctggacaaggtgcagaggagcctgggcccccgggcccccagcctgcggagacatgtgctgatccacaacaccctgcagcagctgcaggccgccctgcggctggccccagccccagccctgcccccagagcccctcttcctgggggaggaggacttcagcctgagcgccaccatcggcagcatcctgcgggagctggacacctccatggatggaacagagcccccccagaaccctgtgacccccctgggcctgcagaatgaggtgcccccccagcctgaccctgtgttcctggaggccctgagcagccgctacctgggggacagcggcctggatgacttcttcctggacatcgacaccagcgctgtggagaaggagcccgcccgggcccctcctgagcccccccacaacctcttctgtgcccctggctcctgggagtggaatgagctggaccacatcatggagatcatcctgggcagctag

SEQ ID NO: 169428 - DNA, 591 bp, synthetic construct; identical to SEQ ID NO: 169427
  misc_feature 1..591: note = Description of Artificial Sequence: Synthetic coding sequence
  source 1..591: mol_type = other DNA

SEQ ID NO: 169429 - DNA, 369 bp, synthetic construct
  misc_feature 1..369: note = Description of Artificial Sequence: Synthetic coding sequence
  source 1..369: mol_type = other DNA
atgaagctgctgaccggcctggtgttctgcagcctggtgctgggcgtgagcagccgctccttcttctccttcctgggggaggcctttgatggagcccgggacatgtggagggcctacagcgacatgagggaggccaactacatcggcagtgacaagtacttccacgcccggggcaactatgatgctgccaagaggggccctggaggagcctgggccgctgaggtgatcacagatgcccgggagaacatccagcgcttctttggacatggagctgaggacagcctggccgaccaggccgccaatgagtggggccgcagcggcaaggaccccaaccacttccggcctgctggcctgcctgagaagtactag

SEQ ID NO: 169430 - DNA, 369 bp, synthetic construct; identical to SEQ ID NO: 169429
  misc_feature 1..369: note = Description of Artificial Sequence: Synthetic coding sequence
  source 1..369: mol_type = other DNA

SEQ ID NO: 169431 - DNA, 369 bp, synthetic construct; identical to SEQ ID NO: 169429
  misc_feature 1..369: note = Description of Artificial Sequence: Synthetic coding sequence
  source 1..369: mol_type = other DNA

SEQ ID NO: 169432 - DNA, 369 bp, synthetic construct
  misc_feature 1..369: note = Description of Artificial Sequence: Synthetic coding sequence
  source 1..369: mol_type = other DNA
atgaagctgctgaccggcctggtgttctgcagcctggtgctgtctgtgagcagccgctccttcttctccttcctgggggaggcctttgatggagcccgggacatgtggagggcctacagcgacatgagggaggccaactacatcggcagtgacaagtacttccacgcccggggcaactatgatgctgccaagaggggccctggaggagcctgggccgctgaggtgatcagcaatgcccgggagaacatccagaggctgaccggcagaggagctgaggacagcctggccgaccaggccgccaacaagtggggccgcagcggccgggaccccaaccacttccggcctgctggcctgcctgagaagtactag

SEQ ID NO: 169433 - DNA, 252 bp, synthetic construct
  misc_feature 1..252: note = Description of Artificial Sequence: Synthetic coding sequence
  source 1..252: mol_type = other DNA
atgaagctgctgaccggcctggtgttctgcagcctggtgctgtctgtgagcagccgctccttcttctccttcctgggggaggcctttgatggagcccgggacatgtggagggcctacagcgacatgagggaggccaactacatcggcagtgacaagtacttccacgcccggggcaactatgatgctgccaagaggggccctggaggagcctgggccgctgaggtgatcagcctcttctctgctgagctgtag

SEQ ID NO: 169434 - DNA, 369 bp, synthetic construct; identical to SEQ ID NO: 169432
  misc_feature 1..369: note = Description of Artificial Sequence: Synthetic coding sequence
  source 1..369: mol_type = other DNA

SEQ ID NO: 169435 - DNA, 369 bp, synthetic construct; identical to SEQ ID NO: 169432
  misc_feature 1..369: note = Description of Artificial Sequence: Synthetic coding sequence
  source 1..369: mol_type = other DNA

SEQ ID NO: 169436 - DNA, 393 bp, synthetic construct
  misc_feature 1..393: note = Description of Artificial Sequence: Synthetic coding sequence
  source 1..393: mol_type = other DNA
atgaggctcttcaccggcatcgtgttctgcagcctggtgatgggcgtgaccagcgagagctggaggagcttcttcaaggaggccctgcagggcgtgggggacatgggccgggcctactgggacatcatgatcagcaaccaccagaacagcaaccgctacctgtatgcccggggcaactatgatgctgcccagaggggccctggaggagtgtgggccgccaagctgatcagccgcagccgggtgtacctgcagggcctgattgactgctacctgtttggaaacagcagcacagtgctggaggacagcaagagcaatgagaaggccgaggagtggggccgcagcggcaaggaccctgaccgcttccggccagatggcctgcccaagaagtactag

SEQ ID NO: 169437 - DNA, 1278 bp, synthetic construct
  misc_feature 1..1278: note = Description of Artificial Sequence: Synthetic coding sequence
  source 1..1278: mol_type = other DNA
atgggagaagatgctgcccaggccgagaagttccagcaccctggcagtgacatgaggcaggagaagcccagcagccccagccccatgcccagcagcacccccagccccagcctgaacctgggcaacacagaggaggccatccgggacaacagccaggtgaatgctgtgacagtgctgaccctgctggacaagctggtgaacatgctggatgctgtgcaggagaaccagcacaagatggagcagaggcagatcagcctggagggctctgtgaagggcatccagaatgacctgaccaagctgagcaagtaccaggccagcaccagcaacacagtgtccaagctgctggagaagagcaggaaggtgtctgcccacaccagggctgtgaaggagaggatggaccggcagtgtgcccaggtgaagaggctggagaacaaccacgcccagctgctgcggaggaaccacttcaaggtgctgatcttccaggaggagaatgagatcccagcctctgtgtttgtgaagcagcctgtgtctggagctgtggagggcaaggaggagctgcctgatgagaacaagagcctggaggagaccctgcacacagtggacctgagcagtgatgatgacctgccccatgatgaggaggccctggaggacagcgctgaggagaaggtggaggagagcagagctgagaagatcaagaggagcagcctgaagaaggtggacagcctgaagaaggccttcagccggcagaacatcgagaagaagatgaacaagctgggcaccaagatcgtgtctgtggagcggcgggagaagatcaagaagagcctgaccagcaaccaccagaagatcagcagcggcaagagcagccccttcaaggtgagccccctgacctttggaaggaagaaggtgcgggagggggagagccatgctgaaaatgagaccaagtctgaggacctgcccagcagcgagcagatgcccaatgaccaggaggaggagagctttgctgagggccacagcgaggccagcctggccagcgccctggtggagggggagattgctgaggaggccgctgagaaggccaccagccggggcagcaacagcggcatggacagcaacatcgacctgaccatcgtggaggatgaggaggaggagagcgtggccctggagcaggcccagaaggtgcgctatgagggcagctatgccctgaccagcgaggaggccgagaggagtgatggagaccctgtgcagcctgctgtgctgcaggtgcaccagaccagctag

SEQ ID NO: 169438 - DNA, 1290 bp, synthetic construct
  misc_feature 1..1290: note = Description of Artificial Sequence: Synthetic coding sequence
  source 1..1290: mol_type = other DNA
atggcccagcccggcaccctgaacctgaacaatgaggtggtgaagatgaggaaggaggtgaagaggatccgggtgctggtgatcaggaagctggtgcgctctgtgggccgcctgaagagcaagaagggcacagaagatgccctgctgaagaaccagaggcgggcccagaggctgctggaggagatccacgccatgaaggagctgaagccagacatcgtgaccaagagcgccctgggagatgacatcaactttgagaagatcttcaagaagccagacagcacagccacagagcgggccatcgcccggctggccgtgcaccccctgctgaagaagaagattgatgtgctgaaggctgctgtgcaggccttcaaggaggcccggcagaatgtggccgaggtggagagcagcaagaatgccagcgaggacaaccacagcgagaacaccctgtacagcaatgacaatggcagcaacctgcagcgggaggccaccgtcatcagcgagcagaaggtgaaggagaccaagatcctggccaagaagcccatccacaacagcaaggagaagatcgccaagatggagcacggccccaaggctgtgaccatcgccaacagccccagcaagcccagcgagaaggacagcgtggtgtccctggagagccagaagaccccagctgaccccaagctgaagaccctgagccagaccaagaagaacaagggcagtgacagcagcctgagcggcaacagtgatggaggagaggagttctgtgaggaggagaaggagtactttgatgacagcacagaggagcgcttctacaagcagagctccatgtctgaagattctgattctggagatgacttcttcatcggcaaggtgcggaggaccaggaagaaggagagcagctgccacagctctgtgaaggagcagaagcccctggagaaggtgttcctgaaggaggacacaggagagacccatggagacaccagaaatgacaagatcaagcccagcacagagaccaggaagctggagagcgtcttcttccacagcctgagcggcagcaagagcagcagaagaaacttcaaggagcaggcccccaagaccaggagcctggacttcccccagaatgagccccagatcaagaaccagttcaacaagaagctgagcggccgcctggagaacaccaagcagcagctgcagctgcccctgcaccccagctgggaggccagcagaagaaggaaggagcagcagagcaacattgctgtgttccagggcaagaagatcacctttgatgactag

SEQ ID NO: 169439 - DNA, 1296 bp, synthetic construct
  misc_feature 1..1296: note = Description of Artificial Sequence: Synthetic coding sequence
  source 1..1296: mol_type = other DNA
atgacagtgaagacagaagctgccaagggcaccctgacctacagcaggatgaggggcatggtggccatcctgattgccttcatgaagcagaggaggatgggcctgaatgacttcatccagaagatcgccaacaacagctatgcctgcaagcaccctgaggtgcagagcatcctgaagatcagccagccccaggagcctgagctgatgaatgccaaccccagccccccacccagccccagccagcagatcaacctgggccccagcagcaacccccacgccaagcccagcgacttccacttcctgaaggtgattggcaagggcagctttgggaaggtgctgctggcccggcacaaggccgaggaggtgttctatgctgtgaaggtgctgcagaagaaggccatcctgaagaagaaggaggagaagcacatcatgtctgaaagaaatgtgctgctgaagaatgtgaagcaccccttcctggtgggcctgcacttctccttccagacagctgacaagctgtactttgtgctggactacatcaatggaggagagctgttctaccacctgcagcgggagcgctgcttcctggagccccgggcccgcttctatgctgctgagatcgccagcgccctgggctacctgcacagcctgaacatcgtgtacagagacctgaagccagagaacatcctgctggacagccagggccacatcgtgctgacagactttggcctgtgcaaggagaacatcgagcacaacagcaccaccagcaccttctgtggcaccccagagtacctggcccctgaggtgctgcacaagcagccctatgacagaacagtggactggtggtgcctgggcgctgtgctgtatgagatgctgtatggcctgccccccttctacagcaggaacacagctgagatgtatgacaacatcctgaacaagcccctgcagctgaagcccaacatcaccaacagcgcccggcacctgctggagggcctgctgcagaaggacaggaccaagaggctgggcgccaaggatgacttcatggagatcaagagccacgtgttcttcagcctcatcaactgggatgacctgatcaacaagaagatcaccccacccttcaaccccaacgtgtctggccccaatgacctgcggcactttgatcctgagttcacagaggagcctgtgcccaacagcatcggcaagagcccagacagcgtgctggtgacagcctctgtgaaggaggccgctgaggccttcctgggcttctcctatgccccacccacagacagcttcctgtag

SEQ ID NO: 169440 - DNA, 1266 bp, synthetic construct
  misc_feature 1..1266: note = Description of Artificial Sequence: Synthetic coding sequence
  source 1..1266: mol_type = other DNA
atgaagcccagcaagcgcttcttcatcagcccccccagcagcacagccttcatgaagcagaggaggatgggcctgaatgacttcatccagaagatcgccaacaacagctatgcctgcaagcaccctgaggtgcagagcatcctgaagatcagccagccccaggagcctgagctgatgaatgccaaccccagccccccacccagccccagccagcagatcaacctgggccccagcagcaacccccacgccaagcccagcgacttccacttcctgaaggtgattggcaagggcagctttgggaaggtgctgctggcccggcacaaggccgaggaggtgttctatgctgtgaaggtgctgcagaagaaggccatcctgaagaagaaggaggagaagcacatcatgtctgaaagaaatgtgctgctgaagaatgtgaagcaccccttcctggtgggcctgcacttctccttccagacagctgacaagctgtactttgtgctggactacatcaatggaggagagctgttctaccacctgcagcgggagcgctgcttcctggagccccgggcccgcttctatgctgctgagatcgccagcgccctgggctacctgcacagcctgaacatcgtgtacagagacctgaagccagagaacatcctgctggacagccagggccacatcgtgctgacagactttggcctgtgcaaggagaacatcgagcacaacagcaccaccagcaccttctgtggcaccccagagtacctggcccctgaggtgctgcacaagcagccctatgacagaacagtggactggtggtgcctgggcgctgtgctgtatgagatgctgtatggcctgccccccttctacagcaggaacacagctgagatgtatgacaacatcctgaacaagcccctgcagctgaagcccaacatcaccaacagcgcccggcacctgctggagggcctgctgcagaaggacaggaccaagaggctgggcgccaaggatgacttcatggagatcaagagccacgtgttcttcagcctcatcaactgggatgacctgatcaacaagaagatcaccccacccttcaaccccaacgtgtctggccccaatgacctgcggcactttgatcctgagttcacagaggagcctgtgcccaacagcatcggcaagagcccagacagcgtgctggtgacagcctctgtgaaggaggccgctgaggccttcctgggcttctcctatgccccacccacagacagcttcctgtag

SEQ ID NO: 169441 - DNA, 1581 bp, synthetic construct
  misc_feature 1..1581: note = Description of Artificial Sequence: Synthetic coding sequence
  source 1..1581: mol_type = other DNA
atggtgaacaaggacatgaatggcttccctgtgaagaagtgcagcgccttccagttcttcaagaagagggtgcggcgctggatcaagagccccatggtgtctgtggacaagcaccagagccccagcctgaagtacacaggcagctccatggtgcacatccccccaggagagccagactttgagagcagcctgtgccagacctgcctgggggagcacgccttccagaggggcgtgctgccccaggagaatgaaagctgctcctgggagacccagagcggctgtgaggtgcgggagccctgcaaccacgccaacatcctgaccaagccagaccccaggaccttctggaccaatgatgatcctgccttcatgaagcagaggaggatgggcctgaatgacttcatccagaagatcgccaacaacagctatgcctgcaagcaccctgaggtgcagagcatcctgaagatcagccagccccaggagcctgagctgatgaatgccaaccccagccccccacccagccccagccagcagatcaacctgggccccagcagcaacccccacgccaagcccagcgacttccacttcctgaaggtgattggcaagggcagctttgggaaggtgctgctggcccggcacaaggccgaggaggtgttctatgctgtgaaggtgctgcagaagaaggccatcctgaagaagaaggaggagaagcacatcatgtctgaaagaaatgtgctgctgaagaatgtgaagcaccccttcctggtgggcctgcacttctccttccagacagctgacaagctgtactttgtgctggactacatcaatggaggagagctgttctaccacctgcagcgggagcgctgcttcctggagccccgggcccgcttctacgccgctgagatcgccagcgccctgggctacctgcacagcctgaacatcgtgtacagagacctgaagccagagaacatcctgctggacagccagggccacatcgtgctgacagactttggcctgtgcaaggaaaatattgagcacaacagcaccaccagcaccttctgtggcaccccagagtacctggcccctgaggtgctgcacaagcagccctatgacagaacagtggactggtggtgcctgggcgctgtgctgtatgagatgctgtatggcctgccccccttctacagcaggaacacagctgagatgtatgacaacatcctgaacaagcccctgcagctgaagcccaacatcaccaacagcgcccggcacctgctggagggcctgctgcagaaggacaggaccaagaggctgggcgccaaggatgacttcatggagatcaagagccacgtgttcttcagcctcatcaactgggatgacctgatcaacaagaagatcaccccacccttcaaccccaacgtgtctggccccaatgacctgcggcactttgatcctgagttcacagaggagcctgtgcccaacagcatcggcaagagcccagattctgtgctggtgacagcctctgtgaaggaggccgctgaggccttcctgggcttctcctatgccccacccacagacagcttcctgtag

SEQ ID NO: 169442 - DNA, 1338 bp, synthetic construct
  misc_feature 1..1338: note = Description of Artificial Sequence: Synthetic coding sequence
  source 1..1338: mol_type = other DNA
atgggagagatgcagggcgccctggcccgggcccggctggagagcctgctgcggcccaggcacaagaagagagctgaggcccagaagaggtctgagagcttcctgctgagcggcctggccttcatgaagcagaggaggatgggcctgaatgacttcatccagaagatcgccaacaacagctatgcctgcaagcaccctgaggtgcagagcatcctgaagatcagccagccccaggagcctgagctgatgaatgccaaccccagccccccacccagccccagccagcagatcaacctgggccccagcagcaacccccacgccaagcccagcgacttccacttcctgaaggtgattggcaagggcagctttgggaaggtgctgctggcccggcacaaggccgaggaggtgttctatgctgtgaaggtgctgcagaagaaggccatcctgaagaagaaggaggagaagcacatcatgtctgaaagaaatgtgctgctgaagaatgtgaagcaccccttcctggtgggcctgcacttctccttccagacagctgacaagctgtactttgtgctggactacatcaatggaggagagctgttctaccacctgcagcgggagcgctgcttcctggagccccgggcccgcttctatgctgctgagatcgccagcgccctgggctacctgcacagcctgaacatcgtgtacagagacctgaagccagagaacatcctgctggacagccagggccacatcgtgctgacagactttggcctgtgcaaggagaacatcgagcacaacagcaccaccagcaccttctgtggcaccccagagtacctggcccctgaggtgctgcacaagcagccctatgacagaacagtggactggtggtgcctgggcgctgtgctgtatgagatgctgtatggcctgccccccttctacagcaggaacacagctgagatgtatgacaacatcctgaacaagcccctgcagctgaagcccaacatcaccaacagcgcccggcacctgctggagggcctgctgcagaaggacaggaccaagaggctgggcgccaaggatgacttcatggagatcaagagccacgtgttcttcagcctcatcaactgggatgacctgatcaacaagaagatcaccccacccttcaaccccaacgtgtctggccccaatgacctgcggcactttgatcctgagttcacagaggagcctgtgcccaacagcatcggcaagagcccagacagcgtgctggtgacagcctctgtgaaggaggccgctgaggccttcctgggcttctcctatgccccacccacagacagcttcctgtag

SEQ ID NO: 169443 - DNA, 435 bp, synthetic construct
  misc_feature 1..435: note = Description of Artificial Sequence: Synthetic coding sequence
  source 1..435: mol_type = other DNA
atggtgtctgtggacaagcaccagagccccagcctgaagtacacaggcagctccatggtgcacatccccccaggagagccagactttgagagcagcctgtgccagacctgcctgggggagcacgccttccagaggggcgtgctgccccaggagaatgaaagctgctcctgggagacccagagcggctgtgaggtgcgggagccctgcaaccacgccaacatcctgaccaagccagaccccaggaccttctggaccaatgatgatcctgccttcatgaagcagaggaggatgggcctgaatgacttcatccagaagatcgccaacaacagctatgcctgcaagcaccctgaggtgcagagcatcctgaagatcagccagccccaggagcctgagctgatgaatgccaaccccagccccccacccagccccagctag

SEQ ID NO: 169444 - DNA, 1380 bp, synthetic construct
  misc_feature 1..1380: note = Description of Artificial Sequence: Synthetic coding sequence
  source 1..1380: mol_type = other DNA
atgagcagccagagcagcagcctgtctgaggcctgcagccgggaggcctacagcagccacaactgggccctgcccccagccagccgcagcaacccccagcctgcctacccctgggccaccaggaggatgaaggaggaggccatcaagccacccctgaaggccttcatgaagcagaggaggatgggcctgaatgacttcatccagaagatcgccaacaacagctatgcctgcaagcaccctgaggtgcagagcatcctgaagatcagccagccccaggagcctgagctgatgaatgccaaccccagccccccacccagccccagccagcagatcaacctgggccccagcagcaacccccacgccaagcccagcgacttccacttcctgaaggtgattggcaagggcagctttgggaaggtgctgctggcccggcacaaggccgaggaggtgttctatgctgtgaaggtgctgcagaagaaggccatcctgaagaagaaggaggagaagcacatcatgtctgaaagaaatgtgctgctgaagaatgtgaagcaccccttcctggtgggcctgcacttctccttccagacagctgacaagctgtactttgtgctggactacatcaatggaggagagctgttctaccacctgcagcgggagcgctgcttcctggagccccgggcccgcttctatgctgctgagatcgccagcgccctgggctacctgcacagcctgaacatcgtgtacagagacctgaagccagagaacatcctgctggacagccagggccacatcgtgctgacagactttggcctgtgcaaggagaacatcgagcacaacagcaccaccagcaccttctgtggcaccccagagtacctggcccctgaggtgctgcacaagcagccctatgacagaacagtggactggtggtgcctgggcgctgtgctgtatgagatgctgtatggcctgccccccttctacagcaggaacacagctgagatgtatgacaacatcctgaacaagcccctgcagctgaagcccaacatcaccaacagcgcccggcacctgctggagggcctgctgcagaaggacaggaccaagaggctgggcgccaaggatgacttcatggagatcaagagccacgtgttcttcagcctcatcaactgggatgacctgatcaacaagaagatcaccccacccttcaaccccaacgtgtctggccccaatgacctgcggcactttgatcctgagttcacagaggagcctgtgcccaacagcatcggcaagagcccagacagcgtgctggtgacagcctctgtgaaggaggccgctgaggccttcctgggcttctcctatgccccacccacagacagcttcctgtag

SEQ ID NO: 169445 - DNA, 183 bp, synthetic construct
  misc_feature 1..183: note = Description of Artificial Sequence: Synthetic coding sequence
  source 1..183: mol_type = other DNA
atggtgaacaaggacatgaatggcttccctgtgaagaagtgcagcgccttccagttcttcaagaagagggtgcggcgctggatcaagagccccatggtgtctgtggacaagcaccagagccccagcctgaagtacacaggcagctccatggtgcacatccccccaggagagccagacttctag

SEQ ID NO: 169446 - DNA, 1284 bp, synthetic construct
  misc_feature 1..1284: note = Description of Artificial Sequence: Synthetic coding sequence
  source 1..1284: mol_type = other DNA
atgcagggcctgctgaccagcggcaggaagcccagcggcggcggccgctgcaccggccggggcggctggaggggccagtggtgcctgaagccctggatgggcggcgctgacccccccacccccaccctgagctgcctgctgctgcctgtgcccccagagctgcctgaccactgctacaggatgaacagcagccctgctggcacccccagcccccagcccagccgggccaatggaaacatcaacctgggccccagcgccaaccccaatgcccagcccacagactttgacttcctgaaggtgattggaaaaggaaactacggcaaggtgctgctggccaagaggaagagtgatggagccttctatgctgtgaaggtgctgcagaagaagagcatcctgaagaagaaggagcagagccacatcatggccgagaggtctgtgctgctgaagaatgtgcgccaccccttcctggtgggcctgcgctacagcttccagaccccagagaagctgtactttgtgctggactatgtgaatggaggagagctgttcttccacctgcagcgggagcggcgcttcctggagccccgggcccgcttctacgccgctgaggtggccagcgccatcggctacctgcacagcctgaacatcatctacagagacctgaagccagagaacatcctgctggactgccagggccacgtggtgctgacagactttggcctgtgcaaggagggcgtggagcctgaggacaccaccagcaccttctgtggcaccccagagtacctggcccctgaggtgctgaggaaggagccctatgacagagctgtggactggtggtgcctgggcgctgtgctgtatgagatgctgcacggcctgccccccttctacagccaggatgtgtcccagatgtatgagaacatcctgcaccagcccctgcagatccctgggggccgcacagtggccgcctgtgacctgctgcagagcctgctgcacaaggaccagaggcagaggctgggcagcaaggctgacttcctggagatcaagaaccacgtgttcttcagccccatcaactgggatgacctgtaccacaagaggctgaccccacccttcaaccccaacgtgacaggccctgctgacctgaagcactttgatcctgagttcacccaggaggccgtgtccaagagcatcggctgcaccccagacacagtggccagcagcagcggggccagcagcgccttcctgggcttctcctatgccccagaagatgatgacatcctggactgctag

SEQ ID NO: 169447 - DNA, 1101 bp, synthetic construct
  misc_feature 1..1101: note = Description of Artificial Sequence: Synthetic coding sequence
  source 1..1101: mol_type = other DNA
atgaacagcagccctgctggcacccccagcccccagcccagccgggccaatggaaacatcaacctgggccccagcgccaaccccaatgcccagcccacagactttgacttcctgaaggtgattggaaaaggaaactacggcaaggtgctgctggccaagaggaagagtgatggagccttctatgctgtgaaggtgctgcagaagaagagcatcctgaagaagaaggagagccacatcatggccgagaggtctgtgctgctgaagaatgtgcgccaccccttcctggtgggcctgcgctacagcttccagaccccagagaagctgtactttgtgctggactatgtgaatggaggagagctgttcttccacctgcagcgggagcggcgcttcctggagccccgggcccgcttctatgctgctgaggtggccagcgccatcggctacctgcacagcctgaacatcatctacagagacctgaagccagagaacatcctgctggactgccagggccacgtggtgctgacagactttggcctgtgcaaggagggcgtggagcctgaggacaccaccagcaccttctgtggcaccccagagtacctggcccctgaggtgctgaggaaggagccctatgacagagctgtggactggtggtgcctgggcgctgtgctgtatgagatgctgcacggcctgccccccttctacagccaggatgtgtcccagatgtatgagaacatcctgcaccagcccctgcagatccctgggggccgcacagtggccgcctgtgacctgctgcagagcctgctgcacaaggaccagaggcagaggctgggcagcaaggctgacttcctggagatcaagaaccacgtgttcttcagccccatcaactgggatgacctgtaccacaagaggctgaccccacccttcaaccccaacgtgactggacctgctgacctgaagcactttgatcctgagttcacccaggaggccgtgtccaagagcatcggctgcaccccagacacagtggccagcagcagcggggccagcagcgccttcctgggcttctcctatgccccagaagatgatgacatcctggactgctag

SEQ ID NO: 169448 - DNA, 1104 bp, synthetic construct
  misc_feature 1..1104: note = Description of Artificial Sequence: Synthetic coding sequence
  source 1..1104: mol_type = other DNA
atgaacagcagccctgctggcacccccagcccccagcccagccgggccaatggaaacatcaacctgggccccagcgccaaccccaatgcccagcccacagactttgacttcctgaaggtgattggaaaaggaaactacggcaaggtgctgctggccaagaggaagagtgatggagccttctatgctgtgaaggtgctgcagaagaagagcatcctgaagaagaaggagcagagccacatcatggccgagaggtctgtgctgctgaagaatgtgcgccaccccttcctggtgggcctgcgctacagcttccagaccccagagaagctgtactttgtgctggactatgtgaatggaggagagctgttcttccacctgcagcgggagcggcgcttcctggagccccgggcccgcttctacgccgctgaggtggccagcgccatcggctacctgcacagcctgaacatcatctacagagacctgaagccagagaacatcctgctggactgccagggccacgtggtgctgacagactttggcctgtgcaaggagggcgtggagcctgaggacaccaccagcaccttctgtggcaccccagagtacctggcccctgaggtgctgaggaaggagccctatgacagagctgtggactggtggtgcctgggcgctgtgctgtatgagatgctgcacggcctgccccccttctacagccaggatgtgtcccagatgtatgagaacatcctgcaccagcccctgcagatccctgggggccgcacagtggccgcctgtgacctgctgcagagcctgctgcacaaggaccagaggcagaggctgggcagcaaggctgacttcctggagatcaagaaccacgtgttcttcagccccatcaactgggatgacctgtaccacaagaggctgaccccacccttcaaccccaacgtgacaggccctgctgacctgaagcactttgatcctgagttcacccaggaggccgtgtccaagagcatcggctgcaccccagacacagtggccagcagcagcggggccagcagcgccttcctgggcttctcctatgccccagaagatgatgacatcctggactgctag

SEQ ID NO: 169449 - DNA, 1104 bp, synthetic construct; identical to SEQ ID NO: 169448
  misc_feature 1..1104: note = Description of Artificial Sequence: Synthetic coding sequence
  source 1..1104: mol_type = other DNA

SEQ ID NO: 169450 - DNA, 597 bp, synthetic construct
  misc_feature 1..597: note = Description of Artificial Sequence: Synthetic coding sequence
  source 1..597: mol_type = other DNA
atgaacagcagccctgctggcacccccagcccccagcccagccgggccaatggaaacatcaacctgggccccagcgccaaccccaatgcccagcccacagactttgacttcctgaaggtgattggaaaaggaaactacggcaaggtgctgctggccaagaggaagagtgatggagccttctatgctgtgaaggtgctgcagaagaagagcatcctgaagaagaaggagagccacatcatggccgagaggtctgtgctgctgaagaatgtgcgccaccccttcctggtgggcctgcgctacagcttccagaccccagagaagctgtactttgtgctggactatgtgaatggaggagagctgttcttccacctgcagcgggagcggcgcttcctggagccccgggcccgcttctatgctgctgaggtggccagcgccatcggctacctgcacagcctgaacatcatctacagagacctgaagccagagaacatcctgctggactgccagggccacgtggtgctgacagactttggcctgtgcaaggagggcgtggagcctgaggacaccaccagcaccttctgtggcaccccagagtag

SEQ ID NO: 169451 - DNA, 1104 bp, synthetic construct; identical to SEQ ID NO: 169448
  misc_feature 1..1104: note = Description of Artificial Sequence: Synthetic coding sequence
  source 1..1104: mol_type = other DNA

SEQ ID NO: 169452 - DNA, 1182 bp, synthetic construct
  misc_feature 1..1182: note = Description of Artificial Sequence: Synthetic coding sequence
  source 1..1182: mol_type = other DNA
atgcagggcctgctgaccagcggcaggaagcccagcggcggcggccgctgcacagagctgcctgaccactgctacaggatgaacagcagccctgctggcacccccagcccccagcccagccgggccaatggaaacatcaacctgggccccagcgccaaccccaatgcccagcccacagactttgacttcctgaaggtgattggaaaaggaaactacggcaaggtgctgctggccaagaggaagagtgatggagccttctatgctgtgaaggtgctgcagaagaagagcatcctgaagaagaaggagcagagccacatcatggccgagaggtctgtgctgctgaagaatgtgcgccaccccttcctggtgggcctgcgctacagcttccagaccccagagaagctgtactttgtgctggactatgtgaatggaggagagctgttcttccacctgcagcgggagcggcgcttcctggagccccgggcccgcttctacgccgctgaggtggccagcgccatcggctacctgcacagcctgaacatcatctacagagacctgaagccagagaacatcctgctggactgccagggccacgtggtgctgacagactttggcctgtgcaaggagggcgtggagcctgaggacaccaccagcaccttctgtggcaccccagagtacctggcccctgaggtgctgaggaaggagccctatgacagagctgtggactggtggtgcctgggcgctgtgctgtatgagatgctgcacggcctgccccccttctacagccaggatgtgtcccagatgtatgagaacatcctgcaccagcccctgcagatccctgggggccgcacagtggccgcctgtgacctgctgcagagcctgctgcacaaggaccagaggcagaggctgggcagcaaggctgacttcctggagatcaagaaccacgtgttcttcagccccatcaactgggatgacctgtaccacaagaggctgaccccacccttcaaccccaacgtgacaggccctgctgacctgaagcactttgatcctgagttcacccaggaggccgtgtccaagagcatcggctgcaccccagacacagtggccagcagcagcggggccagcagcgccttcctgggcttctcctatgccccagaagatgatgacatcctggactgctag

SEQ ID NO: 169453 - DNA, 1491 bp, synthetic construct
  misc_feature 1..1491: note = Description of Artificial Sequence: Synthetic coding sequence
  source 1..1491: mol_type = other DNA
atgcagagggaccacaccatggactacaaggagagctgccccagcgtgtccatccccagcagtgatgagcaccgggagaagaagaagcgcttcaccgtgtacaaggtgctggtgtctgtgggccgctctgagtggtttgtgttcagaagatatgcagagtttgacaagctgtacaacaccctgaagaagcagtttcctgccatggccctgaagatcccagccaagaggatctttggagacaactttgatcctgacttcatcaagcagaggcgggccggcctgaatgagttcatccagaacctggtgcgctacccagagctgtacaaccacccagatgtgcgggccttcctgcagatggacagccccaagcaccagagcgaccccagtgaagatgaagatgagaggagcagccagaagctgcacagcaccagccagaacatcaacctgggccccagcggcaacccccacgccaagcccacagactttgacttcctgaaggtgattggcaagggcagctttgggaaggtgctgctggccaagaggaagctggatggcaagttctatgctgtgaaggtgctgcagaagaagatcgtgctgaacaggaaggagcagaagcacatcatggccgagagaaatgtgctgctgaagaatgtgaagcaccccttcctggtgggcctgcactacagcttccagaccacagagaagctgtactttgtgctggactttgtgaatggaggagagctgttcttccacctgcagcgggagaggagcttccctgagcaccgggcccgcttctatgctgctgagatcgccagcgccctgggctacctgcacagcatcaagatcgtgtacagagacctgaagccagagaacatcctgctggacagcgtgggccacgtggtgctgacagactttggcctgtgcaaggagggcatcgccatcagtgacaccaccaccaccttctgtggcaccccagagtacctggcccctgaggtgatcaggaagcagccctatgacaacacagtggactggtggtgcctgggcgctgtgctgtatgagatgctgtatggcctgccccccttctactgcagagatgtggccgagatgtatgacaacatcctgcacaagcccctgagcctgcggcctggggtgtccctgacagcctggagcatcctggaggagctgctggagaaggaccggcagaaccggctgggcgccaaggaggacttcctggagatccagaaccaccccttctttgagagcctgtcctgggccgacctggtgcagaagaagatccccccacccttcaaccccaacgtggccggcccagatgacatccggaactttgacacagccttcacagaggagaccgtgccctacagcgtgtgtgtgtccagtgactacagcatcgtgaatgcctctgtgctggaggctgatgatgcctttgtgggcttctcctatgcccctccttctgaggacctcttcctgtag

SEQ ID NO: 169454 - DNA, 1491 bp, synthetic construct; identical to SEQ ID NO: 169453
  misc_feature 1..1491: note = Description of Artificial Sequence: Synthetic coding sequence
  source 1..1491: mol_type = other DNA

SEQ ID NO: 169455 - DNA, 1491 bp, synthetic construct; identical to SEQ ID NO: 169453
  misc_feature 1..1491: note = Description of Artificial Sequence: Synthetic coding sequence
  source 1..1491: mol_type = other DNA

SEQ ID NO: 169456 - DNA, 1491 bp, synthetic construct; identical to SEQ ID NO: 169453
  misc_feature 1..1491: note = Description of Artificial Sequence: Synthetic coding sequence
  source 1..1491: mol_type = other DNA

SEQ ID NO: 169457 - DNA, 1395 bp, synthetic construct
  misc_feature 1..1395: note = Description of Artificial Sequence: Synthetic coding sequence
  source 1..1395: mol_type = other DNA
atgcagagggaccacaccatggactacaaggagagctgccccagcgtgtccatccccagcagtgatgagcaccgggagaagaagaagcgcttcaccgtgtacaaggtgctggtgtctgtgggccgctctgagtggtttgtgttcagaagatatgcagagtttgacaagctgtacaacaccctgaagaagcagtttcctgccatggccctgaagatcccagccaagaggatctttggagacaactttgatcctgacttcatcaagcagaggcgggccggcctgaatgagttcatccagaacctggtgcgctacccagagctgtacaaccacccagatgtgcgggccttcctgcagatggacagccccaagcaccagagcgaccccagtgaagatgaagatgagaggagcagccagaagctgcacagcaccagccagaacatcaacctgggccccagcggcaacccccacgccaagcccacagactttgacttcctgaaggtgattggcaagggcagctttgggaaggtgctgctggccaagaggaagctggatggcaagttctatgctgtgaaggtgctgcagaagaagatcgtgctgaacaggaaggagcagaagcacatcatggccgagagaaatgtgctgctgaagaatgtgaagcaccccttcctggtgggcctgcactacagcttccagaccacagagaagctgtactttgtgctggactttgtgaatggaggagagctgttcttccacctgcagcgggagaggagcttccctgagcaccgggcccgcttctatgctgctgagatcgccagcgccctgggctacctgcacagcatcaagatcgtgtacagagacctgaagccagagaacatcctgctggacagcgtgggccacgtggtgctgacagactttggcctgtgcaaggagggcatcgccatcagtgacaccaccaccaccttctgtggcaccccagagccccccttctactgcagagatgtggccgagatgtatgacaacatcctgcacaagcccctgagcctgcggcctggggtgtccctgacagcctggagcatcctggaggagctgctggagaaggaccggcagaaccggctgggcgccaaggaggacttcctggagatccagaaccaccccttctttgagagcctgtcctgggccgacctggtgcagaagaagatccccccacccttcaaccccaacgtggccggcccagatgacatccggaactttgacacagccttcacagaggagaccgtgccctacagcgtgtgtgtgtccagtgactacagcatcgtgaatgcctctgtgctggaggctgatgatgcctttgtgggcttctcctatgcccctccttctgaggacctcttcctgtag

SEQ ID NO: 169458 - DNA, 1491 bp, synthetic construct; identical to SEQ ID NO: 169453
  misc_feature 1..1491: note = Description of Artificial Sequence: Synthetic coding sequence
  source 1..1491: mol_type = other DNA

SEQ ID NO: 169459 - DNA, 1491 bp, synthetic construct; identical to SEQ ID NO: 169453
  misc_feature 1..1491: note = Description of Artificial Sequence: Synthetic coding sequence
  source 1..1491: mol_type = other DNA

SEQ ID NO: 169460 - DNA, 1725 bp, synthetic construct; identical to SEQ ID NO: 146984
  misc_feature 1..1725: note = Description of Artificial Sequence: Synthetic coding sequence
  source 1..1725: mol_type = other DNA

SEQ ID NO: 169461 - DNA, 1611 bp, synthetic construct
  misc_feature 1..1611: note = Description of Artificial Sequence: Synthetic coding sequence
  source 1..1611: mol_type = other DNA
atggtgctggacctggacctcttccgggtggacaagggcggggaccctgccctgatccgggagacccaggagaagcgcttcaaggaccccggcctggtggaccagctggtgaaggctgacagcgagtggaggcgctgccgcttccgggctgacaacctgaacaagctgaagaacctgtgcagcaagaccatcggggagaagatgaagaagaaggagcctgtgggagatgatgaatctgtgcctgaaaatgtgctgagctttgatgacctgacagcagatgccctggccaacctgaaggtgtcccagatcaagaaggtgcggctgctgattgatgaggccatcctgaagtgtgatgctgagcgcatcaagctggaggccgagagatttgagaacctgcgggagatcggcaacctgctgcaccccagcgtgcccatcagcaatgatgaagatgtggacaacaaggtggagcgcatctggggagactgcaccgtgaggaagaagtacagccacgtggacctggtggtgatggtggatggctttgaaggagagaagggagctgtggtggccggcagccggggctacttcctgaagggcgtgctggtgttcctggagcaggccctgatccagtatgccctgcggaccctgggcagccggggctacatccccatctacacccccttcttcatgaggaaggaggtgatgcaggaggtggcccagctgagccagtttgatgaggagctgtacaaggtgattggaaaaggaagtgagaagagtgatgacaacagctatgatgagaagtacctgattgccaccagcgagcagcccatcgccgccctgcacagagatgagtggctgcggcctgaggacctgcccatcaagtatgccggcctgagcacctgcttccggcaggaggtgggcagccacggccgggacacccggggcatcttccgggtgcaccagtttgagaagattgagcagtttgtgtacagcagcccccatgacaacaagtcctgggagatgtttgaggagatgatcaccacagctgaggagttctaccagagcctgggcatcccctaccacatcgtgaacatcgtgtctggcagcctgaaccacgccgccagcaagaagctggacctggaggcctggttccctggcagcggggccttccgggagctggtgtcctgcagcaactgcacagactaccaggcccggcggctgcgcatccgctatggccagaccaagaagatgatggacaagaggaagaacaacctgcacctgagcacccagaacaagctggaggccagcctcttcagccccaagaaggtggagtttgtgcacatgctgaatgccaccatgtgtgccaccaccaggaccatctgtgccatcctggagaactaccagacagagaagggcatcaccgtgcctgagaagctgaaggagttcatgcctcctggcctgcaggagctgatcccctttgtgaagccagcccccatcgagcaggagcccagcaagaagcagaagaagcagcacgagggcagcaagaagaaggccgccgccagagatgtgaccctggagaaccggctgcagaacatggaggtgacagatgcctag

SEQ ID NO: 169462 - DNA, 1563 bp, synthetic construct
  misc_feature 1..1563: note = Description of Artificial Sequence: Synthetic coding sequence
  source 1..1563: mol_type = other DNA
atggccgcctccatggcccggcggctgtggcccctgctgacccggcggggcttccggccccggggcggctgcatcagcaatgacagccccaggaggagcttcaccacagagaagaggaacagaaacctgctgtatgaatatgcccgggagggctacagcgccctgccccagctggacatcgagcgcttctgtgcctgcccagaggaggccgcccacgccctggagctgaggaagggggagctgcggtctgctgacctgcctgccatcatcagcacctggcaggagctgcggcagctgcaggagcagatccgcagcctggaggaggagaaggctgctgtgacagaggccgtgcgggccctgctggccaaccaggacagcggggaggtgcagcaggtgcggctggaccccggggccggcagcatcttcggccccaccttcctgcccttccctggccagctgagcctgctggtggaggcccagctggaggagcagttctacctgcaggccctgaagctgcccaaccagacccacccagatgtgcctgtgggagatgagagccaggcccgggtgctgcacatggtgggggacaagcctgtgttctccttccagccccggggccacctggagatcggggagaagctggacatcatccggcagaagaggctgagccacgtgtctggccacaggagctactacctgcggggggccggggccctgctgcagcacggcctggtgaacttcaccttcaacaagctgctgcggcggggcttcacccccatgacagtgcctgacctgctgcggggagctgtgtttgagggctgcggcatgaccccaaatgccaaccccagccagatctacaacatcgaccctgcccgcttcaaggacctgaacctggccggcacagctgaggtgggcctggccggctacttcatggaccacacagtggccttccgggacctgcctgtgaggatggtgtgcagcagcacctgctacagagctgagaccaacacaggccaggagccccggggcctgtacagagtgcaccacttcaccaaggtggagatgtttggagtgactggacctggcctggagcagagcagccagctgctggaggagttcctgagcctgcagatggagatcctgacagagctgggcctgcacttccgggtgctggacatgcccacccaggagctgggcctgcctgcctacaggaagtttgacatcgaggcctggatgcctggccggggccgctttggagaggtgaccagcgccagcaactgcacagacttccagagccggcggctgcacatcatgttccagacagaagctggggagctgcagtttgcccacacagtgaatgccacagcctgtgctgtgccccggctgctgattgccctgctggagagcaaccagcagaaggatggctctgtgctggtgcccccagccctgcagagctacctgggcacagaccgcatcacagcccccacccacgtgcccctgcagtacatcggccccaaccagcccaggaagccaggcctgcccggccagcctgctgtgtcctag

SEQ ID NO: 169463 - DNA, 426 bp, synthetic construct
  misc_feature 1..426: note = Description of Artificial Sequence: Synthetic coding sequence
  source 1..426: mol_type = other DNA
atggagatgctgcagggcctgctgctgctgctgctgctgtccatgggcggggcctgggccagccgggagcccctgcggccctggtgccaccccatcaatgccatcctggccgtggagaaggagggctgccctgtgtgcatcaccgtgaacaccaccatctgtgccggctactgccccaccatgatgagggtgctgcaggccgtgctgccccccctgccccaggtggtgtgcacctacagagatgtgcgctttgagagcatccggctgcccggctgcccccggggcgtggaccctgtggtgtccttccctgtggccctgagctgccgctgtggcccctgccgccgcagcaccagtgactgtggcggccccaaggaccaccccctgacctgtgaccacccccagctgagcggcctgctcttcctgtag

SEQ ID NO: 169464 - DNA, 837 bp, synthetic construct
  misc_feature 1..837: note = Description of Artificial Sequence: Synthetic coding sequence
  source 1..837: mol_type = other DNA
atgggcgcccggctgagcagaagaaggctgcctgctgaccccagcctggccctggatgccctgcccccagagctgctggtgcaggtgctgagccacgtgccccccaggagcctggtgacccgctgcaggcctgtgtgccgggcctggagggacatcgtggatggccccaccgtgtggctgctgcagctggcccgggacagatctgctgagggccgggccctgtatgctgtggcccagcgctgcctgcccagcaatgaagacaaggaggagttccccctgtgtgccctggcccgctactgcctgcgggccccctttggaagaaacctgatcttcaacagctgtggggagcagggcttccggggctgggaggtggagcacggcggcaatggctgggccatcgagaagaacctgacccctgtgcctggggcccccagccagacctgctttgtgaccagctttgagtggtgcagcaagaggcagctggtggacctggtgatggagggcgtgtggcaggagctgctggacagcgcccagatcgagatctgtgtggccgactggtggggcgcccgggagaactgtggctgtgtgtaccagctgcgggtgcggctgctggatgtgtatgagaaggaggtggtgaagttcagcgccagcccagaccctgtgctgcagtggacagagcggggctgccggcaggtgagccacgtgttcaccaactttgggaagggcatccgctacgtgtcctttgagcagtatggaagagatgtgtcctcctgggtgggccactacggggccctggtgacccacagctctgtgcgggtgcgcatccggctgtcctag

SEQ ID NO: 169465 - DNA, 864 bp, synthetic construct
  misc_feature 1..864: note = Description of Artificial Sequence: Synthetic coding sequence
  source 1..864: mol_type = other DNA
ttcaagcagggcctgtggctgctggagatgggcgcccggctgagcagaagaaggctgcctgctgaccccagcctggccctggatgccctgcccccagagctgctggtgcaggtgctgagccacgtgcccccaagaagcctggtgacccgctgcaggcctgtgtgccgggcctggagggacatcgtggatggccccaccgtgtggctgctgcagctggcccgggacagatctgctgagggccgggccctgtatgctgtggcccagcgctgcctgcccagcaatgaagacaaggaggagttccccctgtgtgccctggcccgctactgcctgcgggcccccttcggcaggaacctgatcttcaacagctgtggggagcagggcttccggggctgggaggtggagcacggcggcaatggctgggccatcgagaagaacctgacccctgtgcctggggcccccagccagacctgctttgtgaccagctttgagtggtgcagcaagaggcagctggtggacctggtgatggagggcgtgtggcaggagctgctggacagcgcccagatcgagatctgtgtggccgactggtggggcgcccgggagaactgtggctgtgtgtaccagctgcgggtgcggctgctggatgtgtatgagaaggaggtggtgaagttcagcgccagcccagaccctgtgctgcagtggacagagcggggctgccggcaggtgagccacgtgttcaccaactttgggaagggcatccgctacgtgtcctttgagcagtatggaagagatgtgtcctcctgggtgggccactatggagccctggtgacccacagctctgtgcgggtgcgcatccggctgtcctag

SEQ ID NO: 169466 - DNA, 1563 bp, synthetic construct; identical to SEQ ID NO: 169462
  misc_feature 1..1563: note = Description of Artificial Sequence: Synthetic coding sequence
  source 1..1563: mol_type = other DNA

SEQ ID NO: 169467 - DNA, 1557 bp, synthetic construct
  misc_feature 1..1557: note = Description of Artificial Sequence: Synthetic coding sequence
  source 1..1557: mol_type = other DNA
atggagggcgtgtggcaggagctgctggacagcgcccagatcgagatctgtgtggccgactggtggggcgcccgggagaactgtggctgtgtgtaccagctgcgggtgcggctgctggatgtgtatgagaaggaggtggtgaagttcagcgccagcccagaccctgtgctgcagtggacagagcggggctgccggcaggtgagccacgtgttcaccaactttgggaagggcatccgctacgtgtcctttgagcagtatggccgggacatcagcacctggcaggagctgcggcagctgcaggagcagatccgcagcctggaggaggagaaggctgctgtgacagaggccgtgcgggccctgctggccaaccaggacagcggggaggtgcagcaggaccccaagtaccagggcctgcgggcccggggccgggagatcaggaaggagctggtgcacctgtacccccgggaggcccagctggaggagcagttctacctgcaggccctgaagctgcccaaccagacccacccagatgtgcctgtgggagatgagagccaggcccgggtgctgcacatggtgggggacaagcctgtgttctccttccagccccggggccacctggagatcggggagaagctggacatcatccggcagaagaggctgagccacgtgtctggccacaggagctactacctgcggggggccggggccctgctgcagcacggcctggtgaacttcaccttcaacaagctgctgcggcggggcttcacccccatgacagtgcctgacctgctgcggggagctgtgtttgagggctgcggcatgaccccaaatgccaaccccagccagatctacaacatcgaccctgcccgcttcaaggacctgaacctggccggcacagctgaggtgggcctggccggctacttcatggaccacacagtggccttccgggacctgcctgtgaggatggtgtgcagcagcacctgctacagagctgagaccaacacaggccaggagccccggggcctgtacagagtgcaccacttcaccaaggtggagatgtttggagtgactggacctggcctggagcagagcagccagctgctggaggagttcctgagcctgcagatggagatcctgacagagctgggcctgcacttccgggtgctggacatgcccacccaggagctgggcctgcctgcctacaggaagtttgacatcgaggcctggatgcctggccggggccgctttggagaggtgaccagcgccagcaactgcacagacttccagagccggcggctgcacatcatgttccagacagaagctggggagctgcagtttgcccacacagtgaatgccacagcctgtgctgtgccccggctgctgattgccctgctggagagcaaccagcagaaggatggctctgtgctggtgcccccagccctgcagagctacctgggcacagaccgcatcacagcccccacccacgtgcccctgcagtacatcggccccaaccagcccaggaagccaggcctgcccggccagcctgctgtgtcctag

SEQ ID NO: 169468 - DNA, 711 bp, synthetic construct
  misc_feature 1..711: note = Description of Artificial Sequence: Synthetic coding sequence
  source 1..711: mol_type = other DNA
atggccgcctccatggcccggcggctgtggcccctgctgacccggcggggcttccggccccggggcggctgcatcagcaatgacagccccaggaggagcttcaccacagagaagaggaacagaaacctgctgtatgaatatgcccgggagggctacagcgccctgccccagctggacatcgagcgcttctgtgcctgcccagaggaggccgcccacgccctggagctgaggaagggggagctgcggtctgctgacctgcctgccatcatcagcacctggcaggagctgcggcagctgcaggagcagatccgcagcctggaggaggagaaggctgctgtgacagaggccgtgcgggccctgctggccaaccaggacagcggggaggtgcagcaggaccccaagtaccagggcctgcgggcccggggccgggagatcaggaaggagctggtgcacctgtacccccgggaggcccagctggaggagcagttctacctgcaggccctgaagctgcccaaccagacccacccagatgtgcctgtgggagatgagagccaggcccgggtgctgcacatggtgggggacaagccaggggcctgccccacctgcctggccaccggccccatcacctgtgccggcctggagcccagctgcagcacagcctggagcaccagccacagcaccagcttctctgctggggccagccccccatag

SEQ ID NO: 169469 - DNA, 1281 bp, synthetic construct
  misc_feature 1..1281: note = Description of Artificial Sequence: Synthetic coding sequence
  source 1..1281: mol_type = other DNA
atgcacgccctgtttgctgacagctttgctgccctgggccgcctggacaacatcaccctggtgatggtgttccacccccagtacctggagagcttcctgaagacccagcactacctgctgcagatggatggccccctgcccctgcactaccgccactacatcggcatcatggctgctgcccggcaccagtgcagctacctggtgaacctgcacgtgaatgacttcctgcacgtgggcggggaccccaagtggctgaatggcctggagaatgccccccagaagctgcagaacctgggggagctgaacaaggtgctggcccaccggccctggctgatcaccaaggagcacatcgagggcctgctgaaggccgaggagcacagctggagcctggccgagctggtgcatgctgtggtgctgctgacccactaccacagcctggccagcttcaccttcggctgcggcatcagccctgagatccactgtgatggcggccacaccttccggcccccatctgtgagcaactactgcatctgtgacatcaccaacggcaaccacagcgtggatgagatgcctgtgaacagcgcagaaaatgtgtctgtgtctgacagcttctttgaggtggaggccctgatggagaagatgaggcagctgcaggagtgcagagatgaggaggaggccagccaggaggagatggccagcagatttgaaattgagaagcgggagagcatgtttgtgttcagcagtgatgatgaggaggtgaccccagcccgggctgtgagccgccactttgaggacaccagctatggctacaaggacttcagccgccacggcatgcacgtgcccaccttccgggtgcaggactactgctgggaggaccacggctacagcctggtgaacagactctacccagatgtgggccagctgattgatgagaagttccacatcgcctacaacctgacctacaacaccatggccatgcacaaggatgtggacacctccatgctgcggcgggccatctggaactacatccactgcatgtttggcatccgctatgatgattatgactatggagagatcaaccagctgctggacaggagcttcaaggtgtacatcaagacagtggtgtgcaccccagagaaggtgaccaagaggatgtatgacagcttctggaggcagttcaagcacagcgagaaggtgcacgtgaacctgctgctgattgaggccaggatgcaggccgagctgctgtatgccctgcgggccatcacccgctacatgacctag

SEQ ID NO: 169470 - DNA, 1479 bp, synthetic construct
  misc_feature 1..1479: note = Description of Artificial Sequence: Synthetic coding sequence
  source 1..1479: mol_type = other DNA
atgaggctggccgccgccgccaatgaggcctacacagcccccctggccgtgtctggcctgctgggctgcaagcagtgtggcggcggccgggaccaggatgaggagctgggcatccgcatcccccggcccctgggccagggccccagccgcttcatccctgagaaggagatcctgcaggtgggctctgaagatgcccagatgcacgccctgtttgctgacagctttgctgccctgggccgcctggacaacatcaccctggtgatggtgttccacccccagtacctggagagcttcctgaagacccagcactacctgctgcagatggatggccccctgcccctgcactaccgccactacatcggcatcatggctgctgcccggcaccagtgcagctacctggtgaacctgcacgtgaatgacttcctgcacgtgggcggggaccccaagtggctgaatggcctggagaatgccccccagaagctgcagaacctgggggagctgaacaaggtgctggcccaccggccctggctgatcaccaaggagcacatcgagggcctgctgaaggccgaggagcacagctggagcctggccgagctggtgcatgctgtggtgctgctgacccactaccacagcctggccagcttcaccttcggctgcggcatcagccctgagatccactgtgatggcggccacaccttccggcccccatctgtgagcaactactgcatctgtgacatcaccaacggcaaccacagcgtggatgagatgcctgtgaacagcgcagaaaatgtgtctgtgtctgacagcttctttgaggtggaggccctgatggagaagatgaggcagctgcaggagtgcagagatgaggaggaggccagccaggaggagatggccagcagatttgaaattgagaagcgggagagcatgtttgtgttcagcagtgatgatgaggaggtgaccccagcccgggctgtgagccgccactttgaggacaccagctatggctacaaggacttcagccgccacggcatgcacgtgcccaccttccgggtgcaggactactgctgggaggaccacggctacagcctggtgaacagactctacccagatgtgggccagctgattgatgagaagttccacatcgcctacaacctgacctacaacaccatggccatgcacaaggatgtggacacctccatgctgcggcgggccatctggaactacatccactgcatgtttggcatccgctatgatgattatgactatggagagatcaaccagctgctggacaggagcttcaaggtgtacatcaagacagtggtgtgcaccccagagaaggtgaccaagaggatgtatgacagcttctggaggcagttcaagcacagcgagaaggtgcacgtgaacctgctgctgattgaggccaggatgcaggccgagctgctgtatgccctgcgggccatcacccgctacatgacctag

SEQ ID NO: 169471 - DNA, 1656 bp, synthetic construct
  misc_feature 1..1656: note = Description of Artificial Sequence: Synthetic coding sequence
  source 1..1656: mol_type = other DNA
atggccgagggagaaaatgaggtgcgctgggatggcctgtgcagccgggacagcaccacccgggagacagccctggagaacatccggcagaccatcctgaggaagacagagtacctgcggtctgtgaaggagaccccccaccggcccagtgatggcctgagcaacacagagagcagtgatggcctgaacaagctgctggcccacctgctgatgctgagcaagcgctgccccttcaaggatgtgcgggagaagtctgagttcatcctgaagagcatccaggagctgggcatccgcatcccccggcccctgggccagggccccagccgcttcatccctgagaaggagatcctgcaggtgggctctgaagatgcccagatgcacgccctgtttgctgacagctttgctgccctgggccgcctggacaacatcaccctggtgatggtgttccacccccagtacctggagagcttcctgaagacccagcactacctgctgcagatggatggccccctgcccctgcactaccgccactacatcggcatcatggccgccgcccggcaccagtgcagctacctggtgaacctgcacgtgaatgacttcctgcacgtgggcggggaccccaagtggctgaatggcctggagaatgccccccagaagctgcagaacctgggggagctgaacaaggtgctggcccaccggccctggctgatcaccaaggagcacatcgagggcctgctgaaggccgaggagcacagctggagcctggccgagctggtgcatgctgtggtgctgctgacccactaccacagcctggccagcttcaccttcggctgcggcatcagccctgagatccactgtgatggcggccacaccttccggccccccagcgtgagcaactactgcatctgtgacatcaccaatggaaaccacagcgtggatgagatgcctgtgaacagcgcagaaaatgtgtctgtgtctgacagcttctttgaggtggaggccctgatggagaagatgaggcagctgcaggagtgcagagatgaggaggaggccagccaggaggagatggccagcagatttgaaattgagaagcgggagagcatgtttgtgttcagcagtgatgatgaggaggtgaccccagcccgggctgtgagccgccactttgaggacaccagctatggctacaaggacttcagcagacatggcatgcacgtgcccaccttccgggtgcaggactactgctgggaggaccacggctacagcctggtgaaccggctgtacccagatgtgggccagctgattgatgagaagttccacatcgcctacaacctgacctacaacaccatggccatgcacaaggatgtggacacctccatgctgcggcgggccatctggaactacatccactgcatgtttggcatccgctatgatgattatgactatggagagatcaaccagctgctggaccgctccttcaaggtgtacatcaagacagtggtgtgcaccccagagaaggtgaccaagaggatgtatgacagcttctggaggcagttcaagcacagcgagaaggtgcacgtgaacctgctgctgattgaggccaggatgcaggccgagctgctgtatgccctgcgggccatcacccgctacatgacctag

SEQ ID NO: 169472 - DNA, 1302 bp, synthetic construct
  misc_feature 1..1302: note = Description of Artificial Sequence: Synthetic coding sequence
  source 1..1302: mol_type = other DNA
atgagagctgagggcctgggcggcctggagcgcttctgcagccctgggaagggccggggcctgcgggccctgcagcccttccaggtgggggacctgctcttcagctgcccagcctatgcctacgtgctgactgtgaatgaaagaggcaaccactgtgagtactgcttcaccaggaaggagggcctgagcaaatgtggccgctgcaagcaggccttctactgcaatgtggagtgccagaaggaggactggcccatgcacaagctggagtgcagccccatggtggtgtttggagagaactggaaccccagcgagaccgtgcggctgacagcccgcatcctggccaagcagaagatccaccctgagaggaccccatctgagaagctgctggccgtgaaggagtttgagagccacctggacaagctggacaatgagaagaaggacctgatccagagcgacattgctgccctgcaccacttctacagcaagcacctgggcttcccagacaatgacagcctggtggtgctgtttgcccaggtgaactgcaatggcttcaccattgaagatgaggagctgagccacctgggcagcgccatcttcccagatgtggccctgatgaaccacagctgctgccccaacgtcatcgtgacctacaagggcaccctggccgaggtgcgggctgtgcaggagatcaagccaggagaggaggtgttcaccagctacatcgacctgctgtaccccacagaggacagaaatgaccggctgcgggacagctacttcttcacctgtgagtgccaggagtgcaccaccaaggacaaggacaaggccaaggtggagatcaggaagctgagtgacccccccaaggccgaggccatccgggacatggtgcgctatgccagaaatgtcatcgaggagttccggcgggccaagcactacaagagccccagcgagctgctggagatctgtgagctgagccaggagaagatgagctctgtgtttgaggacagcaatgtgtacatgctgcacatgatgtaccaggccatgggcgtgtgcctgtacatgcaggactgggagggcgccctgcagtatggccagaagatcatcaagccctacagcaagcactaccccctgtacagcctgaatgtggcctccatgtggctgaagctgggccgcctgtacatgggcctggagcacaaggccgccggggagaaggccctgaagaaggccatcgccatcatggaggtggcccacggcaaggaccacccctacatcagcgagatcaagcaggagattgagagccactag

SEQ ID NO: 169473 - DNA, 819 bp, synthetic construct
  misc_feature 1..819: note = Description of Artificial Sequence: Synthetic coding sequence
  source 1..819: mol_type = other DNA
atgagagctgagggcctgggcggcctggagcgcttctgcagccctgggaagggccggggcctgcgggccctgcagcccttccaggtgggggacctgctcttcagctgcccagcctatgcctacgtgctgactgtgaatgaaagaggcaaccactgtgagtactgcttcaccaggaaggagggcctgagcaaatgtggccgctgcaagcaggccttctactgcaatgtggagtgccagaaggaggactggcccatgcacaagctggagtgcagccccatggtggtgtttggagagaactggaaccccagcgagaccgtgcggctgacagcccgcatcctggccaagcagaagatccaccctgagaggaccccatctgagaagctgctggccgtgaaggagtttgagagccacctggacaagctggacaatgagaagaaggacctgatccagagcgacattgctgccctgcaccacttctacagcaagcacctgggcttcccagacaatgacagcctggtggtgctgtttgcccaggtgaactgcaatggcttcaccattgaagatgaggagctgagccacctgggcagcgccatcttcccagatgtggccctgatgaaccacagctgctgccccaacgtcatcgtgacctacaagggcaccctggccgaggtgcgggctgtgcaggagatcaagccaggagaggaggtgttcaccagctacatcgacctgctgtaccccacagaggacagaaatgaccggctgcgggacagctacttcttcacctgtgagtgccaggagtgcaccaccaaggacaagtag

SEQ ID NO: 169474 - DNA, 5712 bp, synthetic construct
  misc_feature 1..5712: note = Description of Artificial Sequence: Synthetic coding sequence
  source 1..5712: mol_type = other DNA
atggctgctggcacctgggccgctgctgctgctgctgctgctgctgactactttgtgctggtggccttcggcccccacccccggggcagcggggagggccagggccagatcctgcagcgcttccctgagaaggactgggaggacaaccccttcccccagggcatcgagctgttctgccagcccagcggctggcagctgtgcccagagaggaacccccccaccttctttgtggccgtgctgacagacatcaacagcgagcggcactactgtgcctgcctgaccttctgggagcctgctgagcccagccaggagaccaccagggtggaggatgccacagagcgggaggaggagggagatgaaggaggccagacccacctgagccccacagccccagcccccagcgcccagctgtttgcccccaagaccctggtgctggtgtcccggctggaccacacagaggtgttcaggaacagcctgggcctcatctatgccatccacgtggagggcctgaatgtgtgcctggagaatgtcatcggcaacctgctgacctgcaccgtgcccctggccggcggcagccagaggaccatcagcctgggcgctggggaccggcaggtgatccagacccccctggccgacagcctgcctgtgagccgctgcagcgtggccctgctcttccggcagctgggcatcaccaacgtgctgagcctcttctgtgccgccctgacagagcacaaggtgctcttcctgagccgcagctaccagaggctggctgatgcctgccggggcctgctggccctgctcttccccctgcgctacagcttcacctacgtgcccatcctgcctgcccagctgctggaggtgctgagcacccccacccccttcatcatcggcgtgaatgctgccttccaggccgagacccaggagctgctggatgtgattgtggccgacctggatggcggcaccgtgaccatcccagaatgtgtgcacatcccccccctgcctgagcccctgcagagccagacccacagcgtgctgtccatggtgctggaccctgagctggagctggccgacctggccttccccccacccaccaccagcaccagcagcctgaagatgcaggacaaggagctgcgggctgtgttcctgcggctgtttgcccagctgctgcagggctaccgctggtgcctgcacgtggtgcgcatccaccctgagcctgtgatccgcttccacaaggccgccttcctgggccagaggggcctggtggaggatgacttcctgatgaaggtgctggagggcatggcctttgctggctttgtgtctgagcggggcgtgccctaccggcccacagacctgtttgatgagctggtggcccacgaggtggccaggatgagagcagatgagaaccacccccagagggtgctgcggcacgtgcaggagctggccgagcagctgtacaagaatgaaaacccctacccagctgtggccatgcacaaggtgcagaggcctggagagagcagccacctgcggcgggtgccccggcccttcccccggctggatgagggcaccgtgcagtggatcgtggaccaggccgccgccaagatgcagggcgcccccccagctgtgaaggccgagaggaggaccaccgtgcccagcggcccccccatgacagccatcctggagcgctgcagcggcctgcacgtgaacagcgcccggcggctggaggtggtgaggaactgcatctcctatgtgtttgagggcaagatgctggaggccaagaagctgctgcctgctgtgctgcgggccctgaagggccgggccgcccggcgctgcctggcccaggagctgcacctgcacgtgcagcagaacagagctgtgctggaccaccagcagtttgattttgtggtgaggatgatgaactgctgcctgcaggactgcaccagcctggatgaacatggaattgctgctgccctgctgcccctggtgacagccttctgcaggaagctgagccctggggtgacccagtttgcctacagctgtgtgcaggagcacgtggtgtggagcaccccccagttctgggaggccatgttttatggagatgtgcagacccacatccgggccctgtacctggagcccacagaggacctggccccagcccaggaggtgggggaggcccccagccaggaggatgagaggtctgccctggatgtggccagcgagcagaggcggctgtggcccaccctgagccgggagaagcagcaggagctggtgcagaaggaggagagcaccgtcttcagccaggccatccactacgccaacaggatgagctacctgctgctgcccctggacagcagcaagagccggctgctgcgggagagagctggcctgggggacctggagagcgccagcaacagcctggtgaccaacagcatggccggctctgtggccgagagctatgacacagagagcggctttgaagatgctgagacctgtgatgtggccggggctgtggtgcgcttcatcaacagatttgtggacaaggtgtgcacagaaagtggagtgaccagtgaccacctgaagggcctgcacgtgatggtgcctgacatcgtgcagatgcacatcgagaccctggaggccgtgcagcgggagagccggcggctgccccccatccagaagcccaagctgctgcggccccggctgctgcctggagaggagtgtgtgctggatggcctgcgggtgtacctgctgcctgatggccgggaggagggcgccggcggcagcgctgggggccctgccctgctgcctgctgagggcgctgtgttcctgaccacctacagagtcatcttcaccggcatgcccacagaccccctggtgggggagcaggtggtggtgcgctccttccctgtggccgccctgaccaaggagaagaggatctctgtgcagacccctgtggaccagctgctgcaggacggcctgcagctgcggagctgcaccttccagctgctgaagatggcctttgatgaggaggtgggcagtgacagcgctgagctgttcaggaagcagctgcacaagctgcgctaccccccagacatccgggccacctttgccttcaccctgggcagcgcccacaccccaggccggcccccccgggtgaccaaggacaagggccccagcctgcggaccctgagcaggaacctggtgaagaatgccaagaagaccatcggccggcagcacgtgaccaggaagaagtacaaccccccatcctgggagcaccggggccagcccccacctgaggaccaggaggatgagatctctgtgtctgaggagctggagcccagcaccctgacccccagcagcgccctgaagcccagcgacaggatgaccatgagcagcctggtggagcgggcctgctgccgggactaccagaggctgggcctgggcaccctgagcagcagcctgagccgggccaagtctgagcccttccgcatcagccctgtgaacaggatgtatgccatctgccgcagctacccaggcctgctgattgtgccccagagcgtgcaggacaatgccctgcagagggtgagccgctgctaccggcagaaccgcttccctgtggtgtgctggaggagcggccgcagcaaggctgtgctgctgcggagcggcggcctgcatggaaaaggagtggtgggcctcttcaaggcccagaatgcccccagccctggccagagccaggccgacagcagcagcctggagcaggagaagtacctgcaggccgtggtgtcctccatgcccaggtatgcagatgccagcggcaggaacaccctgagcggcttcagcagcgcccacatgggcagccacgtgcccagcccccgggcccgggtgaccaccctgagcaaccccatggccgccagcgccagcagaagaacagccccccggggcaagtggggctctgtgaggaccagcggccgcagcagcggcctgggcacagatgtgggcagccggctggccggcagagatgccctggccccaccccaggccaacggcggccccccagaccccggcttcctgcggccccagagagctgccctgtacatcctgggggacaaggcccagctgaagggcgtgcggagtgaccccctgcagcagtgggagctggtgcccatcgaggtgtttgaggcccggcaggtgaaggccagcttcaagaagctgctgaaggcctgtgtgcccggctgcccagctgctgagcccagccctgccagcttcctgcggagcctggaggacagcgagtggctgatccagatccacaagctgctgcaggtgtctgtgctggtggtggagctgctggacagcggcagctctgtgctggtgggcctggaggatggctgggacatcaccacccaggtggtgtccctggtgcagctgctgagtgaccccttctaccgcaccctggagggcttccggctgctggtggagaaggagtggctgagctttggccaccgcttcagccacagaggagcccacaccctggccggccagagcagcggcttcacccctgtgttcctgcagttcctggactgtgtgcaccaggtgcacctgcagttccccatggagtttgagttcagccagttctacctgaagttcctgggctaccaccacgtgagccgccgcttccgcaccttcctgctggacagcgactatgagcgcatcgagctgggcctgctgtatgaggagaagggggagcggcggggccaggtgccctgccgctctgtgtgggagtatgtggaccggctgagcaagaggacccctgtgttccacaactacatgtatgccccagaagatgctgaggtgctgcggccctacagcaatgtgagcaacctgaaggtgtgggacttctacacagaggagaccctggccgagggccccccctatgactgggagctggcccagggccccccagagcccccagaggaggagaggagtgatggaggagccccccagagcagaagaagagtggtgtggccctgctatgacagctgcccccgggcccagccagatgccatcagccggctgctggaggagctgcagaggctggagacagagctgggccagcctgctgagcgctggaaggacacctgggacagagtgaaggccgcccagaggctggagggccgcccagatggccggggcacccccagcagcctgctggtgtccacagccccccaccaccggcgcagcctgggcgtgtacctgcaggagggccctgtgggcagcaccctgagcctgagcctggacagcgaccagagcagcggcagcaccaccagcggcagccggcaggccgcccggcgcagcaccagcaccctgtacagccagttccagacagctgagagcgagaacagaagctatgagggcaccctgtacaagaagggggccttcatgaagccctggaaggcccgctggtttgtgctggacaagaccaagcaccagctgcgctactatgaccaccgggtggacacagagtgcaagggcgtgattgacctggccgaggtggaggccgtggcccctggcacccccaccatgggcgcccccaagacagtggatgagaaggccttctttgatgtgaagaccacccggcgggtgtacaacttctgtgcccaggatgtgcccagcgcccagcagtgggtggaccgcatccagagctgcctgagtgatgcctag

SEQ ID NO: 169475 - DNA, 2697 bp, synthetic construct
  misc_feature 1..2697: note = Description of Artificial Sequence: Synthetic coding sequence
  source 1..2697: mol_type = other DNA
atggctgctggcacctgggccgctgctgctgctgctgctgctgctgactactttgtgctggtggccttcggcccccacccccggggcagcggggagggccagggccagatcctgcagcgcttccctgagaaggactgggaggacaaccccttcccccagggcatcgagctgttctgccagcccagcggctggcagctgtgcccagagaggaacccccccaccttctttgtggccgtgctgacagacatcaacagcgagcggcactactgtgcctgcctgaccttctgggagcctgctgagcccagccagcaggagaccaccagggtggaggatgccacagagcgggaggaggagggagatgagggcggccagacccacctgagccccacagccccagcccccagcgcccagctgtttgcccccaagaccctggtgctggtgtcccggctggaccacacagaggtgttcaggaacagcctgggcctcatctatgccatccacgtggagggcctgaatgtgtgcctggagaatgtgattggcaacctgctgacctgcaccgtgcccctggccggcggcagccagaggaccatcagcctgggcgctggggaccggcaggtgatccagacccccctggccgacagcctgcctgtgagccgctgcagcgtggccctgctcttccggcagctgggcatcaccaacgtgctgagcctcttctgtgccgccctgacagagcacaaggtgctcttcctgagccgcagctaccagaggctggctgatgcctgccggggcctgctggccctgctcttccccctgcgctacagcttcacctacgtgcccatcctgcctgcccagctgctggaggtgctgagcacccccacccccttcatcattggagtgaatgctgccttccaggccgagacccaggagctgctggatgtgattgtggccgacctggatggcggcaccgtgaccatcccagaatgtgtgcacatcccccccctgcctgagcccctgcagagccagacccacagcgtgctgtccatggtgctggaccctgagctggagctggccgacctggccttccccccacccaccaccagcaccagcagcctgaagatgcaggacaaggagctgcgggctgtgttcctgcggctgtttgcccagctgctgcagggctaccgctggtgcctgcacgtggtgcgcatccaccctgagcccgtcatccgcttccacaaggccgccttcctgggccagaggggcctggtggaggatgacttcctgatgaaggtgctggagggcatggcctttgctggctttgtgtctgagcggggcgtgccctaccggcccacagacctgtttgatgagctggtggcccacgaggtggccaggatgagagcagatgagaaccacccccagagggtgctgcggcacgtgcaggagctggccgagcagctgtacaagaatgaaaacccctacccagctgtggccatgcacaaggtgcagaggcctggagagagcagccacctgcggcgggtgccccggcccttcccccggctggatgagggcaccgtgcagtggatcgtggaccaggccgccgccaagatgcagggcgcccctcctgctgtgaaggccgagaggaggaccaccgtgcccagcggcccccccatgacagccatcctggagcgctgcagcggcctgcacgtgaacagcgcccggcggctggaggtggtgaggaactgcatctcctatgtgtttgagggcaagatgctggaggccaagaagctgctgcctgctgtgctgcgggccctgaagggccgggccgcccggcgctgcctggcccaggagctgcacctgcacgtgcagcagaacagagctgtgctggaccaccagcagtttgattttgtggtgaggatgatgaactgctgcctgcaggactgcaccagcctggatgagcacggcattgctgctgccctgctgcccctggtgacagccttctgcaggaagctgagccctggggtgacccagtttgcctacagctgtgtgcaggagcacgtggtgtggagcaccccccagttctgggaggccatgttttatggagatgtgcagacccacatccgggccctgtacctggagcccacagaggacctggccccagcccaggaggtgggggaggcccccagccaggaggatgagaggtctgccctggatgtggccagcgagcagaggcggctgtggcccaccctgagccgggagaagcagcaggagctggtgcagaaggaggagagcacagtgttcagccaggccatccactacgccaacaggatgagctacctgctgctgcccctggacagcagcaagagccggctgctgcgggagcgggccggcctgggggacctggagagcgccagcaacagcctggtgaccaacagcatggccggctctgtggccgagagctatgacacagaaagtggctttgaagatgctgagacctgtgatgtggccggggctgtggtgcgcttcatcaacagatttgtggacaaggtgtgcacagagagcggcgtgaccagtgaccacctgaagggcctgcacgtgatggtgcctgacatcgtgcagatgcacatcgagaccctggaggccgtgcagcgggagagccggcggctgccccccatccagaagcccaagctgctgcggccctag

SEQ ID NO: 169476 - DNA, 5682 bp, synthetic construct
  misc_feature 1..5682: note = Description of Artificial Sequence: Synthetic coding sequence
  source 1..5682: mol_type = other DNA
atggcccggctggccgactactttgtgctggtggccttcggcccccacccccggggcagcggggagggccagggccagatcctgcagcgcttccctgagaaggactgggaggacaaccccttcccccagggcatcgagctgttctgccagcccagcggctggcagctgtgcccagagaggaacccccccaccttctttgtggccgtgctgacagacatcaacagcgagcggcactactgtgcctgcctgaccttctgggagcctgctgagcccagccaggagaccaccagggtggaggatgccacagagcgggaggaggagggagatgaaggaggccagacccacctgagccccacagccccagcccccagcgcccagctgtttgcccccaagaccctggtgctggtgtcccggctggaccacacagaggtgttcaggaacagcctgggcctcatctatgccatccacgtggagggcctgaatgtgtgcctggagaatgtcatcggcaacctgctgacctgcaccgtgcccctggccggcggcagccagaggaccatcagcctgggcgctggggaccggcaggtgatccagacccccctggccgacagcctgcctgtgagccgctgcagcgtggccctgctcttccggcagctgggcatcaccaacgtgctgagcctcttctgtgccgccctgacagagcacaaggtgctcttcctgagccgcagctaccagaggctggctgatgcctgccggggcctgctggccctgctcttccccctgcgctacagcttcacctacgtgcccatcctgcctgcccagctgctggaggtgctgagcacccccacccccttcatcatcggcgtgaatgctgccttccaggccgagacccaggagctgctggatgtgattgtggccgacctggatggcggcaccgtgaccatcccagaatgtgtgcacatcccccccctgcctgagcccctgcagagccagacccacagcgtgctgtccatggtgctggaccctgagctggagctggccgacctggccttccccccacccaccaccagcaccagcagcctgaagatgcaggacaaggagctgcgggctgtgttcctgcggctgtttgcccagctgctgcagggctaccgctggtgcctgcacgtggtgcgcatccaccctgagcctgtgatccgcttccacaaggccgccttcctgggccagaggggcctggtggaggatgacttcctgatgaaggtgctggagggcatggcctttgctggctttgtgtctgagcggggcgtgccctaccggcccacagacctgtttgatgagctggtggcccacgaggtggccaggatgagagcagatgagaaccacccccagagggtgctgcggcacgtgcaggagctggccgagcagctgtacaagaatgaaaacccctacccagctgtggccatgcacaaggtgcagaggcctggagagagcagccacctgcggcgggtgccccggcccttcccccggctggatgagggcaccgtgcagtggatcgtggaccaggccgccgccaagatgcagggcgcccccccagctgtgaaggccgagaggaggaccaccgtgcccagcggcccccccatgacagccatcctggagcgctgcagcggcctgcacgtgaacagcgcccggcggctggaggtggtgaggaactgcatctcctatgtgtttgagggcaagatgctggaggccaagaagctgctgcctgctgtgctgcgggccctgaagggccgggccgcccggcgctgcctggcccaggagctgcacctgcacgtgcagcagaacagagctgtgctggaccaccagcagtttgattttgtggtgaggatgatgaactgctgcctgcaggactgcaccagcctggatgaacatggaattgctgctgccctgctgcccctggtgacagccttctgcaggaagctgagccctggggtgacccagtttgcctacagctgtgtgcaggagcacgtggtgtggagcaccccccagttctgggaggccatgttttatggagatgtgcagacccacatccgggccctgtacctggagcccacagaggacctggccccagcccaggaggtgggggaggcccccagccaggaggatgagaggtctgccctggatgtggccagcgagcagaggcggctgtggcccaccctgagccgggagaagcagcaggagctggtgcagaaggaggagagcaccgtcttcagccaggccatccactacgccaacaggatgagctacctgctgctgcccctggacagcagcaagagccggctgctgcgggagagagctggcctgggggacctggagagcgccagcaacagcctggtgaccaacagcatggccggctctgtggccgagagctatgacacagagagcggctttgaagatgctgagacctgtgatgtggccggggctgtggtgcgcttcatcaacagatttgtggacaaggtgtgcacagaaagtggagtgaccagtgaccacctgaagggcctgcacgtgatggtgcctgacatcgtgcagatgcacatcgagaccctggaggccgtgcagcgggagagccggcggctgccccccatccagaagcccaagctgctgcggccccggctgctgcctggagaggagtgtgtgctggatggcctgcgggtgtacctgctgcctgatggccgggaggagggcgccggcggcagcgctgggggccctgccctgctgcctgctgagggcgctgtgttcctgaccacctacagagtcatcttcaccggcatgcccacagaccccctggtgggggagcaggtggtggtgcgctccttccctgtggccgccctgaccaaggagaagaggatctctgtgcagacccctgtggaccagctgctgcaggacggcctgcagctgcggagctgcaccttccagctgctgaagatggcctttgatgaggaggtgggcagtgacagcgctgagctgttcaggaagcagctgcacaagctgcgctaccccccagacatccgggccacctttgccttcaccctgggcagcgcccacaccccaggccggcccccccgggtgaccaaggacaagggccccagcctgcggaccctgagcaggaacctggtgaagaatgccaagaagaccatcggccggcagcacgtgaccaggaagaagtacaaccccccatcctgggagcaccggggccagcccccacctgaggaccaggaggatgagatctctgtgtctgaggagctggagcccagcaccctgacccccagcagcgccctgaagcccagcgacaggatgaccatgagcagcctggtggagcgggcctgctgccgggactaccagaggctgggcctgggcaccctgagcagcagcctgagccgggccaagtctgagcccttccgcatcagccctgtgaacaggatgtatgccatctgccgcagctacccaggcctgctgattgtgccccagagcgtgcaggacaatgccctgcagagggtgagccgctgctaccggcagaaccgcttccctgtggtgtgctggaggagcggccgcagcaaggctgtgctgctgcggagcggcggcctgcatggaaaaggagtggtgggcctcttcaaggcccagaatgcccccagccctggccagagccaggccgacagcagcagcctggagcaggagaagtacctgcaggccgtggtgtcctccatgcccaggtatgcagatgccagcggcaggaacaccctgagcggcttcagcagcgcccacatgggcagccacgtgcccagcccccgggcccgggtgaccaccctgagcaaccccatggccgccagcgccagcagaagaacagccccccggggcaagtggggctctgtgaggaccagcggccgcagcagcggcctgggcacagatgtgggcagccggctggccggcagagatgccctggccccaccccaggccaacggcggccccccagaccccggcttcctgcggccccagagagctgccctgtacatcctgggggacaaggcccagctgaagggcgtgcggagtgaccccctgcagcagtgggagctggtgcccatcgaggtgtttgaggcccggcaggtgaaggccagcttcaagaagctgctgaaggcctgtgtgcccggctgcccagctgctgagcccagccctgccagcttcctgcggagcctggaggacagcgagtggctgatccagatccacaagctgctgcaggtgtctgtgctggtggtggagctgctggacagcggcagctctgtgctggtgggcctggaggatggctgggacatcaccacccaggtggtgtccctggtgcagctgctgagtgaccccttctaccgcaccctggagggcttccggctgctggtggagaaggagtggctgagctttggccaccgcttcagccacagaggagcccacaccctggccggccagagcagcggcttcacccctgtgttcctgcagttcctggactgtgtgcaccaggtgcacctgcagttccccatggagtttgagttcagccagttctacctgaagttcctgggctaccaccacgtgagccgccgcttccgcaccttcctgctggacagcgactatgagcgcatcgagctgggcctgctgtatgaggagaagggggagcggcggggccaggtgccctgccgctctgtgtgggagtatgtggaccggctgagcaagaggacccctgtgttccacaactacatgtatgccccagaagatgctgaggtgctgcggccctacagcaatgtgagcaacctgaaggtgtgggacttctacacagaggagaccctggccgagggccccccctatgactgggagctggcccagggccccccagagcccccagaggaggagaggagtgatggaggagccccccagagcagaagaagagtggtgtggccctgctatgacagctgcccccgggcccagccagatgccatcagccggctgctggaggagctgcagaggctggagacagagctgggccagcctgctgagcgctggaaggacacctgggacagagtgaaggccgcccagaggctggagggccgcccagatggccggggcacccccagcagcctgctggtgtccacagccccccaccaccggcgcagcctgggcgtgtacctgcaggagggccctgtgggcagcaccctgagcctgagcctggacagcgaccagagcagcggcagcaccaccagcggcagccggcaggccgcccggcgcagcaccagcaccctgtacagccagttccagacagctgagagcgagaacagaagctatgagggcaccctgtacaagaagggggccttcatgaagccctggaaggcccgctggtttgtgctggacaagaccaagcaccagctgcgctactatgaccaccgggtggacacagagtgcaagggcgtgattgacctggccgaggtggaggccgtggcccctggcacccccaccatgggcgcccccaagacagtggatgagaaggccttctttgatgtgaagaccacccggcgggtgtacaacttctgtgcccaggatgtgcccagcgcccagcagtgggtggaccgcatccagagctgcctgagtgatgcctag

SEQ ID NO: 169477 - DNA, 5604 bp, synthetic construct
  misc_feature 1..5604: note = Description of Artificial Sequence: Synthetic coding sequence
  source 1..5604: mol_type = other DNA
atggcccggctggccgactactttgtgctggtggccttcggcccccacccccggggcagcggggagggccagggccagatcctgcagcgcttccctgagaaggactgggaggacaaccccttcccccagggcatcgagctgttctgccagcccagcggctggcagctgtgcccagagaggaacccccccaccttctttgtggccgtgctgacagacatcaacagcgagcggcactactgtgcctgcctgaccttctgggagcctgctgagcccagccaggagaccaccagggtggaggatgccacagagcgggaggaggagggagatgaaggaggccagacccacctgagccccacagccccagcccccagcgcccagctgtttgcccccaagaccctggtgctggtgtcccggctggaccacacagaggtgttcaggaacagcctgggcctcatctatgccatccacgtggagggcctgaatgtgtgcctggagaatgtcatcggcaacctgctgacctgcaccgtgcccctggccggcggcagccagaggaccatcagcctgggcgctggggaccggcaggtgatccagacccccctggccgacagcctgcctgtgagccgctgcagcgtggccctgctcttccggcagctgggcatcaccaacgtgctgagcctcttctgtgccgccctgacagagcacaaggtgctcttcctgagccgcagctaccagaggctggctgatgcctgccggggcctgctggccctgctcttccccctgcgctacagcttcacctacgtgcccatcctgcctgcccagctgctggaggtgctgagcacccccacccccttcatcatcggcgtgaatgctgccttccaggccgagacccaggagctgctggatgtgattgtggccgacctggatggcggcaccgtgaccatcccagaatgtgtgcacatcccccccctgcctgagcccctgcagagccagacccacagcgtgctgtccatggtgctggaccctgagctggagctggccgacctggccttccccccacccaccaccagcaccagcagcctgaagatgcaggacaaggagctgcgggctgtgttcctgcggctgtttgcccagctgctgcagggctaccgctggtgcctgcacgtggtgcgcatccaccctgagcctgtgatccgcttccacaaggccgccttcctgggccagaggggcctggtggaggatgacttcctgatgaaggtgctggagggcatggcctttgctggctttgtgtctgagcggggcgtgccctaccggcccacagacctgtttgatgagctggtggcccacgaggtggccaggatgagagcagatgagaaccacccccagagggtgctgcggcacgtgcaggagctggccgagcagctgtacaagaatgaaaacccctacccagctgtggccatgcacaaggtgcagaggcctggagagagcagccacctgcggcgggtgccccggcccttcccccggctggatgagggcaccgtgcagtggatcgtggaccaggccgccgccaagatgcagggcgcccccccagctgtgaaggccgagaggaggaccaccgtgcccagcggcccccccatgacagccatcctggagcgctgcagcggcctgcacgtgaacagcgcccggcggctggaggtggtgaggaactgcatctcctatgtgtttgagggcaagatgctggaggccaagaagctgctgcctgctgtgctgcgggccctgaagggccgggccgcccggcgctgcctggcccaggagctgcacctgcacgtgcagcagaacagagctgtgctggaccaccagcagtttgattttgtggtgaggatgatgaactgctgcctgcaggactgcaccagcctggatgaacatggaattgctgctgccctgctgcccctggtgacagccttctgcaggaagctgagccctggggtgacccagtttgcctacagctgtgtgcaggagcacgtggtgtggagcaccccccagttctgggaggccatgttttatggagatgtgcagacccacatccgggccctgtacctggagcccacagaggacctggccccagcccaggaggtgggggaggcccccagccaggaggatgagaggtctgccctggatgtggccagcgagcagaggcggctgtggcccaccctgagccgggagaagcagcaggagctggtgcagaaggaggagagcaccgtcttcagccaggccatccactacgccaacaggatgagctacctgctgctgcccctggacagcagcaagagccggctgctgcgggagagagctggcctgggggacctggagagcgccagcaacagcctggtgaccaacagcatggccggctctgtggccgagagctatgacacagagagcggctttgaagatgctgagacctgtgatgtggccggggctgtggtgcgcttcatcaacagatttgtggacaaggtgtgcacagaaagtggagtgaccagtgaccacctgaagggcctgcacgtgatggtgcctgacatcgtgcagatgcacatcgagaccctggaggccgtgcagcgggagagccggcggctgccccccatccagaagcccaagctgctgcggccccggctgctgcctggagaggagtgtgtgctggatggcctgcgggtgtacctgctgcctgatggccgggaggagggcgccggcggcagcgctgggggccctgccctgctgcctgctgagggcgctgtgttcctgaccacctacagagtcatcttcaccggcatgcccacagaccccctggtgggggagcaggtggtggtgcgctccttccctgtggccgccctgaccaaggagaagaggatctctgtgcagacccctgtggaccagctgctgcaggacggcctgcagctgcggagctgcaccttccagctgctgaagatggcctttgatgaggaggtgggcagtgacagcgctgagctgttcaggaagcagctgcacaagctgcgctaccccccagacatccgggccacctttgccttcaccctgggcagcgcccacaccccaggccggcccccccgggtgaccaaggacaagggccccagcctgcggaccctgagcaggaacctggtgaagaatgccaagaagaccatcggccggcagcacgtgaccaggaagaagtacaaccccccatcctgggagcaccggggccagcccccacctgaggaccaggaggatgagatctctgtgtctgaggagctggagcccagcaccctgacccccagcagcgccctgaagcccagcgacaggatgaccatgagcagcctggtggagcgggcctgctgccgggactaccagaggctgggcctgggcaccctgagcagcagcctgagccgggccaagtctgagcccttccgcatcagccctgtgaacaggatgtatgccatctgccgcagctacccaggcctgctgattgtgccccagagcgtgcaggacaatgccctgcagagggtgagccgctgctaccggcagaaccgcttccctgtggtgtgctggaggagcggccgcagcaaggctgtgctgctgcggagcggcggcctgcatggaaaaggagtggtgggcctcttcaaggcccagaatgcccccagccctggccagagccaggccgacagcagcagcctggagcaggagaagtacctgcaggccgtggtgtcctccatgcccaggtatgcagatgccagcggcaggaacaccctgagcggcttcagcagcgcccacatgggcagccacggcaagtggggctctgtgaggaccagcggccgcagcagcggcctgggcacagatgtgggcagccggctggccggcagagatgccctggccccaccccaggccaacggcggccccccagaccccggcttcctgcggccccagagagctgccctgtacatcctgggggacaaggcccagctgaagggcgtgcggagtgaccccctgcagcagtgggagctggtgcccatcgaggtgtttgaggcccggcaggtgaaggccagcttcaagaagctgctgaaggcctgtgtgcccggctgcccagctgctgagcccagccctgccagcttcctgcggagcctggaggacagcgagtggctgatccagatccacaagctgctgcaggtgtctgtgctggtggtggagctgctggacagcggcagctctgtgctggtgggcctggaggatggctgggacatcaccacccaggtggtgtccctggtgcagctgctgagtgaccccttctaccgcaccctggagggcttccggctgctggtggagaaggagtggctgagctttggccaccgcttcagccacagaggagcccacaccctggccggccagagcagcggcttcacccctgtgttcctgcagttcctggactgtgtgcaccaggtgcacctgcagttccccatggagtttgagttcagccagttctacctgaagttcctgggctaccaccacgtgagccgccgcttccgcaccttcctgctggacagcgactatgagcgcatcgagctgggcctgctgtatgaggagaagggggagcggcggggccaggtgccctgccgctctgtgtgggagtatgtggaccggctgagcaagaggacccctgtgttccacaactacatgtatgccccagaagatgctgaggtgctgcggccctacagcaatgtgagcaacctgaaggtgtgggacttctacacagaggagaccctggccgagggccccccctatgactgggagctggcccagggccccccagagcccccagaggaggagaggagtgatggaggagccccccagagcagaagaagagtggtgtggccctgctatgacagctgcccccgggcccagccagatgccatcagccggctgctggaggagctgcagaggctggagacagagctgggccagcctgctgagcgctggaaggacacctgggacagagtgaaggccgcccagaggctggagggccgcccagatggccggggcacccccagcagcctgctggtgtccacagccccccaccaccggcgcagcctgggcgtgtacctgcaggagggccctgtgggcagcaccctgagcctgagcctggacagcgaccagagcagcggcagcaccaccagcggcagccggcaggccgcccggcgcagcaccagcaccctgtacagccagttccagacagctgagagcgagaacagaagctatgagggcaccctgtacaagaagggggccttcatgaagccctggaaggcccgctggtttgtgctggacaagaccaagcaccagctgcgctactatgaccaccgggtggacacagagtgcaagggcgtgattgacctggccgaggtggaggccgtggcccctggcacccccaccatgggcgcccccaagacagtggatgagaaggccttctttgatgtgaagaccacccggcgggtgtacaacttctgtgcccaggatgtgcccagcgcccagcagtgggtggaccgcatccagagctgcctgagtgatgcctag

SEQ ID NO: 169478 - DNA, 5550 bp, synthetic construct
  misc_feature 1..5550: note = Description of Artificial Sequence: Synthetic coding sequence
  source 1..5550: mol_type = other DNA
atggcccggctggccgactacttcatcgtggtgggctatgaccacgagaagccaggcagcggggagggcctgggcaagatcatccagcgcttcccccagaaggactgggatgacacccccttcccccagggcatcgagctgttctgccagcccggcggctggcagctgagccgggagaggaagcagcccaccttctttgtggtggtgctgacagacatcgacagcgacagacactactgcagctgcctgaccttctatgaggccgagatcaacctgcagggcaccaagaaggaggagattgaaggagaggccaaggtgtctggcctcatccagcctgctgaggtgtttgcccccaagagcctggtgctggtgtcccggctgtactacccagagatcttccgggcctgcctgggcctcatctacacagtgtatgtggacagcctgaatgtgtccctggagagcctcatcgccaacctgtgtgcctgcctggtgcctgctgctgggggcagccagaagctgttcagcctgggcgctggggaccggcagctgatccagacccccctgcatgacagcctgcccatcaccggcacctctgtggccctgctcttccagcagctgggcatccagaatgtgctgagcctcttctgtgctgtgctgacagagaacaaggtgctcttccacagcgccagcttccagaggctgagtgatgcctgccgggccctggagagcctgatgttccccctgaagtacagctacccctacatccccatcctgcctgcccagctgctggaggtgctgagcagccccacccccttcatcatcggcgtgcacagcgtcttcaagacagatgtgcatgagctgctggatgtgatcatcgctgacctggatggcggcaccatcaagatccctgagtgcatccacctgagcagcctgcctgagcccctgctgcaccagacccagagcgccctgagcctcatcctgcacccagacctggaggtggccgaccacgccttccccccacccaggacagccctgagccacagcaagatgctggacaaggaggtgcgggctgtgttcctgcggctgtttgcccagctgttccagggctaccgcagctgcctgcagctgatccgcatccatgctgagcctgtgatccacttccacaagacagccttcctgggccagaggggcctggtggagaatgacttcctgaccaaggtgctgagcggcatggcctttgctggctttgtgtctgagcggggccccccctaccgcagctgtgacctgtttgatgagctggtggcctttgaggtggagcgcatcaaggtggaggagaacaaccctgtgaagatgatcaagcacgtgcgggagctggccgagcagctgttcaagaatgaaaaccccaacccccacatggccttccagaaggtgccccggcccacagagggcagccacctgcgggtgcacatcctgcccttccctgagatcaatgaggcccgggtgcaggagctgatccaggagaatgtggccaagaaccagaatgcccccccagccaccagaattgagaagaagtgtgtggtgcctgctggcccccctgtggtgtccatcatggacaaggtgaccaccgtcttcaacagcgcccagaggctggaggtggtgaggaactgcatctccttcatctttgagaacaagatcctggagacagagaagaccctgcctgctgccctgcgggccctgaagggcaaggccgcccggcagtgcctgacagatgagctgggcctgcacgtgcagcagaacagagccatcctggaccaccagcagtttgactacatcatccgcatgatgaactgcaccctgcaggactgcagcagcctggaggagtacaacattgctgctgccctgctgcccctgaccagcgccttctacaggaagctggcccctggggtgtcccagtttgcctacacctgtgtgcaggaccaccccatctggaccaaccagcagttctgggagaccaccttctacaatgctgtgcaggagcaggtgcgcagcctgtacctgagcgccaaggaggacaaccacgccccccacctgaagcagaaggacaagctgcctgatgaccactaccaggagaagacagccatggacctggccgctgagcagctgcggctgtggcccaccctgagcaagagcacccagcaggagctggtgcagcacgaggagagcaccgtcttcagccaggccatccactttgccaacctgatggtgaacctgctggtgcccctggacaccagcaagaacaagctgctgcggaccagcgcccctggggactgggagagcggcagcaacagcatcgtgaccaacagcattgctggctctgtggccgagagctatgacacagaaagtggctttgaggacagtgaaaatacagacatcgccaacagcgtggtgcgcttcatcacccgcttcatcgacaaggtgtgcacagagagcggcgtgacccaggaccacatcaagagcctgcactgcatgatccctggcatcgtggccatgcacatcgagaccctggaggccgtgcaccgggagagccggcggctgccccccatccagaagcccaagatcctgcggcctgccctgctgcccggggaggagatcgtgtgtgagggcctgcgggtgctgctggaccctgatggccgggaggaggccaccggcggcctgctgggcggcccccagctgctgcctgctgagggcgccctcttcctgaccacctaccgcatcctcttccggggcacccctcatgaccagctggtgggggagcagacagtggtgcgctccttccccatcgccagcatcaccaaggagaagaagatcaccatgcagaaccagctgcagcagaacatgcaggagggcctgcagatcaccagcgccagcttccagctgatcaaggtggcctttgatgaggaggtgtccccagaggtggtggagatcttcaagaagcagctgatgaagttccgctacccccagagcatcttcagcacctttgcctttgctgctggccagaccaccccccagatcatcctgcccaagcagaaggagaagaacaccagcttccgcaccttcagcaagaccatcgtgaagggggccaagagagctgggaagatgaccatcggccggcagtacctgctgaagaagaagacaggcaccatcgtggaggagcgggtgaaccggcccggctggaatgaagatgatgatgtgtctgtgtctgatgagagcgagctgcccaccagcaccaccctgaaggccagcgagaagagcaccatggagcagctggtggagaaggcctgcttccgggactaccagaggctgggcctgggcaccatcagcggcagcagcagccgcagcaggcctgagtacttccgcatcacagccagcaacaggatgtacagcctgtgccgcagctacccaggcctgctggtggtgccccaggccgtgcaggacagcagcctgccccgggtggcccgctgctaccgccacaaccggctgcctgtggtgtgctggaagaacagccgcagcggcaccctgctgctgcggagcggcggcttccatggaaaaggagtggtgggcctcttcaagagccagaacagcccccaggccgcccccaccagcagcctggagagcagcagcagcattgagcaggagaagtacctgcaggccctgctgaatgctgtgtctgtgcaccagaagctgcggggcaacagcaccctgactgtgcggcctgcctttgccctgagccctggggtgtgggccagcctgcggagcagcaccaggctcatcagcagccccaccagcttcattgatgtgggcgcccggctggccggcaaggaccacagcgccagcttcagcaacagcagctacctgcagaaccagctgctgaagaggcaggccgccctgtacatctttggagagaagagccagctgaggaacttcaaggtggagtttgccctgaactgtgaatttgtgcctgtggagttccacgagatccggcaggtgaaggccagcttcaagaagctgatgagggcctgcatccccagcaccatccccacagattctgaggtgaccttcctgaaggccctgggggacagcgagtggttcccccagctgcaccgcatcatgcagctggccgtggtggtgtctgaggtgctggagaatggcagctctgtgctggtgtgcctggaggagggctgggacatcacagcccaggtgaccagcctggtgcagctgctgagtgaccccttctaccgcaccctggagggcttccagatgctggtggagaaggagtggctgagctttggccacaagttcagccagaggagcagcctgaccctgaactgccagggcagcggctttgcccctgtgttcctgcagttcctggactgtgtgcaccaggtgcacaaccagtaccccacagaatttgagttcaacctgtactacctgaagttcctggccttccactacgtgagcaaccgcttcaagaccttcctgctggacagcgactatgaaaggctggagcacggcaccctgtttgatgacaagggggagaagcacgccaagaagggcgtgtgcatctgggagtgcatcgacaggatgcacaagaggagccccatcttcttcaactacctgtacagccccctggagattgaggccctgaagcccaacgtgaatgtgagcagcctgaagaagtgggactactacatcgaggagaccctgagcacaggccccagctatgactggatgatgctgacccccaagcacttccccagtgaagattctgacctggccggggaggccggccccaggagccagaggagaacagtgtggccctgctatgatgatgtgtcctgcacccagccagatgccctgaccagcctcttcagcgagattgagaagctggagcacaagctgaaccaggcccctgagaagtggcagcagctgtgggagcgggtgacagtggacctgaaggaggagcccaggacagacaggagccagaggcacctgagccgcagccctggcatcgtgtccaccaacctgcccagctaccagaagaggagcctgctgcacctgcctgacagctccatgggagaggagcagaacagcagcatcagccccagcaatggagtggagaggagagctgccaccctgtacagccagtacaccagcaagaatgatgagaacagaagctttgagggcaccctgtacaagagaggagccctgctgaagggctggaagccccgctggtttgtgctggatgtgaccaagcaccagctgcgctactatgattctggagaggacaccagctgcaagggccacatcgacctggccgaggtggagatggtgatcccagctggccccagcatgggcgcccccaagcacaccagtgacaaggccttctttgacctgaagaccagcaagagggtgtacaacttctgtgcccaggacggccagagcgcccagcagtggatggacaagatccagagctgcatcagtgatgcctag

SEQ ID NO: 169479 - DNA, 4791 bp, synthetic construct
  misc_feature 1..4791: note = Description of Artificial Sequence: Synthetic coding sequence
  source 1..4791: mol_type = other DNA
atggagagccgggagaccctgagcagcagccggcagaggggcggggagagtgacttcctgcctgtgagcagcgccaagcccccagctgcccctggctgtgccggggagcccctgctgagcaccccaggccctgggaagggcatccctgtgggcggggagaggatggagcctgaggaggaggatgagctgggcagcggcagagatgtggacagcaacagcaatgctgacagcgagaagtgggtggccggagatggcctggaggagcaggagttcagcatcaaggaggccaacttcacagagggcagcctgaagctgaagatccagaccaccaagagggccaagaagccacccaagaacctggagaactacatctgccccccagagatcaagatcaccatcaagcagagcggggaccagaaggtgtcccgggccggcaagaacagcaaggccaccaaggaggaggagaggagccacagcaagaagaagctgctgacagccagtgacctggccgccagtgacctgaagggcttccagccccaggcctatgaaagaccccagaagcacagcaccctgcactatgacaccggcctgccccaggacttcaccggggacaccctgaagcccaagcaccagcagaagagcagcagccagaaccacatggactggagcaccaacagcgacagcggccctgtgacccagaactgcttcatcagccctgagagcggccgggagacagccagcaccagcaagatcccagccctggagcctgtggccagctttgccaaggcccagggcaagaagggcagcgctggcaacacctggagccagctgagcaacaacaacaaggacctgctgctgggcggcgtggcccccagccccagcagccacagcagccctgccccacccagcagcagcgcagaatgtaatggcctgcagcccctggtggaccaggacggcggcggcaccaaggagcccccagagccccccaccgtgggcagcaagaagaagagcagcaagaaggatgtgatcagccagaccatccccaacccagacctggactgggtgaagaatgcccagaaggcctttgacaacacagagggcaagcgggagggctacagcgctgacagcgcccaggaggccagccctgcccggcagaatgtgtcctctgccagcaacccagaaaatgacagcagccacgtgcgcatcaccatccccatcaaggcccccagcctggaccccaccaaccacaagaggaagaagaggcagagcatcaaggctgtggtggagaagatcatgcctgagaaggccctggccagcggcatcaccatgagcagcgaggtggtgaaccgcatcctgagcaacagcgagggcaacaagaaggacccccgggtgcccaagctgagcaagatgattgaaaatgaaagccccagcgtgggcctggagaccggcggcaatgctgagaaggtgattcctggaggagtgtccaagcccaggaagccacccatggtgatgaccccacccacctgcacagaccacagccccagcaggaagctgcctgagatccagcaccccaagtttgctgccaagaggcgctggacctgcagcaagcccaagcccagcaccatgctgcgggaggccgtgatggccaccagtgacaagctgatgctggagccccccagcgcctaccccatcacccccagcagccccctgtacaccaacacagacagcctgaccgtcatcacccctgtgaagaagaagaggggccggcccaagaagcagcccctgctgactgtggagaccatccacgagggcaccagcaccagccctgtgagccccatcagccgggagttccctggcaccaagaagaggaagagaagaagaaacctggccaagctggcccagctggtgcctggagaggacaagcccatgtctgagatgaagttccacaagaaggtgggcaagctgggcgtgctggacaagaagaccatcaagaccatcaacaagatgaagaccctgaagaggaagaacatcctgaaccagatcctgagctgcagcagctctgtggccctgaaggccaaggcccctcctgagaccagccctggagctgctgccatcgagagcaagctgggcaagcagatcaacgtgtccaagaggggcaccatctacatcggcaagaagaggggcaggaagcccagggctgagctgcccccaccttctgaggagcccaagacagccatcaagcaccccaggcctgtgagcagccagccagatgtgcctgctgtgcccagcaacttccagagcctggtggccagcagccctgctgccatgcaccccctgagcacccagctgggcggcagcaatggaaacctgagccctgccagcacagagaccaacttcagcgagctgaagaccatgcccaacctgcagcccatcagcgccctgcccaccaagacccagaagggcatccacagcggcacctggaagctgagccccccccggctgatggccaacagccccagccacctgtgtgaaattggcagcctgaaggagatcaccctgagccctgtgtctgagagccacagcgaggagaccatccccagcgacagcggcattggaacagacaacaacagcaccagtgaccaggccgagaagagcagcgagagcagaagacgctacagctttgacttctgcagcctggacaaccctgaggccatccccagcgacaccagcaccaagaacagacatggccaccggcagaagcacctgattgtggacaacttcctggcccacgagagcctgaagaagcccaagcacaagaggaagaggaagagcctgcagaacagagatgacctgcagttcctggccgacctggaggagctgatcaccaagttccaggtgttccgcatcagccacaggagctacaccttctaccacgagaacccctaccccagcatcttccgcatcaactttgaccactactaccctgtgccctacatccagtatgaccccctgctgtacctgcggaggaccagtgacctgaagagcaagaagaagaggggccggcctgccaagaccaatgacaccatgaccaaggtgcccttcctgcagggcttctcctaccccatccccagcggcagctactatgccccctacggcatgccctacacctccatgcccatgatgaacctgggctactacggccagtacccagcccccctgtacctgagccacaccctgggcgccgccagccccttcatgaggcccaccgtgcccccaccccagttccacaccaacagccacgtgaagatgtctggggccgccaagcacaaggccaagcatggagtgcacctgcagggccctgtgtccatgggcctgggggacatgcagcccagcctgaacccccccaaggtgggcagcgccagcctgagcagcggccgcctgcacaagaggaagcacaagcacaagcacaagcacaaggaggaccgcatcctgggcacccatgacaacctgagcggcctgtttgctgggaaggccaccggcttcagcagccacatcctgtctgagcggctgagcagcgctgacaaggagctgcccctggtgtctgagaagaacaagcacaaggagaagcagaagcaccagcacagcgaggccggccacaaggccagcaagaacaactttgaggtggacaccctgagcaccctgagcctgagtgatgcccagcactggacccaggccaaggagaagggggacctgagcagcgagcctgtggacagctgcaccaagcgctacagcggcagcggaggagatggcggcagcaccaggtctgagaacctggatgtgttcagcgagatgaaccccagcaatgacaagtgggacagtgatgtgtctggcagcaagaggaggagctatgagggcttcggcacctaccgggagaaggacatccaggccttcaagatgaacaggaaggagaggagcagctatgacagctccatgagccctggcatgcccagcccccacctgaaggtggaccagacagctgtgcacagcaagaatgaaggctctgtgcccaccatgatgaccaggaagaagccagctgctgtggacagcgtgaccatccccccagcccctgtgctgagcctgctggccgccagcgctgccaccagtgatgctgtgggcagcagcctgaagaagcgcttcaagagaagagaaattgaggccatccagtgtgaggtgaggaagatgtgcaactacaccaagatcctgagcaccaagaagaacctggaccacgtgaacaagatcctgaaggccaagaggctgcagaggcagagcaagacaggcaacaactttgtgaagaagagaagaggccggcccaggaagcagcccacccagtttgatgaggacagccgggaccagatgcctgtgctggagaagtgcatcgacctgcccagcaagaggggccagaagcccagcctgagccccctggtgctggagcctgctgccagccaggacaccatcatggccaccattgaagctgtgatccacatggcccgggaggccccacccctgcccccacctcctcctccacccctgcccccacctcctcctccacccctgcccccacctccacccctgcccaagaccccccggggcggcaagaggaagcacaagccccaggccccagcccagcccccccagcagagccccccccagcagcccctgccccaggaggaggaggtgaaggccaagaggcagaggaagagccggggcagcgagagcgaggtgctgccctag

SEQ ID NO: 169480 - DNA, 729 bp, synthetic construct
  misc_feature 1..729: note = Description of Artificial Sequence: Synthetic coding sequence
  source 1..729: mol_type = other DNA
atggagagccgggagaccctgagcagcagccggcagaggggcggggagagtgacttcctgcctgtgagcagcgccaagcccccagctgcccctggctgtgccggggagcccctgctgagcaccccaggccctgggaagggcatccctgtgggcggggagaggatggagcctgaggaggaggatgagctgggcagcggcagagatgtggacagcaacagcaatgctgacagcgagaagtgggtggccggagatggcctggaggagcaggagttcagcatcaaggaggccaacttcacagagggcagcctgaagctgaagatccagaccaccaagagggccaagaagccacccaagaacctggagaactacatctgccccccagagatcaagatcaccatcaagcagagcggggaccagaaggtgtcccgggccggcaagaacagcaaggccaccaaggaggaggagaggagccacagcaagaagaagctgctgacagccagtgacctggccgccagtgacctgaagggcttccagccccagatcaaggacagcagcaaggaggaggtgtggaagaggcggggcggccagggcatccccttcaagaagcagttcctgagccaggagcgggccatgtgcttcagctgccccaggaaccccttccctgccaagccaggcagcctgaccctgcccttccacagcgagcctgctgtgtgggcccaggaggtgtag

SEQ ID NO: 169481 - DNA, 414 bp, synthetic construct
  misc_feature 1..414: note = Description of Artificial Sequence: Synthetic coding sequence
  source 1..414: mol_type = other DNA
atggagagccgggagaccctgagcagcagccggcagaggggcggggagagtgacttcctgcctgtgagcagcgccaagcccccagctgcccctggctgtgccggggagcccctgctgagcaccccaggccctgggaagggcatccctgtgggcggggagaggatggagcctgaggaggaggatgagctgggcagcggcagagatgtggacagcaacagcaatgctgacagcgagaagtgggtggccggagatggcctggaggagcaggagttcagcatcaaggaggccaacttcacagagggcagcctgaagctgaagatccagaccaccaagagggccaagaagccacccaagaacctggagaactacatctgccccccagagatcaagatcaccatcaagcagagcggctag

SEQ ID NO: 169482 - DNA, 2055 bp, synthetic construct
  misc_feature 1..2055: note = Description of Artificial Sequence: Synthetic coding sequence
  source 1..2055: mol_type = other DNA
atgtttgctgaggccgccaagaccacccggccctgtggcatggccgagttcaaggagaagccagaggcccccacagagcagctggatgtggcctgtggccaggagaacctgcctgtgggcgcctggcccccaggggccgccccagcccccttccagtacaccccagaccacgtggtgggccctggagctgacatcgaccccacccagatcaccttccctggctgcatctgtgtgaagaccccctgcctgcccggcacctgcagctgcctgcggcacggggagaactatgatgacaacagctgcctgcgggacatcggcagcggcggcaagtatgcagagcctgtgtttgaatgtaatgtgctgtgccgctgcagcgaccactgcaggaacagagtggtgcagaagggcctgcagttccacttccaggtgttcaagacccacaagaagggctggggcctgcggaccctggagttcatccccaagggccgctttgtgtgtgaatatgctggggaggtgctgggcttcagcgaggtgcagaggcgcatccacctgcagaccaagagtgacagcaactacatcatcgccatccgggagcacgtgtacaacggccaggtgatggagacctttgtggaccccacctacatcggcaacatcggccgcttcctgaaccacagctgtgagcccaacctgctgatgatccctgtgagaattgacagcatggtgcccaagctggccctgtttgctgccaaggacatcgtgcctgaggaggagctgtcctatgactacagcggccgctacctgaacctgactgtgtctgaggacaaggagcggctggaccacggcaagctgaggaagccctgctactgtggggccaagagctgcacagccttcctgccctttgacagcagcctgtactgccctgtggagaagagcaacatcagctgtggaaatgagaaggagcccagcatgtgtggcagcgcccccagcgtcttccccagctgcaagaggctgaccctggagaccatgaagatgatgctggacaagaagcagatccgggccatcttcctgtttgagttcaagatgggcaggaaggctgctgagaccaccaggaacatcaacaatgccttcggccctggaacagccaatgaaagaacagtgcagtggtggttcaagaagttctgcaagggagatgagagcctggaggatgaggagaggagcggccggcccagcgaggtggacaatgaccagctgcgggccatcattgaagctgaccccctgaccaccacccgggaggtggccgaggagctgaatgtgaaccacagcacagtggtgcgccacctgaagcagatcggcaaggtgaagaagctggacaagtgggtgccccatgagctgacagagaaccagaagaacagaagatttgaggtgagcagcagcctcatcctgaggaaccacaatgagcccttcctggaccgcatcgtgacctgtgatgagaagtggatcctgtatgacaacagaagaagaagtgcccagtggctggaccaggaggaggcccccaagcacttccccaagcccatcctgcaccccaagaaggtgatggtgaccatctggtggagcgctgctggcctcatccactacagcttcctgaaccctggagagaccatcaccagcgagaagtatgcccaggagattgatgagatgaaccagaagctgcagaggctgcagctggccctggtgaacaggaagggccccatcctgctgcatgacaatgcccggccccacgtggcccagcccaccctgcagaagctgaatgagctgggctatgaggtgctgccccaccccccctacagcccagacctgctgcccaccaactaccacgtgttcaagcacctgaacaacttcctgcagggcaagcgcttccacaaccagcaggatgctgaaaatgccttccaggagtttgtggagagccagagcacagacttctacgccaccggcatcaaccagctgatcagccgctggcagaagtgtgtggactgcaatggcagctactttgattag

SEQ ID NO: 169483 - DNA, 1098 bp, synthetic construct
  misc_feature 1..1098: note = Description of Artificial Sequence: Synthetic coding sequence
  source 1..1098: mol_type = other DNA
atgtttgctgaggccgccaagaccacccggccctgtggcatggccgagttcaaggagaagccagaggcccccacagagcagctggatgtggcctgtggccaggagaacctgcctgtgggcgcctggcccccaggggccgccccagcccccttccagtacaccccagaccacgtggtgggccctggagctgacatcgaccccacccagatcaccttccctggctgcatctgtgtgaagaccccctgcctgcccggcacctgcagctgcctgcggcacggggagaactatgatgacaacagctgcctgcgggacatcggcagcggcggcaagtatgcagagcctgtgtttgaatgtaatgtgctgtgccgctgcagcgaccactgcaggaacagagtggtgcagaagggcctgcagttccacttccaggtgttcaagacccacaagaagggctggggcctgcggaccctggagttcatccccaagggccgctttgtgtgtgaatatgctggggaggtgctgggcttcagcgaggtgcagaggcgcatccacctgcagaccaagagtgacagcaactacatcatcgccatccgggagcacgtgtacaacggccaggtgatggagacctttgtggaccccacctacatcggcaacatcggccgcttcctgaaccacagctgtgagcccaacctgctgatgatccctgtgagaattgacagcatggtgcccaagctggccctgtttgctgccaaggacatcgtgcctgaggaggagctgtcctatgactacagcggccgctacctgaacctgactgtgtctgaggacaaggagcggctggaccacggcaagctgaggaagccctgctactgtggggccaagagctgcacagccttcctgccctttgacagcagcctgtactgccctgtggagaagagcaacatcagctgtggaaatgagaaggagcccagcatgtgtggcagcgcccccagcgtcttccccagctgcaagaggctgaccctggaggtgtccctcttcagtgacaagcagctggccccaccctacagcggccggcagtggctggccagcttcaccagcgcctag

SEQ ID NO: 169484 - DNA, 516 bp, synthetic construct
  misc_feature 1..516: note = Description of Artificial Sequence: Synthetic coding sequence
  source 1..516: mol_type = other DNA
atgtttgctgaggccgccaagaccacccggccctgtggcatggccgagttcaaggagaagccagaggcccccacagagcagctggatgtggcctgtggccaggagaacctgcctgtgggcgcctggcccccaggggccgccccagcccccttccagtacaccccagaccacgtggtgggccctggagctgacatcgaccccacccagatcaccttccctggctgcatctgtgtgaagaccccctgcctgcccggcacctgcagctgcctgcggcacggggagaactatgatgacaacagctgcctgcgggacatcggcagcggcggcaagtatgcagagcctgtgtttgaatgtaatgtgctgtgccgctgcagcgaccactgcaggaacagagtggtgcagaagggcctgcagttccacttccaggtgttcaagacccacaagaagggctggggcctgcggaccctggagttcatccccaagggcaggaaggtggagcaccagctgtggaagtag

SEQ ID NO: 169485 - DNA, 1101 bp, synthetic construct
  misc_feature 1..1101: note = Description of Artificial Sequence: Synthetic coding sequence
  source 1..1101: mol_type = other DNA
atggacagtgatgatgagatggtggaggaggccgtggagggccacctggatgatgatggcctgccccacggcttctgcaccgtgacctacagcagcacagacagatttgagggcaactttgtgcacggggagaagaatggccggggcaagttcttcttctttgatggcagcaccctggagggctactacgtggatgatgccctgcagggccagggcgtgtacacctatgaagatggcggcgtgctgcagggcacctacgtggatggagagctgaatggacctgcccaggagtatgacacagatggccgcctcatcttcaagggccagtacaaggacaacatcagacatggagtgtgctggatctactacccagatggcggcagcctggtgggggaggtgaatgaagatggagagatgaccggggagaagatcgcctacgtgtacccagatgagaggacagccctgtatggcaagttcattgatggagagatgattgagggcaagctggccaccctgatgagcacagaggagggccggccccactttgagctgatgcctggcaacagcgtgtaccactttgacaagagcaccagcagctgcatcagcaccaatgccctgctgcctgacccctatgaaagtgagcgggtgtatgtggccgagagcctcatcagcagcgctggggagggcctcttcagcaaggtggccgtgggccccaacacagtgatgtccttctacaacggggtgcgcatcacccaccaggaggtggacagccgggactgggccctgaatggaaacaccctgagcctggatgaggagaccgtgattgatgtgcctgagccctacaaccacgtgtccaagtactgtgccagcctgggccacaaggccaaccacagcttcacccccaactgcatctatgacatgtttgtgcaccccaggtttggccccatcaagtgcatccgcaccctgcgggctgtggaggctgatgaggagctgactgtggcctacggctatgaccacagccccccaggcaagagcggccctgaggcccctgagtggtaccaggtggagctgaaggccttccaggccacccagcagaagtag

SEQ ID NO: 169486 - DNA, 5124 bp, synthetic construct
  misc_feature 1..5124: note = Description of Artificial Sequence: Synthetic coding sequence
  source 1..5124: mol_type = other DNA
atggaccaggagggcggcggagatggccagaaggcccccagcttccagtggaggaactacaagctgattgtggaccctgccctggaccctgccctgcggcggcccagccagaaggtgtaccgctatgatggagtgcacttctctgtgaatgacagcaagtacatccctgtggaggacctgcaggacccccgctgccacgtgcgcagcaagaacagagacttcagcctgcctgtgcccaagttcaagctggatgagttctacatcggccagatccccctgaaggaggtgacctttgcccggctgaatgacaacgtgcgggagaccttcctgaaggacatgtgcaggaaatatggagaggtggaggaggtggagatcctgctgcaccccaggaccaggaagcacctgggcctggcccgggtgctcttcaccagcaccaggggggccaaggagaccgtgaagaacctgcacctgacctctgtgatgggcaacatcatccacgcccagctggacatcaagggccagcagaggatgaagtactatgagctgattgtgaatggcagctacaccccccagacagtgcccactggaggcaaggccctgtctgagaagttccagggcagcggggccgccacagaaacagctgagagcagaagaagaagcagcagtgacacagctgcctacccagctggcaccacagctgtgggcaccccaggaaatggcaccccctgcagccaggacaccagcttcagcagcagccggcaggacacccccagcagctttggccagttcaccccccagagcagccagggcaccccctacaccagccggggcagcaccccctacagccaggacagcgcctacagcagcagcaccaccagcaccagcttcaagcccaggagaagtgagaacagctaccaggatgccttcagcagaagacacttcagcgccagcagcgccagcaccacagccagcacagccatcgccgccaccacagctgccacagccagcagcagcgccagcagcagcagcctgagcagcagcagcagcagcagcagcagcagcagcagcagccagttccgcagcagtgatgccaactacccagcctactatgagagctggaaccgctaccagaggcacaccagctaccccccaagaagagccacccgggaggagcccccaggggccccctttgctgaaaatacagctgagcgcttcccccccagctacaccagctacctgcccccagagcccagccggcccacagaccaggactacagacctccagccagcgaggcccctcctcctgagcccccagagcccggcggcggcggcggcggcggcggccccagccctgagcgggaggaggtgaggaccagccccaggcctgccagccctgcccggagcggcagccctgcccctgagaccaccaatgaatctgtgccctttgcccagcacagcagcctggacagccgcatcgagatgctgctgaaggagcagaggagcaagttctccttcctggccagtgacacagaggaggaggaggagaacagctccatggtgctgggcgcccgggacaccggcagcgaggtgcccagcggcagcggccacggcccctgcaccccacctccagccccagccaactttgaagatgtggcccccaccggcagcggggagcccggggccacccgggagagccccaaggccaacggccagaaccaggccagcccctgcagcagtggagatgacatggagatcagtgatgatgacagaggaggcagccccccaccagcccccaccccaccccagcagcccccacctcctcctcctcctcctcctcctcctccaccctacctggccagcctgcccctgggctacccaccccaccagcctgcctacctgctgccccccaggccagatggccccccacctcctgagtacccacctcctcctcctcctccaccccacatctatgactttgtgaacagcctggagctgatggaccggctgggcgcccagtggggcggcatgcccatgtccttccagatgcagacccagatgctgacccggctgcaccagctgcggcagggcaagggcctgattgctgccagcgctggccccccaggaggagcctttggagaggccttcctgcccttccccccaccccaggaggccgcctacggcctgccctatgccctgtatgcccagggccaggagggccgcggggcctacagccgggaggcctaccacctgcccatgcccatggctgctgagcccctgcccagcagctctgtgtctggagaggaggcccggctgcccccccgggaggaggccgagctggccgagggcaagaccctgcccacagctggcaccgtgggccgggtgctggccatgctggtgcaggagatgaagagcatcatgcagagggacctgaacaggaagatggtggagaatgtggccttcggggcctttgaccagtggtgggagagcaaggaggagaaggccaagcccttccagaatgctgccaagcagcaggccaaggaggaggacaaggagaagaccaagctgaaggagcccggcctgctgagcctggtggactgggccaagagcggcggcaccactggaattgaggcctttgccttcggcagcggcctgcggggggccctgcggctgcccagcttcaaggtgaagaggaaggagcccagcgagatcagcgaggccagcgaggagaagaggccccggcccagcaccccagctgaggaggatgaagatgatcctgagcaggagaaggaggccggggagcccggccggcccggcaccaagccacccaagagagatgaggagcggggcaagacccagggcaagcacaggaagagctttgccctggacagcgagggggaggaggccagccaggagagcagcagcgagaaggatgaagaagatgatgaagaagatgaggaggatgaggaccgggaggaggccgtggacaccaccaagaaggagacagaggtgtctgatggagaagatgaggagagtgacagcagcagcaagtgcagcctgtatgctgacagtgatggagaaaatgacagcaccagtgacagcgagagcagcagcagcagcagcagcagcagcagcagcagcagcagcagcagcagcagcagcagcagcagcagcagcgagagcagcagtgaagatgaggaggaggaggagaggcctgctgccctgcccagcgccagccccccaccccgggaggtgcctgtgcccaccccagcccctgtggaggtgcctgtgcctgagcgggtggccggcagccctgtgacccccctgcctgagcaggaggccagccctgcccggcctgctggccccacagaggagagcccccccagcgcccccctgcggcccccagagcccccagctggccccccagccccagcccccaggccagatgagcggcccagcagccccatccccctgctgcccccacccaagaagaggaggaagacagtgtccttcagcgccatcgaggtggtgcctgcccctgagcccccaccagccaccccaccccaggccaagtttcctggccctgccagcaggaaggccccccggggcgtggagaggaccatccggaacctgcccctggaccacgccagcctggtgaagtcctggccagaggaggtgtcccggggcggccgcagcagagctgggggccggggccgcctgacagaggaggaggaggccgagcctggaacagaggtggacctggccgtgctggccgacctggccctgaccccagcccggcggggcctgcctgccctgcctgctgtggaggacagcgaggccacagagaccagtgatgaggccgagcggccccggcccctgctgagccacatcctgctggagcacaactatgccctggccgtgaagcccaccccaccagccccagccctgcggcccccagagcctgtgcctgccccagctgccctcttcagcagccctgcagatgaggtgctggaggcccctgaggtggtggtggccgaggccgaggagcccaagccccagcagctgcagcagcagcgggaggagggggaggaggagggggaggaggagggggaggaggaggaggaggagagcagtgacagcagcagcagcagtgatggagagggcgccctgcggcggcgcagcctgcggagccacgccaggagaagaagacctcctcctcctcctcctcctcctccaccccgggcctatgagcccaggagtgaatttgagcagatgaccatcctgtatgacatctggaacagcggcctggacagcgaggacatgagctacctgcggctgacctatgagcggctgctgcagcagaccagcggggctgactggctgaatgacacccactgggtgcaccacaccatcaccaacctgaccacccccaagaggaagaggcggccccaggacggcccccgggagcaccagacaggcagcgcccggtctgagggctactaccccatcagcaagaaggagaaggacaagtacctggatgtgtgccctgtgtctgcccggcagctggagggcgtggacacccagggcaccaacagagtgctgtctgagcggcgctctgagcagaggcggctgctgagcgccatcggcaccagcgccatcatggacagcgacctgctgaagctgaaccagctgaagttcaggaagaagaagctgcgcttcggccgcagccgcatccacgagtggggcctgtttgccatggagcccatcgccgcagatgagatggtgattgaatatgtgggccagaacatccggcagatggtggccgacatgagggagaagcgctacgtgcaggagggcatcggcagcagctacctgttccgggtggaccatgacaccatcattgatgccaccaagtgtggcaacctggcccgcttcatcaaccactgctgcacccccaactgctacgccaaggtgatcaccatcgagagccagaagaagatcgtcatctacagcaagcagcccatcggcgtggatgaggagatcacctatgactacaagttccccctggaggacaacaagatcccctgcctgtgtggcacagagagctgccggggcagcctgaactag

SEQ ID NO: 169487 - DNA, 213 bp, synthetic construct
  misc_feature 1..213: note = Description of Artificial Sequence: Synthetic coding sequence
  source 1..213: mol_type = other DNA
atggaccaggagggcggcggagatggccagaaggcccccagcttccagtggaggaactacaagctgattgtggaccctgccctggaccctgccctgcggcggcccagccagaaggtgtaccgctatgatggagtgcacttctctgtgaatgacagcaagtacatccctgtggaggacctgcaggacccccgctgccacgtgcgcagcaagtag

SEQ ID NO: 169488 - DNA, 744 bp, synthetic construct
  misc_feature 1..744: note = Description of Artificial Sequence: Synthetic coding sequence
  source 1..744: mol_type = other DNA
atggaccaggagggcggcggagatggccagaaggcccccagcttccagtggaggaactacaagctgattgtggaccctgccctggaccctgccctgcggcggcccagccagaaggtgtaccgctatgatggagtgcacttctctgtgaatgacagcaagtacatccctgtggaggacctgcaggacccccgctgccacgtgcgcagcaagaacagagacttcagcctgcctgtgcccaagttcaagctggatgagttctacatcggccagatccccctgaaggaggtgacctttgcccggctgaatgacaacgtgcgggagaccttcctgaaggacatgtgcaggaaatatggagaggtggaggaggtggagatcctgctgcaccccaggaccaggaagcacctgggcctggcccgggtgctcttcaccagcaccaggggggccaaggagaccgtgaagaacctgcacctgacctctgtgatgggcaacatcatccacgcccagctggacatcaagggccagcagaggatgaagtactatgagctgattgtgaatggcagctacaccccccagacagtgcccactggaggcaaggccctgtctgagaagttccagggcagcggggccgccacagaaacagctgagagcagaagaagaagcagcagtgacacagctgcctacccagctggcaccacagctgtgggcaccccaggaaatggcaccccctgcagccaggacacctag

SEQ ID NO: 169489 - DNA, 5772 bp, synthetic construct
  misc_feature 1..5772: note = Description of Artificial Sequence: Synthetic coding sequence
  source 1..5772: mol_type = other DNA
atggagaacagccaccccccccaccaccaccaccagcagcccccaccccagcccggccccagcggggagaggaggaaccaccactggaggagctacaagctgatgattgatcctgccctgaagaagggccaccacaagctgtaccgctatgatggccagcacttcagcctggccatgagcagcaacagacctgtggagatcgtggaggacccccgggtggtgggcatctggaccaagaacaaggagctggagctgtctgtgcccaagttcaagattgatgagttctacgtgggccctgtgccccccaagcaggtgacctttgccaagctgaatgacaacatccgggagaacttcctgcgggacatgtgcaagaagtacggggaggtggaggaggtggagatcctgtacaaccccaagaccaagaagcacctgggcatcgccaaggtggtgtttgccaccgtgcggggggccaaggatgctgtgcagcacctgcacagcacctctgtgatgggcaacatcatccacgtggagctggacaccaagggggagaccaggatgaggttctatgagctgctggtgacaggccgctacaccccccagaccctgcctgtgggggagctggatgctgtgagccccatcgtgaatgagaccctgcagctgagtgatgccctgaagaggctgaaggatggcggcctgtctgctggctgcggcagcggcagcagctctgtgacccccaacagcggcggcacccccttcagccaggacacagcctacagcagctgccgcctggacacccccaacagctatggccagggcacccccctgaccccccggctgggcacccccttcagccaggacagcagctacagcagccggcagcccacccccagctacctgttcagccaggaccctgctgtgaccttcaaggccaggagacatgagagcaagttcacagatgcctacaacagaagacatgagcaccactacgtgcacaacagccctgctgtgacagctgtggccggggccacagctgccttccggggcagcagtgacctgccctttggagctgtgggcggcaccggcggcagcagcggcccccccttcaaggcccagccccaggacagcgccacctttgcccacaccccacctccagcccaggccaccccagcccctggcttcaagagcgccttcagcccctaccagacccctgtggcccacttccccccacctcctgaggagcccacagccacagctgccttcggggcccgggacagcggggagttcagaagagccccagcccccccacccctgcccccagctgagcccctggccaaggagaagccaggcaccccacctggccccccacctccagacaccaacagcatggagctgggcggccggcccaccttcggctggagccctgagccctgtgacagccctggcacccccaccctggagagcagccctgctggccctgagaagccccatgacagcctggacagcagaattgagatgctgctgaaggagcagaggaccaagctgctcttcctgcgggagccagacagcgacacagagctgcagatggagggcagccccatcagcagcagcagcagccagctgagccccctggcccccttcggcaccaacagccagcccggcttccggggccccaccccacccagcagccggcccagcagcacaggcctggaggacatcagccccacccccctgcctgacagtgatgaagatgaggagctggacctgggcctgggcccccggcccccacctgagcccggccccccagaccctgctggcctgctgagccagacagctgaggtggccctggacctggtgggggacaggacccccaccagcgagaagatggatgagggccagcagagcagtggagaggacatggagatcagtgatgatgagatgcccagcgcccccatcaccagcgctgactgccccaagcccatggtggtgaccccaggagctgctgctgtggccgcccccagcgtgctggcccccaccctgcccctgcccccacctcctggcttcccccccctgcccccacctcctcctcctcctccaccccagcccggcttccccatgcccccacccctgcccccacctcctcctcctcctcctccagcccaccctgctgtgacagtgcccccaccacccctgcctgcccctcctggggtgcccccaccacccatcctgccccccctgccccccttccccccaggcctcttccctgtgatgcaggtggacatgagccacgtgctgggcggccagtggggcggcatgcccatgtccttccagatgcagacccaggtgctgagccggctgatgacaggccagggcgcctgcccctacccacccttcatggctgctgctgctgctgctgccagcgctggcctgcagtttgtgaacctgcccccctaccggggccccttcagcctgagcaacagcggccctggccggggccagcactggccacccctgcccaagtttgaccccagcgtgcccccacctggctacatgccccggcaggaggacccccacaaggccaccgtggatggagtgctgctggtggtgctgaaggagctgaaggccatcatgaagagggacctgaacaggaagatggtggaggtggtggccttccgggcctttgatgagtggtgggacaagaaggagaggatggccaaggccagcctgacccctgtgaagtctggagagcacaaggatgaagatcggcccaagcccaaggaccgcatcgccagctgcctgctggagagctggggcaagggggagggcctgggctatgagggcctgggcctgggcatcggcctgcggggggccatccggctgcccagcttcaaggtgaagaggaaggagcccccagacaccaccagcagcggggaccagaagaggctgcggcccagcacctctgtggatgaggaggatgaggagagcgagcgggagcgggaccgggacatggctgacaccccctgtgagctggccaagagggaccccaagggcgtgggcgtgagaagaagacctgcccggcccctggagctggacagcggcggggaggaggatgagaaggagagcctgtctgaggagcaggagagcacagaggaggaggaggaggccgaggaggaggaggaggaggaggatgatgatgatgatgacagtgatgacagagatgaaagtgaaaatgatgatgaggacacagccctgtctgaggccagcgagaaggatgaaggagacagtgatgaggaggagaccgtgtccatcgtgaccagcaaggccgaggccaccagcagcagcgagagcagcgagagcagcgagtttgagagcagcagcgagagcagccccagcagcagtgaagatgaggaggaggtggtggcccgggaggaggaggaggaggaggaggaggaggagatggtggccgaggagagcatggccagcgctggccctgaggactttgagcaggatggagaggaggccgccctggcccctggggccccagctgtggacagcctgggcatggaggaggaggtggacattgaaacagaagctgtggcccctgaggagcggcccagcatgctggatgagccccccctgcctgtgggcgtggaggagcctgctgacagccgggagcccccagaggagcccggcctgagccaggagggcgccatgctgctgagccctgagcccccagccaaggaggtggaggcccggccccccctgagccctgagcgggcccctgagcatgacctggaggtggagcctgagccccccatgatgctgcccctgcccctgcagccccccctgcccccacccaggcctccccggccccccagccccccacctgagcctgagaccacagatgccagccaccccagcgtgcccccagagcccctggccgaggaccaccccccccacaccccaggcctgtgtggcagcctggccaagagccagagcacagaaacagtgcctgccaccccaggaggagagccccccctgagcggcggcagcagcggcctgagcctgagcagcccccaggtgcccggcagccccttctcctacccagcccccagccccagcctgagcagcggcggcctgcccaggaccccaggccgggacttctccttcacccccaccttcagcgagcccagcggccccctgctgctgcctgtgtgccccctgcccactggaagaagagatgagaggagcggccccctggccagccctgtgctgctggagaccggcctgcccctgcccctgcccctgcccctgcccctgcccctggccctgcctgctgtgctgcgggcccaggcccgggcccccacccccctgccccccctgctgcctgcccccctggccagctgccccccacccatgaagaggaagccaggccggccccggcgcagccccccatccatgctgagcctggatggccccctggtgcggcccccagctggggccgccctgggccgggagctgctgctgctgcccggccagccccagacccctgtgttccccagcacccatgaccccaggacagtgaccctggacttcagaaatgccggcatcccagcccctcctccacccctgcccccccagcccccacctcctcctcctcctcctcctgtggagcccaccaagctgcccttcaaggagctggacaaccagtggcccagcgaggccatccccccaggcccccggggcagagatgaggtgacagaggagtacatggagctggccaagagccggggcccctggaggcggccccccaagaagagacatgaggacctggtgcccccagctggcagccctgagctgagccccccccagcccctcttccggcccaggagtgaatttgaggagatgaccatcctgtatgacatctggaatggaggcattgatgaggaggacatccgcttcctgtgtgtgacctatgaaaggctgctgcagcaggacaatggcatggactggctgaatgacaccctgtgggtgtaccaccccagcaccagcctgagcagcgccaagaagaagaagagagatgatggcatccgggagcacgtgacaggctgtgcccggtctgagggcttctacaccatcgacaagaaggacaagctgcgctacctgaacagcagccgggccagcacagatgagcccccagctgacacccagggcatgagcatcccagcccagccccacgccagcacccgggccggcagcgagcggcgctctgagcagaggcggctgctgagcagcttcaccggcagctgtgacagcgacctgctgaagttcaaccagctgaagttcaggaagaagaagctgaagttctgcaagagccacatccatgactggggcctgtttgccatggagcccatcgccgcagatgagatggtgattgaatatgtgggccagaacatccggcaggtgattgctgacatgagggagaagagatatgaagatgagggcatcggcagcagctacatgttccgggtggaccatgacaccatcattgatgccaccaagtgtggcaactttgcccgcttcatcaaccacagctgcaaccccaactgctacgccaaggtgatcaccgtggagagccagaagaagatcgtcatctacagcaagcagcacatcaacgtgaatgaggagatcacctatgactacaagttccccattgaagatgtgaagatcccctgcctgtgtggcagcgagaactgccggggcaccctgaactag

SEQ ID NO: 169490 - DNA, 5772 bp, synthetic construct; identical to SEQ ID NO: 169489
  misc_feature 1..5772: note = Description of Artificial Sequence: Synthetic coding sequence
  source 1..5772: mol_type = other DNA

SEQ ID NO: 169491 - DNA, 7695 bp, synthetic construct
  misc_feature 1..7695: note = Description of Artificial Sequence: Synthetic coding sequence
  source 1..7695: mol_type = other DNA
atgaagcagctgcagccccagcccccacccaagatgggagacttctatgaccctgagcaccccaccccagaggaggaggagaatgaggccaagattgaaaatgtgcagaagacaggcttcatcaagggccccatgtttaaaggagtggccagcagccgcttcctgcccaagggcaccaagaccaaggtgaacctggaggagcagggccggcagaaggtgtccttctccttcagcctgaccaagaagaccctgcagaaccgcttcctgacagccctgggcaatgagaagcagagcgacacccccaaccccccagctgtgcccctgcaggtggacagcacccccaagatgaagatggagatcggggacaccctgagcacagctgaggagagcagcccccccaagagccgggtggagctgggcaagatccacttcaagaagcacctgctgcacgtgaccagccggcccctgctggccaccaccacagctgtggccagcccccccacccacgccgcccccctgcctgctgtgattgctgagagcaccaccgtggacagcccccccagcagccccccacctcctcctcctccagcccaggccaccaccctgagcagccctgcccctgtgacagagcctgtggccctgccccacacccccatcaccgtgctgatggccgcccctgtgcccctgcctgtggatgtggccgtgcgcagcctgaaggagccccccatcatcatcgtgcctgagagcctggaggccgacaccaagcaggacaccatcagcaacagcctggaggagcacgtgacccagatcctgaatgagcaggccgacatcagcagcaagaaggaggacagccacatcggcaaggatgaggagatcccagacagcagcaagatcagcctgagctgcaagaagacaggcagcaagaagaagagcagccagagcgagggcatcttcctgggcagcgagagtgatgaagattctgtgaggaccagcagcagccagaggagccatgacctgaagttcagcgccagcattgagaaggagcgggacttcaagaagagcagcgcccccctgaagtctgaggacctgggcaagcccagccgcagcaagacagacagagatgacaagtacttctcctacagcaagctggagcgggacaccaggtatgtgagcagccgctgccgctctgagcgggagaggagaagaagccgcagccacagccgctctgagcggggcagcaggaccaacctgagctacagccgctctgagaggagccactactatgacagcgaccggcgctaccacaggagcagcccctaccgggagaggacccgctacagccggccctacacagacaacagagcccgggagagcagtgacagcgaggaggagtacaagaagacctacagcaggaggaccagcagccacagcagcagctacagagacctgcggaccagcagctacagcaagagtgaccgggactgcaagacagagaccagctacctggagatggagcggcggggcaagtacagcagcaagctggagcgggagagcaagaggaccagtgaaaatgaggccatcaagcgctgctgcagccccccaaatgagctgggcttccggcggggcagcagctacagcaagcatgacagcagcgccagccgctacaagagcaccctgagcaagcccatccccaagagtgacaagttcaagaacagcttctgctgcacagagctgaatgaggagatcaagcagagccacagcttcagcctgcagaccccctgcagcaagggcagcgagctgaggatgatcaacaagaaccctgagcgggagaaggccggcagccctgcccccagcaaccggctgaatgacagccccaccctgaagaagctggatgagctgcccatcttcaagtctgagttcatcacccatgacagccatgacagcatcaaggagctggacagcctgagcaaggtgaagaatgaccagctgcgctccttctgccccatcgagctgaacatcaatggcagccctggagctgagagtgacctggccaccttctgcaccagcaagacagatgctgtgctgatgaccagtgatgattctgtgactggaagtgagctgagccccctggtgaaggcctgcatgctgagcagcaatggcttccagaacatcagccgctgcaaggagaaggacctggatgacacctgcatgctgcacaagaagtctgagagccccttccgggagacagagcccctggtgagcccccaccaggacaagctgatgtccatgcctgtgatgacagtggactacagcaagacagtggtgaaggagcctgtggacaccagggtgtcctgctgcaagaccaaggacagcgacatctactgcaccctgaatgacagcaaccccagcctgtgcaacagcgaggccgagaacatcgagcccagcgtgatgaagatcagcagcaacagcttcatgaatgtgcacctggagagcaagcctgtgatctgtgacagcaggaacctgacagaccacagcaagtttgcctgtgaggagtacaagcagagcatcggcagcaccagcagcgcctctgtgaaccactttgatgacctgtaccagcccatcggcagcagcggcatcgccagcagcctgcagagcctgcccccaggcatcaaggtggacagcctgaccctgctgaagtgtggggagaacaccagccctgtgctggatgctgtgctgaagagcaagaagagcagcgagttcctgaagcacgccggcaaggagaccatcgtggaggtgggcagtgacctgcctgattctggaaaaggatttgccagcagagaaaatagaagaaacaacggcctgagcggcaagtgcctgcaggaggcccaggaggagggcaacagcatcctgcctgagcggcggggccggcctgagatcagcctggatgagcggggggagggcggccacgtgcacaccagtgatgacagcgaggtggtgttcagcagctgtgacctgaacctgaccatggaggacagtgatggagtgacctacgccctgaagtgtgacagcagcggccacgcccctgagatcgtgtccacagtgcatgaggactacagcggcagcagcgagagcagcaatgatgaaagtgacagcgaggacacagacagtgatgacagcagcatccccaggaaccggctgcagagcgtggtggtggtgcccaagaacagcaccctgcccatggaggagaccagcccctgcagcagccgcagcagccagagctaccgccactacagcgaccactgggaggatgagcggctggagagcagaagacacctgtatgaggagaagtttgagagcatcgccagcaaggcctgcccccagacagacaagttcttcctgcacaagggcacagagaagaaccctgagatctccttcacccagagcagcaggaagcagattgacaaccggctgcctgagctgagccacccccagagtgatggagtggacagcaccagccacacagatgtgaagagtgaccccctgggccaccccaacagcgaggagaccgtgaaggccaagatccccagccggcagcaggaggagctgcccatctacagcagtgactttgaagatgtgcccaacaagtcctggcagcagaccaccttccagaacagaccagacagccggctgggcaagacagagctgtccttcagcagcagctgtgagatcccccacgtggatggcctgcacagcagcgaggagctgaggaacctgggctgggacttcagccaggagaagcccagcaccacctaccagcagcctgacagcagctatggagcctgtggcggccacaagtaccagcagaatgctgagcagtatggaggcacccgggactactggcagggcaatggctactgggaccccaggagcggccggcccccaggcaccggggtggtgtatgacaggacccagggccaggtgcctgacagcctgacagatgaccgggaggaggaggagaactgggaccagcaggacggcagccacttcagtgaccagagcgacaagttcctgctgagcctgcagaaggacaagggctctgtgcaggcccctgagatcagcagcaacagcatcaaggacaccctggccgtgaatgagaagaaggacttcagcaagaacctggagaagaatgacatcaaggaccggggccccctgaagaagaggcggcaggagattgaaagtgacagcgagagtgatggagagctgcaggacaggaagaaggtgcgggtggaggtggagcagggcgagacctctgtgcccccaggcagcgccctggtgggccccagctgtgtgatggatgacttccgggacccccagcgctggaaggaatgtgccaagcagggcaagatgccctgctactttgacctgattgaggagaatgtgtacctgacagagaggaagaagaacaagagccaccgggacatcaagaggatgcagtgtgagtgcacccccctgagcaaggatgagcgggcccagggcgagatcgcctgtggggaggactgcctgaaccggctgctgatgattgagtgcagcagccgctgccccaatggagactactgcagcaacagacgcttccagaggaagcagcacgcagatgtggaggtgatcctgacagagaagaagggctggggcctgcgggccgccaaggacctgcccagcaacacctttgtgctggagtactgtggggaggtgctggaccacaaggagttcaaggcccgggtgaaggagtatgccaggaacaagaacatccactactacttcatggccctgaagaatgatgagatcattgatgccacccagaagggcaactgcagccgcttcatgaaccacagctgtgagcccaactgtgagacccagaagtggacagtgaatggccagctgcgggtgggcttcttcaccaccaagctggtgcccagcggcagcgagctgacctttgactaccagttccagagatatggcaaggaggcccagaagtgcttctgtggcagcgccaactgccggggctacctgggcggggagaacagagtgtccatccgggccgccggcggcaagatgaagaaggagaggagcaggaagaaggacagcgtggatggagagctggaggccctgatggagaatggagagggcctgagtgacaagaaccaggtgctgagcctgagccggctgatggtgagaattgagaccctggagcagaagctgacctgcctggagctgatccagaacacccacagccagagctgcctgaagagcttcctggagcggcacggcctgagcctgctgtggatctggatggccgagctgggagatggccgggagagcaaccagaagctgcaggaggagatcatcaagaccctggagcacctgcccatccccaccaagaacatgctggaggagagcaaggtgctgcccatcatccagcgctggagccagaccaagacagctgtgccccccctgtctgaaggagatggctacagcagcgagaacaccagccgggcccacacccccctgaacaccccagaccccagcaccaagctgagcacagaggccgacacagacacccccaagaagctgatgttccggcggctgaagatcatcagcgagaacagcatggattctgccatcagtgatgccaccagcgagctggagggcaaggatggcaaggaggacctggaccagctggagaatgtgcctgtggaggaggaggaggagctgcagagccagcagctgctgccccagcagctgcctgagtgcaaggtggacagcgagaccaacatcgaggccagcaagctgcccaccagcgagcctgaggctgatgctgagattgagcccaaggagagcaatggcaccaagctggaggagcccatcaatgaggagacccccagccaggatgaggaggagggcgtgtctgatgtggagagcgagaggagccaggagcagcctgacaagacagtggacatcagtgacctggccaccaagctgctggacagctggaaggacctgaaggaggtgtaccgcatccccaagaagagccagacagagaaggagaacaccaccacagagcggggcagagatgctgtgggcttccgggaccagaccccagcccccaagacccccaacagaagccgggagcgggaccctgacaagcagacccagaacaaggagaagaggaagagaagaagcagcctgagcccccccagcagcgcctatgaaagaggcaccaagaggccagatgacagatatgacacccccaccagcaagaagaaggtgcgcatcaaggacaggaacaagctgagcacagaggagaggaggaagctgtttgagcaggaggtggcccagcgggaggcccagaagcagcagcagcagatgcagaacctgggcatgaccagccccctgccctatgacagcctgggctacaatgccccccaccacccctttgctggctacccacctggctaccccatgcaggcctacgtggaccccagcaaccccaatgctgggaaggtgctgctgcccacccccagcatggaccctgtgtgcagccctgccccctatgaccacgcccagcccctggtgggccacagcacagagcccctgagcgcccctcctcctgtgcctgtggtgccccacgtggccgcccctgtggaggtgagcagcagccagtatgtggcccagagtgatggagtggtgcaccaggacagctctgtggccgtgctgcctgtgcctgcccctggccctgtgcagggccagaactacagcgtgtgggacagcaaccagcagagcgtgtctgtgcagcagcagtacagccctgcccagagccaggccaccatctactaccagggccagacctgccccaccgtgtatggagtgaccagcccctacagccagaccaccccacccatcgtgcagagctatgcccagcccagcctgcagtacatccagggccagcagatcttcaccgcccacccccagggcgtggtggtgcagcctgctgctgctgtgaccaccatcgtggcccctggccagccccagcccctgcagcccagcgagatggtggtgaccaacaacctgctggacctgcccccacccagcccccccaagcccaagaccatcgtgctgccccccaactggaagacagcccgggaccctgagggcaagatctactactaccacgtgatcacccggcagacccagtgggacccccccacctgggagagccctggagatgatgccagcctggagcatgaagctgagatggacctgggcacccccacctatgatgagaaccccatgaaggccagcaagaagcccaagacagctgaggccgacaccagcagcgagctggccaagaagagcaaggaggtgttcaggaaggagatgagccagttcatcgtgcagtgcctgaacccctacaggaagccagactgcaaggtgggccgcatcaccaccacagaggacttcaagcacctggccaggaagctgacccacggcgtgatgaacaaggagctgaagtactgcaagaaccctgaggacctggagtgcaatgaaaatgtgaagcacaagaccaaggagtacatcaagaagtacatgcagaagtttggagctgtgtacaagcccaaggaggacacagagctggagtag

SEQ ID NO: 169492 - DNA, 7695 bp, synthetic construct
  misc_feature 1..7695: note = Description of Artificial Sequence: Synthetic coding sequence
  source 1..7695: mol_type = other DNA
atgaagcagctgcagccccagcccccacccaagatgggagacttctatgaccctgagcaccccaccccagaggagcaggagcctgaggccaagattgaaaatgtgcagaagacaggcttcatcaagggccccatgtttaaaggagtggccagcagccgcttcctgcccaagggcaccaagaccaaggtgaacctggaggagcagggccggcagaaggtgtccttctccttcagcctgaccaagaagaccctgcagaaccgcttcctgacagccctgggcaatgagaagcagagcgacacccccaaccccccagctgtgcccctgcaggtggacagcacccccaagatgaagatggagatcggggacaccctgagcacagctgaggagagcagcccccccaagagccgggtggagctgggcaagatccacttcaagaagcacctgctgcacgtgaccagccggcccctgctggccaccaccacagctgtggccagcccccccacccacgccgcccccctgcctgctgtgattgctgagagcaccaccgtggacagcccccccagcagccccccacctcctcctcctccagcccaggccaccaccctgagcagccctgcccctgtgacagagcctgtggccctgccccacacccccatcaccgtgctgatggccgcccctgtgcccctgcctgtggatgtggccgtgcgcagcctgaaggagccccccatcatcatcgtgcctgagagcctggaggccgacaccaagcaggacaccatcagcaacagcctggaggagcacgtgacccagatcctgaatgagcaggccgacatcagcagcaagaaggaggacagccacatcggcaaggatgaggagatcccagacagcagcaagatcagcctgagctgcaagaagacaggcagcaagaagaagagcagccagagcgagggcatcttcctgggcagcgagagtgatgaagattctgtgaggaccagcagcagccagaggagccatgacctgaagttcagcgccagcattgagaaggagcgggacttcaagaagagcagcgcccccctgaagtctgaggacctgggcaagcccagccgcagcaagacagacagagatgacaagtacttctcctacagcaagctggagcgggacaccaggtatgtgagcagccgctgccgctctgagcgggagaggagaagaagccgcagccacagccgctctgagcggggcagcaggaccaacctgagctacagccgctctgagaggagccactactatgacagcgaccggcgctaccacaggagcagcccctaccgggagaggacccgctacagccggccctacacagacaacagagcccgggagagcagtgacagcgaggaggagtacaagaagacctacagcaggaggaccagcagccacagcagcagctacagagacctgcggaccagcagctacagcaagagtgaccgggactgcaagacagagaccagctacctggagatggagcggcggggcaagtacagcagcaagctggagcgggagagcaagaggaccagtgaaaatgaggccatcaagcgctgctgcagccccccaaatgagctgggcttccggcggggcagcagctacagcaagcatgacagcagcgccagccgctacaagagcaccctgagcaagcccatccccaagagtgacaagttcaagaacagcttctgctgcacagagctgaatgaggagatcaagcagagccacagcttcagcctgcagaccccctgcagcaagggcagcgagctgaggatgatcaacaagaaccctgagcgggagaaggccggcagccctgcccccagcaaccggctgaatgacagccccaccctgaagaagctggatgagctgcccatcttcaagtctgagttcatcacccatgacagccatgacagcatcaaggagctggacagcctgagcaaggtgaagaatgaccagctgcgctccttctgccccatcgagctgaacatcaatggcagccctggagctgagagtgacctggccaccttctgcaccagcaagacagatgctgtgctgatgaccagtgatgattctgtgactggaagtgagctgagccccctggtgaaggcctgcatgctgagcagcaatggcttccagaacatcagccgctgcaaggagaaggacctggatgacacctgcatgctgcacaagaagtctgagagccccttccgggagacagagcccctggtgagcccccaccaggacaagctgatgtccatgcctgtgatgacagtggactacagcaagacagtggtgaaggagcctgtggacaccagggtgtcctgctgcaagaccaaggacagcgacatctactgcaccctgaatgacagcaaccccagcctgtgcaacagcgaggccgagaacatcgagcccagcgtgatgaagatcagcagcaacagcttcatgaatgtgcacctggagagcaagcctgtgatctgtgacagcaggaacctgacagaccacagcaagtttgcctgtgaggagtacaagcagagcatcggcagcaccagcagcgcctctgtgaaccactttgatgacctgtaccagcccatcggcagcagcggcatcgccagcagcctgcagagcctgcccccaggcatcaaggtggacagcctgaccctgctgaagtgtggggagaacaccagccctgtgctggatgctgtgctgaagagcaagaagagcagcgagttcctgaagcacgccggcaaggagaccatcgtggaggtgggcagtgacctgcctgattctggaaaaggatttgccagcagagaaaatagaagaaacaacggcctgagcggcaagtgcctgcaggaggcccaggaggagggcaacagcatcctgcctgagcggcggggccggcctgagatcagcctggatgagcggggggagggcggccacgtgcacaccagtgatgacagcgaggtggtgttcagcagctgtgacctgaacctgaccatggaggacagtgatggagtgacctacgccctgaagtgtgacagcagcggccacgcccctgagatcgtgtccacagtgcatgaggactacagcggcagcagcgagagcagcaatgatgaaagtgacagcgaggacacagacagtgatgacagcagcatccccaggaaccggctgcagagcgtggtggtggtgcccaagaacagcaccctgcccatggaggagaccagcccctgcagcagccgcagcagccagagctaccgccactacagcgaccactgggaggatgagcggctggagagcagaagacacctgtatgaggagaagtttgagagcatcgccagcaaggcctgcccccagacagacaagttcttcctgcacaagggcacagagaagaaccctgagatctccttcacccagagcagcaggaagcagattgacaaccggctgcctgagctgagccacccccagagtgatggagtggacagcaccagccacacagatgtgaagagtgaccccctgggccaccccaacagcgaggagaccgtgaaggccaagatccccagccggcagcaggaggagctgcccatctacagcagtgactttgaagatgtgcccaacaagtcctggcagcagaccaccttccagaacagaccagacagccggctgggcaagacagagctgtccttcagcagcagctgtgagatcccccacgtggatggcctgcacagcagcgaggagctgaggaacctgggctgggacttcagccaggagaagcccagcaccacctaccagcagcctgacagcagctatggagcctgtggcggccacaagtaccagcagaatgctgagcagtatggaggcacccgggactactggcagggcaatggctactgggaccccaggagcggccggcccccaggcaccggggtggtgtatgacaggacccagggccaggtgcctgacagcctgacagatgaccgggaggaggaggagaactgggaccagcaggacggcagccacttcagtgaccagagcgacaagttcctgctgagcctgcagaaggacaagggctctgtgcaggcccctgagatcagcagcaacagcatcaaggacaccctggccgtgaatgagaagaaggacttcagcaagaacctggagaagaatgacatcaaggaccggggccccctgaagaagaggcggcaggagattgaaagtgacagcgagagtgatggagagctgcaggacaggaagaaggtgcgggtggaggtggagcagggcgagacctctgtgcccccaggcagcgccctggtgggccccagctgtgtgatggatgacttccgggacccccagcgctggaaggaatgtgccaagcagggcaagatgccctgctactttgacctgattgaggagaatgtgtacctgacagagaggaagaagaacaagagccaccgggacatcaagaggatgcagtgtgagtgcacccccctgagcaaggatgagcgggcccagggcgagatcgcctgtggggaggactgcctgaaccggctgctgatgattgagtgcagcagccgctgccccaatggagactactgcagcaacagacgcttccagaggaagcagcacgcagatgtggaggtgatcctgacagagaagaagggctggggcctgcgggccgccaaggacctgcccagcaacacctttgtgctggagtactgtggggaggtgctggaccacaaggagttcaaggcccgggtgaaggagtatgccaggaacaagaacatccactactacttcatggccctgaagaatgatgagatcattgatgccacccagaagggcaactgcagccgcttcatgaaccacagctgtgagcccaactgtgagacccagaagtggacagtgaatggccagctgcgggtgggcttcttcaccaccaagctggtgcccagcggcagcgagctgacctttgactaccagttccagagatatggcaaggaggcccagaagtgcttctgtggcagcgccaactgccggggctacctgggcggggagaacagagtgtccatccgggccgccggcggcaagatgaagaaggagaggagcaggaagaaggacagcgtggatggagagctggaggccctgatggagaatggagagggcctgagtgacaagaaccaggtgctgagcctgagccggctgatggtgagaattgagaccctggagcagaagctgacctgcctggagctgatccagaacacccacagccagagctgcctgaagagcttcctggagcggcacggcctgagcctgctgtggatctggatggccgagctgggagatggccgggagagcaaccagaagctgcaggaggagatcatcaagaccctggagcacctgcccatccccaccaagaacatgctggaggagagcaaggtgctgcccatcatccagcgctggagccagaccaagacagctgtgccccccctgtctgaaggagatggctacagcagcgagaacaccagccgggcccacacccccctgaacaccccagaccccagcaccaagctgagcacagaggccgacacagacacccccaagaagctgatgttccggcggctgaagatcatcagcgagaacagcatggattctgccatcagtgatgccaccagcgagctggagggcaaggatggcaaggaggacctggaccagctggagaatgtgcctgtggaggaggaggaggagctgcagagccagcagctgctgccccagcagctgcctgagtgcaaggtggacagcgagaccaacatcgaggccagcaagctgcccaccagcgagcctgaggctgatgctgagattgagcccaaggagagcaatggcaccaagctggaggagcccatcaatgaggagacccccagccaggatgaggaggagggcgtgtctgatgtggagagcgagaggagccaggagcagcctgacaagacagtggacatcagtgacctggccaccaagctgctggacagctggaaggacctgaaggaggtgtaccgcatccccaagaagagccagacagagaaggagaacaccaccacagagcggggcagagatgctgtgggcttccgggaccagaccccagcccccaagacccccaacagaagccgggagcgggaccctgacaagcagacccagaacaaggagaagaggaagagaagaagcagcctgagcccccccagcagcgcctatgaaagaggcaccaagaggccagatgacagatatgacacccccaccagcaagaagaaggtgcgcatcaaggacaggaacaagctgagcacagaggagaggaggaagctgtttgagcaggaggtggcccagcgggaggcccagaagcagcagcagcagatgcagaacctgggcatgaccagccccctgccctatgacagcctgggctacaatgccccccaccacccctttgctggctacccacctggctaccccatgcaggcctacgtggaccccagcaaccccaatgctgggaaggtgctgctgcccacccccagcatggaccctgtgtgcagccctgccccctatgaccacgcccagcccctggtgggccacagcacagagcccctgagcgcccctcctcctgtgcctgtggtgccccacgtggccgcccctgtggaggtgagcagcagccagtatgtggcccagagtgatggagtggtgcaccaggacagctctgtggccgtgctgcctgtgcctgcccctggccctgtgcagggccagaactacagcgtgtgggacagcaaccagcagagcgtgtctgtgcagcagcagtacagccctgcccagagccaggccaccatctactaccagggccagacctgccccaccgtgtatggagtgaccagcccctacagccagaccaccccacccatcgtgcagagctatgcccagcccagcctgcagtacatccagggccagcagatcttcaccgcccacccccagggcgtggtggtgcagcctgctgctgctgtgaccaccatcgtggcccctggccagccccagcccctgcagcccagcgagatggtggtgaccaacaacctgctggacctgcccccacccagcccccccaagcccaagaccatcgtgctgccccccaactggaagacagcccgggaccctgagggcaagatctactactaccacgtgatcacccggcagacccagtgggacccccccacctgggagagccctggagatgatgccagcctggagcatgaagctgagatggacctgggcacccccacctatgatgagaaccccatgaaggccagcaagaagcccaagacagctgaggccgacaccagcagcgagctggccaagaagagcaaggaggtgttcaggaaggagatgagccagttcatcgtgcagtgcctgaacccctacaggaagccagactgcaaggtgggccgcatcaccaccacagaggacttcaagcacctggccaggaagctgacccacggcgtgatgaacaaggagctgaagtactgcaagaaccctgaggacctggagtgcaatgaaaatgtgaagcacaagaccaaggagtacatcaagaagtacatgcagaagtttggagctgtgtacaagcccaaggaggacacagagctggagtag

SEQ ID NO: 169493 - DNA, 5145 bp, synthetic construct
  misc_feature 1..5145: note = Description of Artificial Sequence: Synthetic coding sequence
  source 1..5145: mol_type = other DNA
atgaagcagctgcagccccagcccccacccaagatgggagacttctatgaccctgagcaccccaccccagagaagaaggagcgggaggccaagattgaaaatgtgcagaagacaggcttcatcaagggccccatgtttaaaggagtggccagcagccgcttcctgcccaagggcaccaagaccaaggtgaacctggaggagcagggccggcagaaggtgtccttctccttcagcctgaccaagaagaccctgcagaaccgcttcctgacagccctgggcaatgagaagcagagcgacacccccaaccccccagctgtgcccctgcaggtggacagcacccccaagatgaagatggagatcggggacaccctgagcacagctgaggagagcagcccccccaagagccgggtggagctgggcaagatccacttcaagaagcacctgctgcacgtgaccagccggcccctgctggccaccaccacagctgtggccagcccccccacccacgccgcccccctgcctgctgtgattgctgagagcaccaccgtggacagcccccccagcagccccccacctcctcctcctccagcccaggccaccaccctgagcagccctgcccctgtgacagagcctgtggccctgccccacacccccatcaccgtgctgatggccgcccctgtgcccctgcctgtggatgtggccgtgcgcagcctgaaggagccccccatcatcatcgtgcctgagagcctggaggccgacaccaagcaggacaccatcagcaacagcctggaggagcacgtgacccagatcctgaatgagcaggccgacatcagcagcaagaaggaggacagccacatcggcaaggatgaggagatcccagacagcagcaagatcagcctgagctgcaagaagacaggcagcaagaagaagagcagccagagcgagggcatcttcctgggcagcgagagtgatgaagattctgtgaggaccagcagcagccagaggagccatgacctgaagttcagcgccagcattgagaaggagcgggacttcaagaagagcagcgcccccctgaagtctgaggacctgggcaagcccagccgcagcaagacagacagagatgacaagtacttctcctacagcaagctggagcgggacaccaggtatgtgagcagccgctgccgctctgagcgggagaggagaagaagccgcagccacagccgctctgagcggggcagcaggaccaacctgagctacagccgctctgagaggagccactactatgacagcgaccggcgctaccacaggagcagcccctaccgggagaggacccgctacagccggccctacacagacaacagagcccgggagagcagtgacagcgaggaggagtacaagaagacctacagcaggaggaccagcagccacagcagcagctacagagacctgcggaccagcagctacagcaagagtgaccgggactgcaagacagagaccagctacctggagatggagcggcggggcaagtacagcagcaagctggagcgggagagcaagaggaccagtgaaaatgaggccatcaagcgctgctgcagccccccaaatgagctgggcttccggcggggcagcagctacagcaagcatgacagcagcgccagccgctacaagagcaccctgagcaagcccatccccaagagtgacaagttcaagaacagcttctgctgcacagagctgaatgaggagatcaagcagagccacagcttcagcctgcagaccccctgcagcaagggcagcgagctgaggatgatcaacaagaaccctgagcgggagaaggccggcagccctgcccccagcaaccggctgaatgacagccccaccctgaagaagctggatgagctgcccatcttcaagtctgagttcatcacccatgacagccatgacagcatcaaggagctggacagcctgagcaaggtgaagaatgaccagctgcgctccttctgccccatcgagctgaacatcaatggcagccctggagctgagagtgacctggccaccttctgcaccagcaagacagatgctgtgctgatgaccagtgatgattctgtgactggaagtgagctgagccccctggtgaaggcctgcatgctgagcagcaatggcttccagaacatcagccgctgcaaggagaaggacctggatgacacctgcatgctgcacaagaagtctgagagccccttccgggagacagagcccctggtgagcccccaccaggacaagctgatgtccatgcctgtgatgacagtggactacagcaagacagtggtgaaggagcctgtggacaccagggtgtcctgctgcaagaccaaggacagcgacatctactgcaccctgaatgacagcaaccccagcctgtgcaacagcgaggccgagaacatcgagcccagcgtgatgaagatcagcagcaacagcttcatgaatgtgcacctggagagcaagcctgtgatctgtgacagcaggaacctgacagaccacagcaagtttgcctgtgaggagtacaagcagagcatcggcagcaccagcagcgcctctgtgaaccactttgatgacctgtaccagcccatcggcagcagcggcatcgccagcagcctgcagagcctgcccccaggcatcaaggtggacagcctgaccctgctgaagtgtggggagaacaccagccctgtgctggatgctgtgctgaagagcaagaagagcagcgagttcctgaagcacgccggcaaggagaccatcgtggaggtgggcagtgacctgcctgattctggaaaaggatttgccagcagagaaaatagaagaaacaacggcctgagcggcaagtgcctgcaggaggcccaggaggagggcaacagcatcctgcctgagcggcggggccggcctgagatcagcctggatgagcggggggagggcggccacgtgcacaccagtgatgacagcgaggtggtgttcagcagctgtgacctgaacctgaccatggaggacagtgatggagtgacctacgccctgaagtgtgacagcagcggccacgcccctgagatcgtgtccacagtgcatgaggactacagcggcagcagcgagagcagcaatgatgaaagtgacagcgaggacacagacagtgatgacagcagcatccccaggaaccggctgcagagcgtggtggtggtgcccaagaacagcaccctgcccatggaggagaccagcccctgcagcagccgcagcagccagagctaccgccactacagcgaccactgggaggatgagcggctggagagcagaagacacctgtatgaggagaagtttgagagcatcgccagcaaggcctgcccccagacagacaagttcttcctgcacaagggcacagagaagaaccctgagatctccttcacccagagcagcaggaagcagattgacaaccggctgcctgagctgagccacccccagagtgatggagtggacagcaccagccacacagatgtgaagagtgaccccctgggccaccccaacagcgaggagaccgtgaaggccaagatccccagccggcagcaggaggagctgcccatctacagcagtgactttgaagatgtgcccaacaagtcctggcagcagaccaccttccagaacagaccagacagccggctgggcaagacagagctgtccttcagcagcagctgtgagatcccccacgtggatggcctgcacagcagcgaggagctgaggaacctgggctgggacttcagccaggagaagcccagcaccacctaccagcagcctgacagcagctatggagcctgtggcggccacaagtaccagcagaatgctgagcagtatggaggcacccgggactactggcagggcaatggctactgggaccccaggagcggccggcccccaggcaccggggtggtgtatgacaggacccagggccaggtgcctgacagcctgacagatgaccgggaggaggaggagaactgggaccagcaggacggcagccacttcagtgaccagagcgacaagttcctgctgagcctgcagaaggacaagggctctgtgcaggcccctgagatcagcagcaacagcatcaaggacaccctggccgtgaatgagaagaaggacttcagcaagaacctggagaagaatgacatcaaggaccggggccccctgaagaagaggcggcaggagattgaaagtgacagcgagagtgatggagagctgcaggacaggaagaaggtgcgggtggaggtggagcagggcgagacctctgtgcccccaggcagcgccctggtgggccccagctgtgtgatggatgacttccgggacccccagcgctggaaggaatgtgccaagcagggcaagatgccctgctactttgacctgattgaggagaatgtgtacctgacagagaggaagaagaacaagagccaccgggacatcaagaggatgcagtgtgagtgcacccccctgagcaaggatgagcgggcccagggcgagatcgcctgtggggaggactgcctgaaccggctgctgatgattgagtgcagcagccgctgccccaatggagactactgcagcaacagacgcttccagaggaagcagcacgcagatgtggaggtgatcctgacagagaagaagggctggggcctgcgggccgccaaggacctgcccagcaacacctttgtgctggagtactgtggggaggtgctggaccacaaggagttcaaggcccgggtgaaggagtatgccaggaacaagaacatccactactacttcatggccctgaagaatgatgagatcattgatgccacccagaagggcaactgcagccgcttcatgaaccacagctgtgagcccaactgtgagacccagaagtggacagtgaatggccagctgcgggtgggcttcttcaccaccaagctggtgcccagcggcagcgagctgacctttgactaccagttccagagatatggcaaggaggcccagaagtgcttctgtggcagcgccaactgccggggctacctgggcggggagaacagagtgtccatccgggccgccggcggcaagatgaagaaggagaggagcaggaagaaggacagctag

SEQ ID NO: 169494 - DNA, 3876 bp, synthetic construct
  misc_feature 1..3876: note = Description of Artificial Sequence: Synthetic coding sequence
  source 1..3876: mol_type = other DNA
atgagcagcctgcccggctgcatcggcctggatgctgccacagccaccgtggagagcgaggagattgctgagctgcagcaggccgtggtggaggagctgggcatctccatggaggagctgcggcacttcattgatgaggagctggagaagatggactgtgtgcagcagaggaagaagcagctggccgagctggagacctgggtgatccagaaggagagcgaggtggcccacgtggaccagctgtttgatgatgccagcagagctgtgaccaactgtgagagcctggtgaaggacttctacagcaagctgggcctgcagtacagagacagcagcagtgaagatgagagcagccggcccacagagatcatcgagatcccagatgaagatgatgatgtgctgagcattgattctggagatgctggcagcaggacccccaaggaccagaagctgcgggaggccatggccgccctgaggaagagcgcccaggatgtgcagaagttcatggatgctgtgaacaagaagagcagcagccaggacctgcacaagggcaccctgagccagatgtctggagagctgagcaaggatggagacctgattgtgtccatgaggatcctgggcaagaagaggaccaagacctggcacaagggcaccctgattgccatccagacagtgggccctgggaagaagtacaaggtgaagtttgacaacaagggcaagagcctgctgagcggcaaccacatcgcctatgactaccaccccccagctgacaagctgtatgtgggcagccgggtggtggccaagtacaaggatggcaaccaggtgtggctgtatgccggcatcgtggccgagacccccaacgtgaagaacaagctgcgcttcctgatcttctttgatgatggctacgccagctatgtgacccagagcgagctgtaccccatctgccggcccctgaagaagacctgggaggacatcgaggacatcagctgccgggacttcatcgaggagtatgtgacagcctaccccaaccggcccatggtgctgctgaagagcggccagctgatcaagacagagtgggagggcacctggtggaagagccgggtggaggaggtggatggcagcctggtgcgcatcctcttcctggatgacaagagatgtgagtggatctaccggggcagcacccggctggagcccatgttctccatgaagaccagcagcgccagcgccctggagaagaagcagggccagctgcggacccggcccaacatgggcgctgtgcgcagcaagggccctgtggtgcagtacacccaggacctgactggaacaggcacccagttcaagcctgtggagcccccccagcccacagcccccccagccccacccttccccccagccccacccctgagcccccaggccggggacagcgacctggagagccagctggcccagagcaggaagcaggtggccaagaagagcaccagcttccggcccggctctgtgggcagcggccacagcagccccaccagccctgccctgtctgaaaatgtgtctgggggcaagccaggcatcaaccagacctaccgcagccccctgggcagcacagccagcgccccagcccccagcgccctgcctgcccccccagcccctcctgtgttccacggcatgctggagcgggccccagctgagcccagctaccgggcccccatggagaagctgttctacctgccccacgtgtgcagctacacctgcctgagccgggtgcggcccatgagaaatgagcagtaccggggcaagaaccccctgctggtgcccctgctgtatgacttccggaggatgacagccaggagaagagtgaacaggaagatgggcttccacgtgatctacaagaccccctgtggcctgtgcctgcggaccatgcaggagattgagcgctacctgtttgagaccggctgtgacttcctgttcctggagatgttctgcctggacccctacgtgctggtggacaggaagttccagccctacaagcccttctactacatcctggacatcacctacggcaaggaggatgtgcccctgagctgtgtgaatgaaattgacaccaccccaccaccccaggtggcctacagcaaggagcgcatccctggaaaaggagtcttcatcaacacaggccctgagttcctggtgggctgtgactgcaaggatggctgccgggacaagagcaaatgtgcctgccaccagctgaccatccaggccacagcctgcaccccaggcggccagatcaaccccaacagcggctaccagtacaagaggctggaggagtgcctgcccaccggggtgtatgagtgcaacaagcgctgcaagtgtgaccccaacatgtgcaccaaccggctggtgcagcacggcctgcaggtgcggctgcagctgttcaagacccagaacaagggctggggcatccgctgcctggatgacatcgccaagggcagctttgtgtgcatctatgccggcaagatcctgacagatgactttgctgacaaggagggcctggagatgggagatgagtactttgccaacctggaccacatcgagagcgtggagaacttcaaggagggctatgaaagtgatgccccctgcagcagtgacagcagtggagtggacctgaaggaccaggaggatggcaacagcggcacagaggaccctgaggagagcaatgatgacagcagtgatgacaacttctgcaaggatgaggacttcagcaccagctctgtgtggaggagctatgccacccggcggcagacccggggccagaaggaaaatggcctgtctgagaccaccagcaaggacagccaccccccagacctgggccccccccacatccctgtgccccccagcatccctgtgggcggctgcaacccccccagcagcgaggagacccccaagaacaaggtggcctcctggctgagctgcaacagcgtgtctgagggcggctttgctgacagcgacagccacagcagcttcaagaccaatgaaggaggagagggccgggccggcggcagcaggatggaggccgagaaggccagcaccagcggcctgggcatcaaggatgaaggagacatcaagcaggccaagaaggaggacacagatgacaggaacaagatgtctgtggtgacagagagcagcagaaattatggctacaaccccagccctgtgaagccagagggcctgcggcggccccccagcaagacctccatgcaccagagccggcggctgatggccagcgcccagagcaacccagatgatgtgctgaccctgagcagcagcacagagagcgagggggagagcggcaccagcaggaagcccacagctggccagaccagcgccacagctgtggacagtgatgacatccagaccatcagcagcggctctgaaggagatgactttgaggacaagaagaacatgacaggccccatgaagaggcaggtggccgtgaagagcacccggggctttgccctgaagagcacccatggaattgccatcaagagcaccaacatggcctctgtggacaagggggagagcgcccctgtgaggaagaacacccggcagttctatgatggagaggagagctgctacatcattgatgccaagctggagggcaacctgggccgctacctgaaccacagctgcagccccaacctgtttgtgcagaatgtgtttgtggacacccatgacctgcgcttcccctgggtggccttctttgccagcaagaggatccgggccggcacagagctgacctgggactacaactatgaggtgggctctgtggagggcaaggagctgctgtgctgctgcggggccattgaatgtcggggccgcctgctgtag

SEQ ID NO: 169495 - DNA, 1194 bp, synthetic construct
  misc_feature 1..1194: note = Description of Artificial Sequence: Synthetic coding sequence
  source 1..1194: mol_type = other DNA
atgagcagcctgcccggctgcatcggcctggatgctgccacagccaccgtggagagcgaggagattgctgagctgcagcaggccgtggtggaggagctgggcatctccatggaggagctgcggcacttcattgatgaggagctggagaagatggactgtgtgcagcagaggaagaagcagctggccgagctggagacctgggtgatccagaaggagagcgaggtggcccacgtggaccagctgtttgatgatgccagcagagctgtgaccaactgtgagagcctggtgaaggacttctacagcaagctgggcctgcagtacagagacagcagcagtgaagatgagagcagccggcccacagagatcatcgagatcccagatgaagatgatgatgtgctgagcattgattctggagatgctggcagcaggacccccaaggaccagaagctgcgggaggccatggccgccctgaggaagagcgcccaggatgtgcagaagttcatggatgctgtgaacaagaagagcagcagccaggacctgcacaagggcaccctgagccagatgtctggagagctgagcaaggatggagacctgattgtgtccatgaggatcctgggcaagaagaggaccaagacctggcacaagggcaccctgattgccatccagacagtgggccctgggaagaagtacaaggtgaagtttgacaacaagggcaagagcctgctgagcggcaaccacatcgcctatgactaccaccccccagctgacaagctgtatgtgggcagccgggtggtggccaagtacaaggatggcaaccaggtgtggctgtatgccggcatcgtggccgagacccccaacgtgaagaacaagctgcgcttcctgatcttctttgatgatggctacgccagctatgtgacccagagcgagctgtaccccatctgccggcccctgaagaagacctgggaggacatcgaggacatcagctgccgggacttcatcgaggagtatgtgacagcctaccccaaccggcccatggtgctgctgaagagcggccagctgatcaagacagagtgggagggcacctggtggaagagccgggtggaggaggtggatggcagcctggtgcgcatcctcttcctggtgctcttcttcagcaccatcctggaggccgaggtgggcggcggcggcacctag

SEQ ID NO: 169496 - DNA, 750 bp, synthetic construct
  misc_feature 1..750: note = Description of Artificial Sequence: Synthetic coding sequence
  source 1..750: mol_type = other DNA
atgagcagcctgcccggctgcatcggcctggatgctgccacagccaccgtggagagcgaggagattgctgagctgcagcaggccgtggtggaggagctgggcatctccatggaggagctgcggcacttcattgatgaggagctggagaagatggactgtgtgcagcagaggaagaagcagctggccgagctggagacctgggtgatccagaaggagagcgaggtggcccacgtggaccagctgtttgatgatgccagcagagctgtgaccaactgtgagagcctggtgaaggacttctacagcaagctgggcctgcagtacagagacagcagcagtgaagatgagagcagccggcccacagagatcatcgagatcccagatgaagatgatgatgtgctgagcattgattctggagatgctggcagcaggacccccaaggaccagaagctgcgggaggccatggccgccctgaggaagagcgcccaggatgtgcagaagttcatggatgctgtgaacaagaagagcagcagccaggacctgcacaagggcaccctgagccagatgtctggagagctgagcaaggatggagacctgattgtgtccatgaggatcctgggcaagaagaggaccaagacctggcacaagggcaccctgattgccatccagacagtgggcttctccttcagcctgatgatggccatgctgcccatgagccacagcaggaactgcatcccctttgctggccactag

SEQ ID NO: 169497 - DNA, 3873 bp, synthetic construct
  misc_feature 1..3873: note = Description of Artificial Sequence: Synthetic coding sequence
  source 1..3873: mol_type = other DNA
atgagcagcctgcccggctgcatcggcctggatgctgccacagccaccgtggagagcgaggagattgctgagctgcagcaggccgtggtggaggagctgggcatctccatggaggagctgcggcacttcattgatgaggagctggagaagatggactgtgtgcagcagaggaagaagcagctggccgagctggagacctgggtgatccagaaggagagcgaggtggcccacgtggaccagctgtttgatgatgccagcagagctgtgaccaactgtgagagcctggtgaaggacttctacagcaagctgggcctgcagtacagagacagcagcagtgaagatgagagcagccggcccacagagatcatcgagatcccagatgaagatgatgatgtgctgagcattgattctggagatgctggcagcaggacccccaaggaccagaagctgcgggaggccatggccgccctgaggaagagcgcccaggatgtgcagaagttcatggatgctgtgaacaagaagagcagcagccaggacctgcacaagggcaccctgagccagatgtctggagagctgagcaaggatggagacctgattgtgtccatgaggatcctgggcaagaagaggaccaagacctggcacaagggcaccctgattgccatccagacagtgggccctgggaagaagtacaaggtgaagtttgacaacaagggcaagagcctgctgagcggcaaccacatcgcctatgactaccaccccccagctgacaagctgtatgtgggcagccgggtggtggccaagtacaaggatggcaaccaggtgtggctgtatgccggcatcgtggccgagacccccaacgtgaagaacaagctgcgcttcctgatcttctttgatgatggctacgccagctatgtgacccagagcgagctgtaccccatctgccggcccctgaagaagacctgggaggacatcgaggacatcagctgccgggacttcatcgaggagtatgtgacagcctaccccaaccggcccatggtgctgctgaagagcggccagctgatcaagacagagtgggagggcacctggtggaagagccgggtggaggaggtggatggcagcctggtgcgcatcctcttcctggatgacaagagatgtgagtggatctaccggggcagcacccggctggagcccatgttctccatgaagaccagcagcgccagcgccctggagaagaagcagggccagctgcggacccggcccaacatgggcgctgtgcgcagcaagggccctgtggtgcagtacacccaggacctgactggaacaggcacccagttcaagcctgtggagcccccccagcccacagcccccccagccccacccttccccccagccccacccctgagcccccaggccggggacagcgacctggagagccagctggcccagagcaggaagcaggtggccaagaagagcaccagcttccggcccggctctgtgggcagcggccacagcagccccaccagccctgccctgtctgaaaatgtgtctgggggcaagccaggcatcaaccagacctaccgcagccccctgggcagcacagccagcgccccagcccccagcgccctgcctgcccccccagcccctcctgtgttccacggcatgctggagcgggccccagctgagcccagctaccgggcccccatggagaagctgttctacctgccccacgtgtgcagctacacctgcctgagccgggtgcggcccatgagaaatgagcagtaccggggcaagaaccccctgctggtgcccctgctgtatgacttccggaggatgacagccaggagaagagtgaacaggaagatgggcttccacgtgatctacaagaccccctgtggcctgtgcctgcggaccatgcaggagattgagcgctacctgtttgagaccggctgtgacttcctgttcctggagatgttctgcctggacccctacgtgctggtggacaggaagttccagccctacaagcccttctactacatcctggacatcacctacggcaaggaggatgtgcccctgagctgtgtgaatgaaattgacaccaccccaccaccccaggtggcctacagcaaggagcgcatccctggaaaaggagtcttcatcaacacaggccctgagttcctggtgggctgtgactgcaaggatggctgccgggacaagagcaaatgtgcctgccaccagctgaccatccaggccacagcctgcaccccaggcggccagatcaaccccaacagcggctaccagtacaagaggctggaggagtgcctgcccaccggggtgtatgagtgcaacaagcgctgcaagtgtgaccccaacatgtgcaccaaccggctggtgcagcacggcctgcaggtgcggctgcagctgttcaagacccagaacaagggctggggcatccgctgcctggatgacatcgccaagggcagctttgtgtgcatctatgccggcaagatcctgacagatgactttgctgacaaggagggcctggagatgggagatgagtactttgccaacctggaccacatcgagagcgtggagaacttcaaggagggctatgaaagtgatgccccctgcagcagtgacagcagtggagtggacctgaaggaccaggaggatggcaacagcggcacagaggaccctgaggagagcaatgatgacagcagtgatgacaacttctgcaaggatgaggacttcagcaccagctctgtgtggaggagctatgccacccggcggcagacccggggccagaaggaaaatggcctgtctgagaccaccagcaaggacagccaccccccagacctgggccccccccacatccctgtgccccccagcatccctgtgggcggctgcaacccccccagcagcgaggagacccccaagaacaaggtggcctcctggctgagctgcaacagcgtgtctgagggcggctttgctgacagcgacagccacagcagcttcaagaccaatgaaggaggagagggccgggccggcggcagcaggatggaggccgagaaggccagcaccagcggcctgggcatcaaggatgaaggagacatcaagcaggccaagaaggaggacacagatgacaggaacaagatgtctgtggtgacagagagcagcagaaattatggctacaaccccagccctgtgaagccagagggcctgcggcggccccccagcaagacctccatgcaccagagccggcggctgatggccagcgcccagagcaacccagatgatgtgctgaccctgagcagcagcacagagagcgagggggagagcggcaccagcaggaagcccacagctggccagaccagcgccacagctgtggacagtgatgacatccagaccatcagcagcggctctgaaggagatgactttgaggacaagaagaacatgacaggccccatgaagaggcaggtggccgtgaagagcacccggggctttgccctgaagagcacccatggaattgccatcaagagcaccaacatggcctctgtggacaagggggagagcgcccctgtgaggaagaacacccggcagttctatgatggagaggagagctgctacatcattgatgccaagctggagggcaacctgggccgctacctgaaccacagctgcagccccaacctgtttgtgcagaatgtgtttgtggacacccatgacctgcgcttcccctgggtggccttctttgccagcaagatccgggccggcacagagctgacctgggactacaactatgaggtgggctctgtggagggcaaggagctgctgtgctgctgcggggccatcgagtgccggggccgcctgctgtag

SEQ ID NO: 169498 - DNA, 504 bp, synthetic construct
  misc_feature 1..504: note = Description of Artificial Sequence: Synthetic coding sequence
  source 1..504: mol_type = other DNA
atgagcagcctgcccggctgcatcggcctggatgctgccacagccaccgtggagagcgaggagattgctgagctgcagcaggccgtggtggaggagctgggcatctccatggaggagctgcggcacttcattgatgaggagctggagaagatggactgtgtgcagcagaggaagaagcagctggccgagctggagaccgtgggccctgggaagaagtacaaggtgaagtttgacaacaagggcaagagcctgctgagcggcaaccacatcgcctatgactaccaccccccagctgacaagctgtatgtgggcagccgggtggtggccaagtacaaggatggcaaccaggtgtggctgtatgccggcatcgtggccgagaccccaaatgtgaagaacaagctgcgcttcctgatcttctttgatgatggctacgccagctatgtgacccagagcgagctgtaccccatctgccggccccgggagtgcttcagcctcatcccctag

SEQ ID NO: 169499 - DNA, 471 bp, synthetic construct
  misc_feature 1..471: note = Description of Artificial Sequence: Synthetic coding sequence
  source 1..471: mol_type = other DNA
atgagcagcctgcccggctgcatcggcctggatgctgccacagccaccgtggagagcgaggagattgctgagctgcagcaggccgtggtggaggagctgggcatctccatggaggagctgcggcacttcattgatgaggagctggagaagatggactgtgtgcagcagaggaagaagcagctggccgagctggagacctgggtgatccagaaggagagcgaggtggcccacgtggaccagctgtttgatgatgccagcagagctgtgaccaactgtgagagcctggtgaaggacttctacagcaagctgggcctgcagtacagagacagcagcagtgaagatgagagcagccggcccacagagatcatcgagatcccagatgaagatgatgatgtgctgagcattgattctggagatgctggcagcaggacccccaaggaccagaagctgcgggaggccatggccgcctag

SEQ ID NO: 169500 - DNA, 3780 bp, synthetic construct
  misc_feature 1..3780: note = Description of Artificial Sequence: Synthetic coding sequence
  source 1..3780: mol_type = other DNA
atgagcagcctgcccggctgcatcggcctggatgctgccacagccaccgtggagagcgaggagattgctgagctgcagcaggccgtggtggaggagctgggcatctccatggaggagctgcggcacttcattgatgaggagctggagaagatggactgtgtgcagcagaggaagaagcagctggccgagctggagacctgggtgatccagaaggagagcgaggtggcccacgtggaccagctgtttgatgatgccagcagagctgtgaccaactgtgagagcctggtgaaggacttctacagcaagctgggcctgcagtacagagacagcagcagtgaagatgagagcagccggcccacagagatcatcgagatcccagatgaagatgatgatgtgctgagcattgattctggagatgctggcagcaggacccccaaggaccagaagctgcgggaggccatggccgccctgaggaagagcgcccaggatgtgcagaagttcatggatgctgtgaacaagaagagcagcagccaggacctgcacaagggcaccctgagccagatgtctggagagctgagcaaggatggagacctgattgtgtccatgaggatcctgggcaagaagaggaccaagacctggcacaagggcaccctgattgccatccagacagtgggccctgggaagaagtacaaggtgaagtttgacaacaagggcaagagcctgctgagcggcaaccacatcgcctatgactaccaccccccagctgacaagctgtatgtgggcagccgggtggtggccaagtacaaggatggcaaccaggtgtggctgtatgccggcatcgtggccgagacccccaacgtgaagaacaagctgcgcttcctgatcttctttgatgatggctacgccagctatgtgacccagagcgagctgtaccccatctgccggcccctgaagaagacctgggaggacatcgaggacatcagctgccgggacttcatcgaggagtatgtgacagcctaccccaaccggcccatggtgctgctgaagagcggccagctgatcaagacagagtgggagggcacctggtggaagagccgggtggaggaggtggatggcagcctggtgcgcatcctcttcctggatgacaagagatgtgagtggatctaccggggcagcacccggctggagcccatgttctccatgaagaccagcagcgccagcgccctggagaagaagcagggccagctgcggacccggcccaacatgggcgctgtgcgcagcaagggccctgtggtgcagtacacccaggacctgactggaacaggcacccagttcaagcctgtggagcccccccagcccacagcccccccagccccacccttccccccagccccacccctgagcccccaggccggggacagcgacctggagagccagctggcccagagcaggaagcaggtggccaagaagagcaccagcttccggcccggctctgtgggcagcggccacagcagccccaccagccctgccctgtctgaaaatgtgtctgggggcaagccaggcatcaaccagacctaccgcagccccctgggcagcacagccagcgccccagcccccagcgccctgcctgcccccccagcccctcctgtgttccacggcatgctggagcgggccccagctgagcccagctaccgggcccccatggagaagctgttctacctgccccacgtgtgcagctacacctgcctgagccgggtgcggcccatgagaaatgagcagtaccggggcaagaaccccctgctggtgcccctgctgtatgacttccggaggatgacagccaggagaagagtgaacaggaagatgggcttccacgtgatctacaagaccccctgtggcctgtgcctgcggaccatgcaggagattgagcgctacctgtttgagaccggctgtgacttcctgttcctggagatgttctgcctggacccctacgtgctggtggacaggaagttccagccctacaagcccttctactacatcctggacatcacctacggcaaggaggatgtgcccctgagctgtgtgaatgaaattgacaccaccccaccaccccaggtggcctacagcaaggagcgcatccctggaaaaggagtcttcatcaacacaggccctgagttcctggtgggctgtgactgcaaggatggctgccgggacaagagcaaatgtgcctgccaccagctgaccatccaggccacagcctgcaccccaggcggccagatcaaccccaacagcggctaccagtacaagaggctggaggagtgcctgcccaccggggtgtatgagtgcaacaagcgctgcaagtgtgaccccaacatgtgcaccaaccggctggtgcagcacggcctgcaggtgcggctgcagctgttcaagacccagaacaagggctggggcatccgctgcctggatgacatcgccaagggcagctttgtgtgcatctatgccggcaagatcctgacagatgactttgctgacaaggagggcctggagatgggagatgagtactttgccaacctggaccacatcgagagcgtggagaacttcaaggagggctatgaaagtgatgccccctgcagcagtgacagcagtggagtggacctgaaggaccaggaggatggcaacagcggcacagaggaccctgaggagagcaatgatgacagcagtgatgacaacttctgcaaggatgaggacttcagcaccagctctgtgtggaggagctatgccacccggcggcagacccggggccagaaggaaaatggcctgtctgagaccaccagcaaggacagccaccccccagacctgggccccccccacatccctgtgccccccagcatccctgtgggcggctgcaacccccccagcagcgaggagacccccaagaacaaggtggcctcctggctgagctgcaacagcgtgtctgagggcggctttgctgacagcgacagccacagcagcttcaagaccaatgaaggaggagagggccgggccggcggcagcaggatggaggccgagaaggccagcaccagcggcctgggcatcaaggatgaaggagacatcaagcaggccaagaaggaggacacagatgacaggaacaagatgtctgtggtgacagagagcagcagaaattatggctacaaccccagccctgtgaagccagagggcctgcggcggccccccagcaagacctccatgcaccagagccggcggctgatggccagcgcccagagcaacccagatgatgtgctgaccctgagcagcagcacagagagcgagggggagagcggcaccagcaggaagcccacagctggccagaccagcgccacagctgtggacagtgatgacatccagaccatcagcagcggctctgaaggagatgactttgaggacaagaagaacatgacaggccccatgaagaggcaggtggccgtgaagagcacccggggctttgccctgaagagcacccatggaattgccatcaagagcaccaacatggcctctgtggacaagggggagagcgcccctgtgaggaagaacacccggcagttctatgatggagaggagagctgctacatcattgatgccaagctggagggcaacctgggccgctacctgaatgtgcggcccctgagcccccccctggatgctggcctgagccacggcccccagatctccttcaacatcctgtacaagcccttcagctgctacaagctgctgatcagcaagtag

SEQ ID NO: 169501 - DNA, 492 bp, synthetic construct
  misc_feature 1..492: note = Description of Artificial Sequence: Synthetic coding sequence
  source 1..492: mol_type = other DNA
atgagcagcctgcccggctgcatcggcctggatgctgccacagccaccgtggagagcgaggagattgctgagctgcagcaggccgtggtggaggagctgggcatctccatggaggagctgcggcacttcattgatgaggagctggagaagatggactgtgtgcagcagaggaagaagcagctggccgagctggagacctgggtgatccagaaggagagcgaggtggcccacgtggaccagctgtttgatgatgccagcagagctgtgaccaactgtgagagcctggtgaaggacttctacagcaagctgggcctgcagtacagagacagcagcagtgaagatgagagcagccggcccacagagatcatcgagatcccagatgaagatgatgatgtgctgagcattgattctggagatgctggcagcaggacccccaaggaccagaagctgcgggaggccatggccgccctgaggaagagcgcccaggactag

SEQ ID NO: 169502 - DNA, 1911 bp, synthetic construct
  misc_feature 1..1911: note = Description of Artificial Sequence: Synthetic coding sequence
  source 1..1911: mol_type = other DNA
atgagcagcctgcccggctgcatcggcctggatgctgccacagccaccgtggagagcgaggagattgctgagctgcagcaggccgtggtggaggagctgggcatctccatggaggagctgcggcacttcattgatgaggagctggagaagatggactgtgtgcagcagaggaagaagcagctggccgagctggagacctgggtgatccagaaggagagcgaggtggcccacgtggaccagctgtttgatgatgccagcagagctgtgaccaactgtgagagcctggtgaaggacttctacagcaagctgggcctgcagtacagagacagcagcagtgaagatgagagcagccggcccacagagatcatcgagatcccagatgaagatgatgatgtgctgagcattgattctggagatgctggcagcaggacccccaaggaccagaagctgcgggaggccatggccgccctgaggaagagcgcccaggatgtgcagaagttcatggatgctgtgaacaagaagagcagcagccaggacctgcacaagggcaccctgagccagatgtctggagagctgagcaaggatggagacctgattgtgtccatgaggatcctgggcaagaagaggaccaagacctggcacaagggcaccctgattgccatccagacagtgggccctgggaagaagtacaaggtgaagtttgacaacaagggcaagagcctgctgagcggcaaccacatcgcctatgactaccaccccccagctgacaagctgtatgtgggcagccgggtggtggccaagtacaaggatggcaaccaggtgtggctgtatgccggcatcgtggccgagacccccaacgtgaagaacaagctgcgcttcctgatcttctttgatgatggctacgccagctatgtgacccagagcgagctgtaccccatctgccggcccctgaagaagacctgggaggacatcgaggacatcagctgccgggacttcatcgaggagtatgtgacagcctaccccaaccggcccatggtgctgctgaagagcggccagctgatcaagacagagtgggagggcacctggtggaagagccgggtggaggaggtggatggcagcctggtgcgcatcctcttcctggatgacaagagatgtgagtggatctaccggggcagcacccggctggagcccatgttctccatgaagaccagcagcgccagcgccctggagaagaagcagggccagctgcggacccggcccaacatgggcgctgtgcgcagcaagggccctgtggtgcagtacacccaggacctgactggaacaggcacccagttcaagcctgtggagcccccccagcccacagcccccccagccccacccttccccccagccccacccctgagcccccaggccggggacagcgagagcctggagagccagctggcccagagcaggaagcaggtggccaagaagagcaccagcttccggcccggctctgtgggcagcggccacagcagccccaccagccctgccctgtctgaaaatgtgtctgggggcaagccaggcatcaaccagacctaccgcagccccctgggcagcacagccagcgccccagcccccagcgccctgcctgcccccccagcccctcctgtgttccacggcatgctggagcgggccccagctgagcccagctaccgggcccccatggagaagctgttctacctgccccacgtgtgcagctacacctgcctgagccgggtgcggcccatgagaaatgagcagtaccggggcaagaaccccctgctggtgcccctgctgtatgacttccggaggatgacagcccggcggcgggtgaacaggaagatgggcttccacgtgatctacaagaccccctgtggcctgtgcctgtag

SEQ ID NO: 169503 - DNA, 2160 bp, synthetic construct
  misc_feature 1..2160: note = Description of Artificial Sequence: Synthetic coding sequence
  source 1..2160: mol_type = other DNA
atgggagagaagaatggagatgccaagaccttctggatggagctggaggatgatggcaaggtggacttcatctttgagcaggtgcagaatgtgctgcagagcctgaagcagaagatcaaggatggcagcgccaccaacaaggagtacatccaggccatgatcctggtgaatgaggccaccatcatcaacagcagcaccagcatcaagggggccagccagaaggaggtgaatgcccagagcagtgaccccatgcctgtgacccagaaggagcaggagaacaagagcaatgccttccccagcaccagctgtgagaacagcttccctgaggactgcaccttcctgaccacagagaacaaggagatcctgagcctggaggacaaggtggtggacttccgggagaaggacagcagcagcaacctgagctaccagagccatgactgcagcggggcctgcctgatgaagatgcccctgaacctgaagggggagaaccccctgcagctgcccatcaagtgccacttccagaggagacatgccaagaccaacagccacagcagcgccctgcacgtgtcctacaagaccccctgtggccgcagcctgagaaatgtggaggaggtgttccgctacctgctggagacagagtgcaacttcctgttcacagacaacttctccttcaacacctacgtgcagctggccaggaactaccccaagcagaaggaggtggtgtctgatgtggacatcagcaatggagtggagagcgtgcccatctccttctgcaatgaaattgacagcaggaagctgccccagttcaagtacaggaagacagtgtggccccgggcctacaacctgaccaacttcagctccatgttcacagacagctgtgactgcagcgagggctgcatcgacatcaccaagtgtgcctgcctgcagctgacagccagaaatgccaagaccagccccctgagcagtgacaagatcaccaccggctacaagtacaagaggctgcagaggcagatccccaccggcatctatgagtgcagcctgctgtgcaagtgcaaccggcagctgtgccagaacagagtggtgcagcacggcccccaggtgcggctgcaggtgttcaagacagagcagaagggctggggcgtgcgctgcctggatgacatcgaccggggcacctttgtgtgcatctacagcggccgcctgctgagccgggccaacacagagaagagctatggaattgatgaaaatggaagagatgagaacaccatgaagaacatcttcagcaagaagaggaagctggaggtggcctgcagcgactgtgaggtggaggtgctgcccctgggcctggagacccaccccaggacagccaagacagagaagtgcccccccaagttcagcaacaaccccaaggagctgactgtggagaccaagtatgacaacatcagccgcatccagtaccacagcgtcatccgggaccctgagagcaagacagccatcttccagcacaacgggaagaagatggagtttgtgtcctctgagagcgtgaccccagaagataatgatggcttcaagccaccccgggagcacctgaacagcaagaccaagggggcccagaaggacagcagcagcaaccacgtggatgaatttgaggacaacctgctgattgaaagtgatgtgattgacatcaccaagtaccgggaggagaccccacccaggagccgctgcaaccaggccaccaccctggacaaccagaacatcaagaaggccatcgaggtgcagatccagaagccccaggagggccgcagcacagcctgccagaggcagcaggtgttctgtgatgaggagctgctgtctgagaccaagaacaccagcagtgacagcctgaccaagttcaacaagggaaatgtgttcctgctggatgccaccaaggagggcaatgtgggccgcttcctgaaccacagctgctgccccaacctgctggtgcagaatgtgtttgtggagacccacaacagaaacttccccctggtggccttcttcaccaaccgctacgtgaaggccaggacagagctgacctgggactatggctatgaagctggcaccgtgcctgagaaggagatcttctgccagtgtggggtgaacaagtgcaggaagaagatcctgtag

SEQ ID NO: 169504 - DNA, 2124 bp, synthetic construct
  misc_feature 1..2124: note = Description of Artificial Sequence: Synthetic coding sequence
  source 1..2124: mol_type = other DNA
atgggagagaagaatggagatgccaagaccttctggatggagctggaggatgatggcaaggtggacttcatctttgagcaggtgcagaatgtgctgcagagcctgaagcagaagatcaaggatggcagcgccaccaacaaggagtacatccaggccatgatcctggtgaatgaggccaccatcatcaacagcagcaccagcatcaaggaccccatgcctgtgacccagaaggagcaggagaacaagagcaatgccttccccagcaccagctgtgagaacagcttccctgaggactgcaccttcctgaccacagagaacaaggagatcctgagcctggaggacaaggtggtggacttccgggagaaggacagcagcagcaacctgagctaccagagccatgactgcagcggggcctgcctgatgaagatgcccctgaacctgaagggggagaaccccctgcagctgcccatcaagtgccacttccagaggagacatgccaagaccaacagccacagcagcgccctgcacgtgtcctacaagaccccctgtggccgcagcctgagaaatgtggaggaggtgttccgctacctgctggagacagagtgcaacttcctgttcacagacaacttctccttcaacacctacgtgcagctggccaggaactaccccaagcagaaggaggtggtgtctgatgtggacatcagcaatggagtggagagcgtgcccatctccttctgcaatgaaattgacagcaggaagctgccccagttcaagtacaggaagacagtgtggccccgggcctacaacctgaccaacttcagctccatgttcacagacagctgtgactgcagcgagggctgcatcgacatcaccaagtgtgcctgcctgcagctgacagccagaaatgccaagaccagccccctgagcagtgacaagatcaccaccggctacaagtacaagaggctgcagaggcagatccccaccggcatctatgagtgcagcctgctgtgcaagtgcaaccggcagctgtgccagaacagagtggtgcagcacggcccccaggtgcggctgcaggtgttcaagacagagcagaagggctggggcgtgcgctgcctggatgacatcgaccggggcacctttgtgtgcatctacagcggccgcctgctgagccgggccaacacagagaagagctatggaattgatgaaaatggaagagatgagaacaccatgaagaacatcttcagcaagaagaggaagctggaggtggcctgcagcgactgtgaggtggaggtgctgcccctgggcctggagacccaccccaggacagccaagacagagaagtgcccccccaagttcagcaacaaccccaaggagctgactgtggagaccaagtatgacaacatcagccgcatccagtaccacagcgtcatccgggaccctgagagcaagacagccatcttccagcacaacgggaagaagatggagtttgtgtcctctgagagcgtgaccccagaagataatgatggcttcaagccaccccgggagcacctgaacagcaagaccaagggggcccagaaggacagcagcagcaaccacgtggatgaatttgaggacaacctgctgattgaaagtgatgtgattgacatcaccaagtaccgggaggagaccccacccaggagccgctgcaaccaggccaccaccctggacaaccagaacatcaagaaggccatcgaggtgcagatccagaagccccaggagggccgcagcacagcctgccagaggcagcaggtgttctgtgatgaggagctgctgtctgagaccaagaacaccagcagtgacagcctgaccaagttcaacaagggaaatgtgttcctgctggatgccaccaaggagggcaatgtgggccgcttcctgaaccacagctgctgccccaacctgctggtgcagaatgtgtttgtggagacccacaacagaaacttccccctggtggccttcttcaccaaccgctacgtgaaggccaggacagagctgacctgggactatggctatgaagctggcaccgtgcctgagaaggagatcttctgccagtgtggggtgaacaagtgcaggaagaagatcctgtag

SEQ ID NO: 169505 - DNA, 975 bp, synthetic construct
  misc_feature 1..975: note = Description of Artificial Sequence: Synthetic coding sequence
  source 1..975: mol_type = other DNA
atgagccggcccagcagcacaggccccagcgccaacaagccctgcagcaagcagcccccaccccagccccagcacacccccagccctgctgcccccccagctgctgccaccatctctgctgctggccctggcagcagcgctgtgcctgctgctgctgctgtgatcagcggccctgggggcggcggcggggccggccctgtgagcccccagcaccacgagctgaccagcctgtttgaatgtcctgtgtgctttgattatgtgctgccccccatcctgcagtgccaggccggccacctggtgtgcaaccagtgccggcagaagctgagctgctgccccacctgccgcggggccctgacccccagcatccggaacctggccatggagaaggtggccagcgctgtgctcttcccctgcaagtatgccaccaccggctgcagcctgaccctgcaccacacagagaagccagagcacgaggacatctgtgagtaccggccctacagctgcccctgccctggggccagctgcaagtggcagggcagcctggaggccgtgatgagccacctgatgcacgcccacaagagcatcaccaccctgcagggagaagatattgtgttcctggccacagacatcaacctgcctggagctgtggactgggtgatgatgcagagctgcttcggccaccacttcatgctggtgctggagaagcaggagaagtatgagggccaccagcagttctttgccatcgtgctgctgattggcaccaggaagcaggctgaaaattttgcctaccgcctggagctgaatggaaacagaagaaggctgacctgggaggccacccccaggagcatccatgatggagtggccgccgccatcatgaacagcgactgcctggtgtttgacacagccatcgcccacctgtttgctgacaatggaaacctgggcatcaacgtgaccatcagcacctgctgcccctag

SEQ ID NO: 169506 - DNA, 990 bp, synthetic construct
  misc_feature 1..990: note = Description of Artificial Sequence: Synthetic coding sequence
  source 1..990: mol_type = other DNA
atgatgagcaacagcagcagcgagattgatgtgatcaagacccgcatccccacctatgatgaagatgacaacaccatcctgtatgcctatgagaccaagccagagtttgtgaacaaggagcccaacatcgtgtctgatgccagctgcaacacagaggagcagctgaagacagtggatgatgtgctgatccactgccaggtgatctatgatgccctgcagaacctggacaagaagattgatgtgatccggaggaaggtgtccaagatccagcgcttccacgcccggagcctgtggaccaaccacaagagatatggctacaagaagcacagctaccgcctggtgaagaagctgaagctgcagaagatgaagaagaatgaggtgtatgagaccttctcctacccagagagctacagccccaccctgcctgtgtccagaagagagaacaacagccccagcaacctgccccggcccagcttctgcatggaggagtaccagagagctgagctggaggaggaccccatcctgagcaggacccccagccctgtgcaccccagcgacttcagcgagcacaactgccagccctactatgccagtgatggagccacctacggcagcagcagcggcctgtgcctgggcaaccccagggctgacagcatccacaacacctacagcacagaccacgccagcgctgccccacccagcgtgaccaggagccctgtggagaatgatggctacatcgaggagggcagcatcaccaagcaccccagcacctggagcgtggaggccgtggtgctcttcctgaagcagacagaccccctggccctgtgccccctggtggacctcttccgcagccatgaaattgatggcaaggccctgctgctgctgaccagtgatgtgctgctgaagcacctgggcgtgaagctgggcacagctgtgaagctgtgctactacatcgaccggctgaagcagggcaaatgttttgagaactag

SEQ ID NO: 169507 - DNA, 909 bp, synthetic construct
  misc_feature 1..909: note = Description of Artificial Sequence: Synthetic coding sequence
  source 1..909: mol_type = other DNA
atgatgagcaacagcagcagcgagattgatgtgcaggagcccaacatcgtgtctgatgccagctgcaacacagaggagcagctgaagacagtggatgatgtgctgatccactgccaggtgatctatgatgccctgcagaacctggacaagaagattgatgtgatccggaggaaggtgtccaagatccagcgcttccacgcccggagcctgtggaccaaccacaagagatatggctacaagaagcacagctaccgcctggtgaagaagctgaagctgcagaagatgaagaagaatgaggtgtatgagaccttctcctacccagagagctacagccccaccctgcctgtgtcccggcgggagaacaacagccccagcaacctgccccggcccagcttctgcatggaggagtaccagagagctgagctggaggaggaccccatcctgagcaggacccccagccctgtgcaccccagcgacttcagcgagcacaactgccagccctactatgccagtgatggagccacctacggcagcagcagcggcctgtgcctgggcaaccccagggctgacagcatccacaacacctacagcacagaccacgccagcgctgcccctccttctgtgaccaggagccctgtggagaatgatggctacatcgaggagggcagcatcaccaagcaccccagcacctggagcgtggaggccgtggtgctcttcctgaagcagacagaccccctggccctgtgccccctggtggacctcttccgcagccatgaaattgatggcaaggccctgctgctgctgaccagtgatgtgctgctgaagcacctgggcgtgaagctgggcacagctgtgaagctgtgctactacatcgaccggctgaagcagggcaagtgctttgaaaattag

SEQ ID NO: 169508 - DNA, 627 bp, synthetic construct
  misc_feature 1..627: note = Description of Artificial Sequence: Synthetic coding sequence
  source 1..627: mol_type = other DNA
atgaagaagaatgaggtgtatgagaccttctcctacccagagagctacagccccaccctgcctgtgtcccggcgggagaacaacagccccagcaacctgccccggcccagcttctgcatggaggagtaccagagagctgagctggaggaggaccccatcctgagcaggacccccagccctgtgcaccccagcgacttcagcgagcacaactgccagccctactatgccagtgatggagccacctacggcagcagcagcggcctgtgcctgggcaaccccagggctgacagcatccacaacacctacagcacagaccacgccagcgctgcccctccttctgtgaccaggagccctgtggagaatgatggctacatcgaggagggcagcatcaccaagcaccccagcacctggagcgtggaggccgtggtgctcttcctgaagcagacagaccccctggccctgtgccccctggtggacctcttccgcagccatgaaattgatggcaaggccctgctgctgctgaccagtgatgtgctgctgaagcacctgggcgtgaagctgggcacagctgtgaagctgtgctactacatcgaccggctgaagcagggcaagtgctttgaaaattag

SEQ ID NO: 169509 - DNA, 627 bp, synthetic construct; identical to SEQ ID NO: 169508
  misc_feature 1..627: note = Description of Artificial Sequence: Synthetic coding sequence
  source 1..627: mol_type = other DNA

SEQ ID NO: 169510 - DNA, 447 bp, synthetic construct
  misc_feature 1..447: note = Description of Artificial Sequence: Synthetic coding sequence
  source 1..447: mol_type = other DNA
atgatgagcaacagcagcagcgagattgatgtgcaggagcccaacatcgtgtctgatgccagctgcaacacagaggagcagctgaagacagtggatgatgtgctgatccactgccaggtgatctatgatgccctgcagaacctggacaagaagattgatgtgatccggaggaaggtgtccaagatccagcgcttccacgcccggagcctgtggaccaaccacaagagatatggctacaagaagcacagctaccgcctggtgaagaagctgaagctgcagaagatgaagaagaatgaggtgtatgagaccttctcctacccagagagctacagccccaccctgcctgtgtcccggcgggagaacaacagccccagcaacctgccccggcccagcttctgcatggaggagtaccagagagctgagctggaggaggaccccatcctgtag

SEQ ID NO: 169511 - DNA, 2103 bp, synthetic construct
  misc_feature 1..2103: note = Description of Artificial Sequence: Synthetic coding sequence
  source 1..2103: mol_type = other DNA
atgggccagacagtgaatgaagattccatggatgtgaagaaggagaaccaggagaagaccccccagagcagcaccagctctgtgcagagagatgacttccactgggaggagtacctgaaggagaccggcagcatcagcgcccccagcgagtgcttccggcagagccagatcccccctgtgaatgacttcaaggtgggcatgaagctggaggcccgggaccccagaaatgccacctctgtgtgcatcgccaccgtcatcggcatcactggagcccggctgcggctgcggctggatggcagtgacaacagaaatgacttctggaggctggtggacagcccagacatccagcctgtgggcacctgtgagaaggagggggacctgctgcagccccccctgggctaccagatgaacaccagctcctggcccatgttcctgctgaagaccctgaatggcagcgagatggccagcgccaccctcttcaagaaggagccccccaagccacccctgaacaacttcaaggtgggcatgaagctggaggccatcgacaagaagaacccctacctgatctgcccagccaccatcggagatgtgaagggagatgaggtgcacatcacctttgatggctggagcggggcctttgactactggtgcaagtatgacagccgggacatcttccctgctggctggtgccgcctgactggagatgtgctgcagcccccaggcacctctgtgcccatcgtgaagaacatcgccaagacagagagcagccccagcgaggccagccagcacagcatgcagagcccccagaagaccaccctcatcctgcccacccagcaggtgagaagaagcagccgcatcaagcccccaggccccacagctgtgcccaagaggagcagctctgtgaagaacatcacccccaggaagaagggccccaacagcggcaagaaggagaagcccctgcctgtgatctgcagcaccagcgctgccagcctgaagagcctgacccgggaccggggcatgctgtacaaggatgtggccagcggcccctgcaagatcgtgatgagcacagtgtgtgtgtatgtgaacaagcacggcaactttggcccccacctggaccccaagaggatccagcagctgcctgaccactttggacctggccctgtgaatgtggtgctgcggagaattgtgcaggcctgtgtggactgtgccctggagaccaagacagtgtttggctacctgaagccagacaacagaggaggagaggtgatcacagccagctttgatggagagacccacagcatccagctgccccctgtgaacagcgccagctttgccctgcgcttcctggagaacttctgccacagcctgcagtgtgacaacctgctgagcagccagcccttcagcagcagccggggccacacccacagcagcgctgagcatgacaagaaccagagcgccaaggaggatgtgacagagcggcagagcaccaagaggagcccccagcagacagtgccctacgtggtgcccctgagccccaagctgcccaagaccaaggagtatgccagcgagggggagcccctgtttgctgggggcagcgccatccccaaggaggagaacctgtctgaggacagcaagagcagcagcctgaacagcggcaactacctgaacccagcctgcaggaaccccatgtacatccacacctctgtgtcccaggacttcagccgctctgtgcccggcaccaccagcagccccctggtgggggacatcagccccaagagcagcccccatgaggtgaagttccagatgcagaggaagtctgaggcccccagctacatcgctgtgcctgaccccagcgtgctgaagcagggcttcagcaaggaccccagcacctggagcgtggatgaggtgatccagttcatgaagcacacagacccccagatcagcggccccctggccgacctcttccggcagcacgagattgatggcaaggccctcttcctgctgaagagtgatgtgatgatgaagtacatgggcctgaagctgggccctgccctgaagctgtgctactacatcgagaagctgaaggagggcaagtacagctag

SEQ ID NO: 169512 - DNA, 1038 bp, synthetic construct
  misc_feature 1..1038: note = Description of Artificial Sequence: Synthetic coding sequence
  source 1..1038: mol_type = other DNA
atgcagagcccccagaagaccaccctcatcctgcccacccagcaggtgagaagaagcagccgcatcaagcccccaggccccacagctgtgcccaagaggagcagctctgtgaagaacatcacccccaggaagaagggccccaacagcggcaagaaggagaagcccctgcctgtgatctgcagcaccagcgctgccagcctgaagagcctgacccgggaccggggcatgctgtacaaggatgtggccagcggcccctgcaagatcgtgatgagcacagtgtgtgtgtatgtgaacaagcacggcaactttggcccccacctggaccccaagaggatccagcagctgcctgaccactttggacctggccctgtgaatgtggtgctgcggagaattgtgcaggcctgtgtggactgtgccctggagaccaagacagtgtttggctacctgaagccagacaacagaggaggagaggtgatcacagccagctttgatggagagacccacagcatccagctgccccctgtgaacagcgccagctttgccctgcgcttcctggagaacttctgccacagcctgcagtgtgacaacctgctgagcagccagcccttcagcagcagccggggccacacccacagcagcgctgagcatgacaagaaccagagcgccaaggaggatgtgacagagcggcagagcaccaagaggagcccccagcagacagtgccctacgtggtgcccctgagccccaagctgcccaagaccaaggagtatgccagcgagggggagcccctgtttgctgggggcagcgccatccccaaggaggagaacctgtctgaggacagcaagagcagcagcctgaacagcggcaactacctgaacccagcctgcaggaaccccatgtacatccacacctctgtgtcccaggacttcagccgctctgtgcccggcaccaccagcagccccctggtgggggacatcagccccaagagcagcccccatgaggtgaagttccagatgcagaggaagtctgagggcaactag

SEQ ID NO: 169513 - DNA, 378 bp, synthetic construct
  misc_feature 1..378: note = Description of Artificial Sequence: Synthetic coding sequence
  source 1..378: mol_type = other DNA
tgagccaaggaggatgtgacagagcggcagagcaccaagaggagcccccagcagacagtgccctacgtggtgcccctgagccccaagctgcccaagaccaaggagtatgccagcgagggggagcccctgtttgctgggggcagcgccatccccaaggaggagaacctgtctgaggacagcaagagcagcagcctgaacagcggcaactacctgaacccagcctgcaggaaccccatgtacatccacacctctgtgtcccaggacttcagccgctctgtgcccggcaccaccagcagccccctggtgggggacatcagccccaagagcagcccccatgaggtgaagttccagatgcagaggaagtctgagggcaactag

SEQ ID NO: 169514 - DNA, 1734 bp, synthetic construct
  misc_feature 1..1734: note = Description of Artificial Sequence: Synthetic coding sequence
  source 1..1734: mol_type = other DNA
atgggccagacagtgaatgaagattccatggatgtgaagaaggagaaccaggagaagaccccccagagccagatcccccctgtgaatgacttcaaggtgggcatgaagctggaggcccgggaccccagaaatgccacctctgtgtgcatcgccaccgtcatcggcatcactggagcccggctgcggctgcggctggatggcagtgacaacagaaatgacttctggaggctggtggacagcccagacatccagcctgtgggcacctgtgagaaggagggggacctgctgcagccccccctgggctaccagatgaacaccagctcctggcccatgttcctgctgaagaccctgaatggcagcgagatggccagcgccaccctcttcaagaaggagccccccaagccacccctgaacaacttcaaggtgggcatgaagctggaggccatcgacaagaagaacccctacctgatctgcccagccaccatcggagatgtgaagggagatgaggtgcacatcacctttgatggctggagcggggcctttgactactggtgcaagtatgacagccgggacatcttccctgctggctggtgccgcctgactggagatgtgctgcagcccccaggcacctctgtgcccatcgtgaagaacatcgccaagacagagagcagccccagcgaggccagccagcacagcatgcagagcccccagaagaccaccctcatcctgcccacccagcaggtgagaagaagcagccgcatcaagcccccaggccccacagctgtgcccaagaggagcagctctgtgaagaacatcacccccaggaagaagggccccaacagcggcaagaaggagaagcccctgcctgtgatctgcagcaccagcgctgccagcctgaagagcctgacccgggaccggggcatgctgtacaaggatgtggccagcggcccctgcaagatcgtgatgagcacagtgtgtgtgtatgtgaacaagcacggcaactttggcccccacctggaccccaagaggatccagcagctgcctgaccactttggacctggccctgtgaatgtggtgctgcggagaattgtgcaggcctgtgtggactgtgccctggagaccaagacagtgtttggctacctgaagccagacaacagaggaggagaggtgatcacagccagctttgatggagagacccacagcatccagctgccccctgtgaacagcgccagctttgccctgcgcttcctggagaacttctgccacagcctgcagtgtgacaacctgctgagcagccagcccttcagcagcagccggggccacacccacagcagcgctgagcatgacaagaaccagagcgccaaggaggatgtgacagagcggcagagcaccaagaggagcccccagcagacagtgccctacgtggtgcccctgagccccaagctgcccaagaccaaggagtatgccagcgagggggagcccctgtttgctgggggcagcgccatccccaaggaggagaacctgtctgaggacagcaagagcagcagcctgaacagcggcaactacctgaacccagcctgcaggaaccccatgtacatccacacctctgtgtcccaggacttcagccgctctgtgcccggcaccaccagcagccccctggtgggggacatcagccccaagagcagcccccatgaggtgaagttccagatgcagaggaagtctgagggcaactag

SEQ ID NO: 169515 - DNA, 615 bp, synthetic construct
  misc_feature 1..615: note = Description of Artificial Sequence: Synthetic coding sequence
  source 1..615: mol_type = other DNA
atgcagagctatgccagcgccatgctgagcgtcttcaacagtgatgactacagccctgctgtgcaggagaacatcccagccctgcggcgcagcagcagcttcctgtgcacagagagctgcaacagcaagtaccagtgtgagaccggggagaacagcaaaggaaatgtgcaggacagagtgaagaggcccatgaatgccttcatcgtgtggagccgggaccagaggaggaagatggccctggagaaccccaggatgaggaacagcgagatcagcaagcagctgggctaccagtggaagatgctgacagaggccgagaagtggcccttcttccaggaggcccagaagctgcaggccatgcaccgggagaagtaccccaactacaagtaccggcccaggaggaaggccaagatgctgcccaagaactgcagcctgctgcctgctgaccctgcctctgtgctgtgcagcgaggtgcagctggacaacagactctacagagatgactgcaccaaggccacccacagcaggatggagcaccagctgggccacctgccccccatcaatgctgccagcagcccccagcagagggaccgctacagccactggaccaagctgtag

SEQ ID NO: 169516 - DNA, 594 bp, synthetic construct
  misc_feature 1..594: note = Description of Artificial Sequence: Synthetic coding sequence
  source 1..594: mol_type = other DNA
atgcagagctatgccagcgccatgctgagcgtcttcaacagtgatgactacagccctgctgtgcaggagaacatcccagccctgcggcgcagcagcagcttcctgtgcacagagagctgcaacagcaagtaccagtgtgagaccggggagaacagcaaaggaaatgtgcaggacagagtgaagaggcccatgaatgccttcatcgtgtggagccgggaccagaggaggaagatggccctggagaaccccaggatgaggaacagcgagatcagcaagcagctgggctaccagtggaagatgctgacagaggccgagaagtggcccttcttccaggaggcccagaagctgcaggccatgcaccgggagaagtaccccaactacaagtaccggcccaggaggaaggccaagatgctgcccaagaactgcagcctgctgcctgctgaccctgcctctgtgctgtgcagcgaggtgcagctggacaacagactctacagagatgactgcaccaaggccacccacagcaggatggagcaccagctgggccacctgccccccatcaatgctgccagcgctgccaccggccccctgcagtag

SEQ ID NO: 169517 - DNA, 498 bp, synthetic construct
  misc_feature 1..498: note = Description of Artificial Sequence: Synthetic coding sequence
  source 1..498: mol_type = other DNA
atgcagagctatgccagcgccatgctgagcgtcttcaacagtgatgactacagccctgctgtgcaggagaacatcccagccctgcggcgcagcagcagcttcctgtgcacagagagctgcaacagcaagtaccagtgtgagaccggggagaacagcaaaggaaatgtgcaggacagagtgaagaggcccatgaatgccttcatcgtgtggagccgggaccagaggaggaagatggccctggagaaccccaggatgaggaacagcgagatcagcaagcagctgggctaccagtggaagatgctgacagaggccgagaagtggcccttcttccaggaggcccagaagctgcaggccatgcaccgggagaagtaccccaactacaagtaccggcccaggaggaaggccaagatgctgcccaagaactgcagcctgctgcctgctgaccctgcctctgtgctgtgcagcgaggtgcagggccagcaggtggtgcagggctag

SEQ ID NO: 169518 - DNA, 3729 bp, synthetic construct
  misc_feature 1..3729: note = Description of Artificial Sequence: Synthetic coding sequence
  source 1..3729: mol_type = other DNA
atgaagaacctgctgacagagaagtgcatcagcagccacaacttccaccagaaggtgatcaagcagaggatggagaagaaggtggacagccgctacttcaaggatggagctgtgaagaagccctacagcgccaagaccctgagcaacaagaagagcagcgccagctttggcatcagaagagagctgcccagcaccagccacctggtgcagtaccggggcacccacacctgcacccggcagggccgcctgcgggagctgcgcatccgctgtgtggccaggaagttcctgtacctgtggatccgcatgaccttcggccgggtcttccccagcaaggcccgcttctactatgagcagaggctgctgaggaaggtgtttgaggagtggaaggaggagtggtgggtgttccagcacgagtggaagctgtgtgtgcgggctgactgccactaccgctactacctgtacaacctgatgttccagacctggaagacctacgtgcggcagcagcaggagatgaggaacaagtacatccgggcagaggtgcatgatgccaagcagaagatgaggcaggcctggaagtcctggctgatctacgtggtggtgcggaggaccaagctgcagatgcagaccacagccctggagttccggcagaggatcatcctgcgggtgtggtggagcacctggaggcagaggctgggccaggtgcgggtgtcccgggccctgcacgccagcgccctgaagcaccgggccctgagcctgcaggtgcaggcctggagccagtggagggagcagctgctgtatgtgcagaaggagaagcagaaggtggtgtctgctgtgaagcaccaccagcactggcagaagaggcgcttcctgaaggcctggctggagtacctgcaggtgcggcgggtgaagaggcagcagaatgagatggccgagcgcttccaccacgtgacagtgctgcagatctacttctgtgactggcagcaggcctgggagcggcgggagagcctgtatgcccaccacgcccaggtggagaagctggccaggaagatggccctgcggcgggccttcacccactggaagcactacatgctgctgtgtgccgaggaggccgcccagtttgagatggccgaggagcaccaccgccacagccagctgtacttctgcttccgggccctgaaggacaacgtgacccacgcccacctgcagcagatcagaagaaacctggcccaccagcagcacggcgtgaccctgctgcaccgcttctggaacctgtggaggagccagatcgagcagaagaaggagcgggagctgctgcccctgctgcatgctgcctgggaccactaccgcatcgccctgctgtgcaagtgcatcgagctgtggctgcagtacacccagaagaggcgctacaagcagctgctgcaggcccgggcagatggccacttccagcagagggccctgcctgctgccttccacacctggaaccggctgtggcgctggaggcaccaggagaatgtgctgagcgcccgggccacccgcttccaccgggagaccctggagaagcaggtgttcagcctgtggaggcagaagatgttccagcacagagaaaatcggctggccgagaggatggccatcctgcatgctgagcggcagctgctgtaccgctcctggttcatgtggcaccagcaggccgccgcccggcaccaggagcaggagtggcagacagtggcctgtgcccaccaccgccacggccgcctgaagaaggccttctgcctgtggagggagagcgcccagggcctgaggacagagaggacaggccgggtgcgggctgctgagttccacatggcccagctgctgcgctgggcctggagccagtggagagaatgtctggccctgcggggagctgagcggcagaagctgatgagagctgacctgcaccaccagcacagcgtgctgcaccgggccctgcaggcctgggtgacctaccagggccgggtgcgcagcatcctgcgggaggtggccgcccgggagagccagcacaaccggcagctgctgcggggggccctgcggcgctggaaggagaacaccatggcccgggtggatgaggccaagaagaccttccaggccagcacccactacagaaggaccatctgcagcaaggtgctggtgcagtggagggaggccgtgtctgtgcagatgtactaccggcagcaggaggactgtgccatctgggaggcccagaaggtgctggaccggggctgcctgcggacctggttccagcgctggtgggactgcagccgccgcagcgcccagcagaggctgcagctggagagagctgtgcagcaccaccaccggcagctgctgctggagggcctggcccgctggaagacccaccacctgcagtgtgtgaggaagaggctgctgcaccggcagagcacccagctgctggcccagaggctgagcaggacctgcttccggcagtggaggcagcagctggccgcccggcggcaggagcagagggccaccgtgcgggccctgtggttctgggccttcagcctgcaggccaaggtgtgggccacctggctggcctttgtgctggagaggaggaggaagaaggcccggctgcagtgggccctgcaggcctaccagggccagctgctgcaggagggcgccacccggctgctgcgctttgctgcctccatgaaggccagccggcagcagctgcaggcccagcagcaggtgcaggccgcccacagcctgcacagagctgtgcggcgctgtgccaccctgtggaagcagaaggtgctgggccggggcggcaagccccagcccctggccgccatcgcccccagcaggaaggtgacctttgagggccccctgctgaacagaattgctgctggagctggagatggcaccctggagaccaagaggccccaggccagccggcccctgggcgccctgggccgcctggccgctgaggagccccacgccctggagctgaacacagcccacagcgccaggaagcagccccggcggccccacttcctgctggagcccgcccagagccagaggccccagaagccccaggagcacggcctgggcatggcccagcctgctgcccccagcctgacccggcccttcctggccgaggcccccacagccctggtgccccacagccccctgcccggggccctgagcagcgcccctggccccaagcagcccccaacagccagcacaggccctgagctgctgctgctgcccctgagcagcttcatgccctgtggggccgccgccccagcccgggtgtctgcccagagggccaccccccgggacaagccccctgtgcccagcagcctggcctctgtgcctgacccccacctgctgctgcccggggacttcagcgccaccagggctggccctggcctgagcacagctggcagcctggacctggaggccgagctggaggagatccagcagcagctgctgcactaccagaccaccaagcagaacctgtggagctgccggcggcaggccagcagcctgcggcgctggctggagctgaaccgggaggagcccggccctgaggaccaggaggtggagcagcaggtgcagaaggagctggagcaggtggagatgcagatccagctgctggccgaggagctgcaggcccagaggcagcccatcggggcctgtgtggcccgcatccaggccctgcggcaggccctgtgctag

SEQ ID NO: 169519 - DNA, 3483 bp, synthetic construct
  misc_feature 1..3483: note = Description of Artificial Sequence: Synthetic coding sequence
  source 1..3483: mol_type = other DNA
atgaagaacctgctgacagagaagtgcatcagcagccacaacttccaccagaaggtgatcaagcagaggatggagaagaaggtggacagccgcttctactatgagcagaggctgctgaggaaggtgtttgaggagtggaaggaggagtggtgggtgttccagcacgagtggaagctgtgtgtgcgggctgactgccactaccgctactacctgtacaacctgatgttccagacctggaagacctacgtgcggcagcagcaggagatgaggaacaagtacatccgggcagaggtgcatgatgccaagcagaagatgaggcaggcctggaagtcctggctgatctacgtggtggtgcggaggaccaagctgcagatgcagaccacagccctggagttccggcagaggatcatcctgcgggtgtggtggagcacctggaggcagaggctgggccaggtgcgggtgtcccgggccctgcacgccagcgccctgaagcaccgggccctgagcctgcaggtgcaggcctggagccagtggagggagcagctgctgtatgtgcagaaggagaagcagaaggtggtgtctgctgtgaagcaccaccagcactggcagaagaggcgcttcctgaaggcctggctggagtacctgcaggtgcggcgggtgaagaggcagcagaatgagatggccgagcgcttccaccacgtgacagtgctgcagatctacttctgtgactggcagcaggcctgggagcggcgggagagcctgtatgcccaccacgcccaggtggagaagctggccaggaagatggccctgcggcgggccttcacccactggaagcactacatgctgctgtgtgccgaggaggccgcccagtttgagatggccgaggagcaccaccgccacagccagctgtacttctgcttccgggccctgaaggacaacgtgacccacgcccacctgcagcagatcagaagaaacctggcccaccagcagcacggcgtgaccctgctgcaccgcttctggaacctgtggaggagccagatcgagcagaagaaggagcgggagctgctgcccctgctgcatgctgcctgggaccactaccgcatcgccctgctgtgcaagtgcatcgagctgtggctgcagtacacccagaagaggcgctacaagcagctgctgcaggcccgggcagatggccacttccagcagagggccctgcctgctgccttccacacctggaaccggctgtggcgctggaggcaccaggagaatgtgctgagcgcccgggccacccgcttccaccgggagaccctggagaagcaggtgttcagcctgtggaggcagaagatgttccagcacagagaaaatcggctggccgagaggatggccatcctgcatgctgagcggcagctgctgtaccgctcctggttcatgtggcaccagcaggccgccgcccggcaccaggagcaggagtggcagacagtggcctgtgcccaccaccgccacggccgcctgaagaaggccttctgcctgtggagggagagcgcccagggcctgaggacagagaggacaggccgggtgcgggctgctgagttccacatggcccagctgctgcgctgggcctggagccagtggagagaatgtctggccctgcggggagctgagcggcagaagctgatgagagctgacctgcaccaccagcacagcgtgctgcaccgggccctgcaggcctgggtgacctaccagggccgggtgcgcagcatcctgcgggaggtggccgcccgggagagccagcacaaccggcagctgctgcggggggccctgcggcgctggaaggagaacaccatggcccgggtggatgaggccaagaagaccttccaggccagcacccactacagaaggaccatctgcagcaaggtgctggtgcagtggagggaggccgtgtctgtgcagatgtactaccggcagcaggaggactgtgccatctgggaggcccagaaggtgctggaccggggctgcctgcggacctggttccagcgctggtgggactgcagccgccgcagcgcccagcagaggctgcagctggagagagctgtgcagcaccaccaccggcagctgctgctggagggcctggcccgctggaagacccaccacctgcagtgtgtgaggaagaggctgctgcaccggcagagcacccagctgctggcccagaggctgagcaggacctgcttccggcagtggaggcagcagctggccgcccggcggcaggagcagagggccaccgtgcgggccctgtggttctgggccttcagcctgcaggccaaggtgtgggccacctggctggcctttgtgctggagaggaggaggaagaaggcccggctgcagtgggccctgcaggcctaccagggccagctgctgcaggagggcgccacccggctgctgcgctttgctgcctccatgaaggccagccggcagcagctgcaggcccagcagcaggtgcaggccgcccacagcctgcacagagctgtgcggcgctgtgccaccctgtggaagcagaaggtgctgggccggggcggcaagccccagcccctggccgccatcgcccccagcaggaaggtgacctttgagggccccctgctgaacagaattgctgctggagctggagatggcaccctggagaccaagaggccccaggccagccggcccctgggcgccctgggccgcctggccgctgaggagccccacgccctggagctgaacacagcccacagcgccaggaagcagccccggcggccccacttcctgctggagcccgcccagagccagaggccccagaagccccaggagcacggcctgggcatggcccagcctgctgcccccagcctgacccggcccttcctggccgaggcccccacagccctggtgccccacagccccctgcccggggccctgagcagcgcccctggccccaagcagcccccaacagccagcacaggccctgagctgctgctgctgcccctgagcagcttcatgccctgtggggccgccgccccagcccgggtgtctgcccagagggccaccccccgggacaagccccctgtgcccagcagcctggcctctgtgcctgacccccacctgctgctgcccggggacttcagcgccaccagggctggccctggcctgagcacagctggcagcctggacctggaggccgagctggaggagatccagcagcagctgctgcactaccagaccaccaagcagaacctgtggagctgccggcggcaggccagcagcctgcggcgctggctggagctgaaccgggaggagcccggccctgaggaccaggaggtggagcagcaggtgcagaaggagctggagcaggtggagatgcagatccagctgctggccgaggagctgcaggcccagaggcagcccatcggggcctgtgtggcccgcatccaggccctgcggcaggccctgtgctag

SEQ ID NO: 169520 - DNA, 3096 bp, synthetic construct
  misc_feature 1..3096: note = Description of Artificial Sequence: Synthetic coding sequence
  source 1..3096: mol_type = other DNA
atgaagaacctgctgacagagaagtgcatcagcagccacaacttccaccagaaggtgatcaagcagaggatggagaagaaggtggacagccgcttctactatgagcagaggctgctgaggaaggtgtttgaggagtggaaggaggagtggtgggtgttccagcacgagtggaagctgtgtgtgcgggctgactgccactacagagtgtggtggagcacctggaggcagaggctgggccaggtgcgggtgtcccgggccctgcacgccagcgccctgaagcaccgggccctgagcctgcaggtgcaggcctggagccagtggagggagcagctgctgtatgtgcagaaggagaagcagaaggtggtgtctgctgtgaagcaccaccagcactggcagaagaggcgcttcctgaaggcctggctggagtacctgcaggtgagaagagtgaagaggcagcagaatgagatggccgagcgcttccaccacgtgacagtgctgcagatctacttctgtgactggcagcaggcctgggagcggcgggagagcctgtatgcccaccacgcccaggtggagaagctggccaggaagatggccctgcggcgggccttcacccactggaagcactacatgctgctgtgtgccgaggaggccgcccagtttgagatggccgaggagcaccaccgccacagccagctgtacttctgcttccgggccctgaaggacaacgtgacccacgcccacctgcagcagatcagaagaaacctggcccaccagcagcacggcgtgaccctgctgcaccgcttctggaacctgtggaggagccagatcgagcagaagaaggagcgggagctgctgcccctgctgcacgccgcctgggaccactacagaattgccctgctgtgcaagtgcatcgagctgtggctgcagtacacccagaagaggcgctacaagcagctgctgcaggcccgggcagatggccacttccagcagagggccctgcctgctgccttccacacctggaaccggctgtggcgctggaggcaccaggagaatgtgctgagcgcccgggccacccgcttccaccgggagaccctggagaagcaggtgttcagcctgtggaggcagaagatgttccagcaccgggagaaccggctggccgagaggatggccatcctgcacgccgagcggcagctgctgtaccgctcctggttcatgtggcaccagcaggccgccgcccggcaccaggagcaggagtggcagacagtggcctgtgcccaccacagacatggccgcctgaagaaggccttctgcctgtggagggagagcgcccagggcctgaggacagagaggacaggccgggtgcgggctgctgagttccacatggcccagctgctgcgctgggcctggagccagtggagggagtgcctggccctgcggggagctgagcggcagaagctgatgagagctgacctgcaccaccagcacagcgtgctgcaccgggccctgcaggcctgggtgacctaccagggccgggtgcgcagcatcctgcgggaggtggccgcccgggagagccagcacaaccggcagctgctgcggggggccctgcggcgctggaaggagaacaccatggcccgggtggatgaggccaagaagaccttccaggccagcacccactacagaaggaccatctgcagcaaggtgctggtgcagtggagggaggccgtgtctgtgcagatgtactaccggcagcaggaggactgtgccatctgggaggcccagaaggtgctggaccggggctgcctgcggacctggttccagcgctggtgggactgcagcagaagaagtgcccagcagaggctgcagctggagagagctgtgcagcaccaccaccggcagctgctgctggagggcctggcccgctggaagacccaccacctgcagtgtgtgaggaagaggctgctgcaccggcagagcacccagctgctggcccagaggctgagcaggacctgcttccggcagtggaggcagcagctggccgcccggcggcaggagcagagggccaccgtgcgggccctgtggttctgggccttcagcctgcaggccaaggtgtgggccacctggctggcctttgtgctggagaggaggaggaagaaggcccggctgcagtgggccctgcaggcctaccagggccagctgctgcaggagggcgccacccggctgctgcgctttgctgcctccatgaaggccagccggcagcagctgcaggcccagcagcaggtgcaggccgcccacagcctgcacagagctgtgagaagatgtgccaccctgtggaagcagaaggtgctgggccggggcggcaagccccagcccctggccgccatcgcccccagcaggaaggtgacctttgagggccccctgctgaacagaattgctgctggagctggagatggcaccctggagaccaagaggccccaggccagccggcccctgggcgccctgggccgcctggccgctgaggagccccacgccctggagctgaacacagcccacagcgccaggaagcagccccggcggccccacttcctgctggagcccgcccagagccagaggccccagaagccccaggagcacggcctgggcatggcccagcctgctgcccccagcctgacccggcccttcctggccgaggcccccacagccctggtgccccacagccccctgcccggggccctgagcagcgcccctggccccaagcagcccccaacagccagcactggacctgagctgctgctgctgcccctgagcagcttcatgccctgtggggctgctgccccagcccgggtgtctgcccagagggccaccccccgggacaagccccctgtgcccagcagcctggcctctgtgcctgacccccacctgctgctgcccggggacttcagcgccacccgggccggccctggcctgagcacagctgcctggaccctgcggctgaacctgcggcgcagcagcagcaactactgcaccaccaggcctcccagcaggaccagcggccctgtgggcggcaagagagctgcctgtgccggcggctggagctag

SEQ ID NO: 169521 - DNA, 2976 bp, synthetic construct
  misc_feature 1..2976: note = Description of Artificial Sequence: Synthetic coding sequence
  source 1..2976: mol_type = other DNA
atgaagaacctgctgacagagaagtgcatcagcagccacaacttccaccagaaggtgatcaagcagaggatggagaagaaggtggacagccgctacttcaaggatggagctgtgaagaagccctacagcgccaagaccctgagcaacaagaagagcagcgccagctttggcatcagaagagagctgcccagcaccagccacctggtgcagtaccggggcacccacacctgcacccggcagggccgcctgcgggagctgcgcatccgcttctactatgagcagaggctgctgaggaaggtgtttgaggagtggaaggaggagtggtgggtgttccagcacgagtggaagctgtgtgtgcgggctgactgccactaccgctactacctgtacaacctgatgttccagacctggaagacctacgtgcggcagcagcaggagatgaggaacaagtacatccgggcagaggtgcatgatgccaagcagaagatgaggcaggcctggaagtcctggctgatctacgtggtggtgcggaggaccaagctgcagatgcagaccacagccctggagttccggcagaggatcatcctgcgggtgtggtggagcacctggaggcagaggctgggccaggtgcgggtgtcccgggccctgcacgccagcgccctgaagcaccgggccctgagcctgcaggtgcaggcctggagccagtggagggagcagctgctgtatgtgcagaaggagaagcagaaggtggtgtctgctgtgaagcaccaccagcactggcagaagaggcgcttcctgaaggcctggctggagtacctgcaggtgcggcgggtgaagaggcagcagaatgagatggccgagcgcttccaccacgtgacagtgctgcagatctacttctgtgactggcagcaggcctgggagcggcgggagagcctgtatgcccaccacgcccaggtggagaagctggccaggaagatggccctgcggcgggccttcacccactggaagcactacatgctgctgtgtgccgaggaggccgcccagtttgagatggccgaggagcaccaccgccacagccagctgtacttctgcttccgggccctgaaggacaacgtgacccacgcccacctgcagcagatcagaagaaacctggcccaccagcagcacggcgtgaccctgctgcaccgcttctggaacctgtggaggagccagatcgagcagaagaaggagcgggagctgctgcccctgctgcatgctgcctgggaccactaccgcatcgccctgctgtgcaagtgcatcgagctgtggctgcagtacacccagaagaggcgctacaagcagctgctgcaggcccgggcagatggccacttccagcagagggccctgcctgctgccttccacacctggaaccggctgtggcgctggaggcaccaggagaatgtgctgagcgcccgggccacccgcttccaccgggagaccctggagaagcaggtgttcagcctgtggaggcagaagatgttccagcacagagaaaatcggctggccgagaggatggccatcctgcatgctgagcggcagctgctgtaccgctcctggttcatgtggcaccagcaggccgccgcccggcaccaggagcaggagtggcagacagtggcctgtgcccaccaccgccacggccgcctgaagaaggccttctgcctgtggagggagagcgcccagggcctgaggacagagaggacaggccgggtgcgggctgctgagttccacatggcccagctgctgcgctgggcctggagccagtggagagaatgtctggccctgcggggagctgagcggcagaagctgatgagagctgacctgcaccaccagcacagcgtgctgcaccgggccctgcaggcctgggtgacctaccagggccgggtgcgcagcatcctgcgggaggtggccgcccgggagagccagcagctgcaggcccagcagcaggtgcaggccgcccacagcctgcacagagctgtgagaagatgtgccaccctgtggaagcagaaggtgctgggccggggcggcaagccccagcccctggccgccatcgcccccagcaggaaggtgacctttgagggccccctgctgaacagaattgctgctggagctggagatggcaccctggagaccaagaggccccaggccagccggcccctgggcgccctgggccgcctggccgctgaggagccccacgccctggagctgaacacagcccacagcgccaggaagcagccccggcggccccacttcctgctggagcccgcccagagccagaggccccagaagccccaggagcacggcctgggcatggcccagcctgctgcccccagcctgacccggcccttcctggccgaggcccccacagccctggtgccccacagccccctgcccggggccctgagcagcgcccctggccccaagcagcccccaacagccagcactggacctgagctgctgctgctgcccctgagcagcttcatgccctgtggggctgctgccccagcccgggtgtctgcccagagggccaccccccgggacaagccccctgtgcccagcagcctggcctctgtgcctgacccccacctgctgctgcccggggacttcagcgccacccgggccggccctggcctgagcacagctggcagcctggacctggaggccgagctggaggagatccagcagcagctgctgcactaccagaccaccaagcagaacctgtggagctgccggcggcaggccagcagcctgcggcgctggctggagctgaaccgggaggagcccggccctgaggaccaggaggtggagcagcaggtgcagaaggagctggagcaggtggagatgcagatccagctgctggccgaggagctgcaggcccagaggcagcccatcggggcctgtgtggcccgcatccaggccctgcggcaggccctgtgctag

SEQ ID NO: 169522 - DNA, 3636 bp, synthetic construct
  misc_feature 1..3636: note = Description of Artificial Sequence: Synthetic coding sequence
  source 1..3636: mol_type = other DNA
atgaagaacctgctgacagagaagtgcatcagcagccacaacttccaccagaaggtgatcaagcagaggatggagaagaaggtggacagccgctacttcaaggatggagctgtgaagaagccctacagcgccaagaccctgagcaacaagaagagcagcgccagctttggcatcagaagagagctgcccagcaccagccacctggtgcagtaccggggcacccacacctgcacccggcagggccgcctgcgggagctgcgcatccgctgtgtggccaggaagttcctgtacctgtggatccgcatgaccttcggccgggtcttccccagcaaggcccgcttctactatgagcagaggctgctgaggaaggtgtttgaggagtggaaggaggagtggtgggtgttccagcacgagtggaagctgtgtgtgcgggctgactgccactaccgctactacctgtacaacctgatgttccagacctggaagacctacgtgcggcagcagcaggagatgaggaacaagtacatccgggcagaggtgcatgatgccaagcagaagatgaggcaggcctggaagtcctggctgatctacgtggtggtgcggaggaccaagctgcagatgcagaccacagccctggagttccggcagaggatcatcctgcgggtgtggtggagcacctggaggcagaggctgggccaggtgcgggtgtcccgggccctgcacgccagcgccctgaagcaccgggccctgagcctgcaggtgcaggcctggagccagtggagggagcagctgctgtatgtgcagaaggagaagcagaaggtggtgtctgctgtgaagcaccaccagcactggcagaagaggcgcttcctgaaggcctggctggagtacctgcaggtgcggcgggtgaagaggcagcagaatgagatggccgagcgcttccaccacgtgacagtgctgcagatctacttctgtgactggcagcaggcctgggagcggcgggagagcctgtatgcccaccacgcccaggtggagaagctggccaggaagatggccctgcggcgggccttcacccactggaagcactacatgctgctgtgtgccgaggaggccgcccagtttgagatggccgaggagcaccaccgccacagccagctgctgctgcaccgcttctggaacctgtggaggagccagatcgagcagaagaaggagcgggagctgctgcccctgctgcacgccgcctgggaccactacagaattgccctgctgtgcaagtgcatcgagctgtggctgcagtacacccagaagaggcgctacaagcagctgctgcaggcccgggcagatggccacttccagcagagggccctgcctgctgccttccacacctggaaccggctgtggcgctggaggcaccaggagaatgtgctgagcgcccgggccacccgcttccaccgggagaccctggagaagcaggtgttcagcctgtggaggcagaagatgttccagcaccgggagaaccggctggccgagaggatggccatcctgcacgccgagcggcagctgctgtaccgctcctggttcatgtggcaccagcaggccgccgcccggcaccaggagcaggagtggcagacagtggcctgtgcccaccacagacatggccgcctgaagaaggccttctgcctgtggagggagagcgcccagggcctgaggacagagaggacaggccgggtgcgggctgctgagttccacatggcccagctgctgcgctgggcctggagccagtggagggagtgcctggccctgcggggagctgagcggcagaagctgatgagagctgacctgcaccaccagcacagcgtgctgcaccgggccctgcaggcctgggtgacctaccagggccgggtgcgcagcatcctgcgggaggtggccgcccgggagagccagcacaaccggcagctgctgcggggggccctgcggcgctggaaggagaacaccatggcccgggtggatgaggccaagaagaccttccaggccagcacccactacagaaggaccatctgcagcaaggtgctggtgcagtggagggaggccgtgtctgtgcagatgtactaccggcagcaggaggactgtgccatctgggaggcccagaaggtgctggaccggggctgcctgcggacctggttccagcgctggtgggactgcagcagaagaagtgcccagcagaggctgcagctggagagagctgtgcagcaccaccaccggcagctgctgctggagggcctggcccgctggaagacccaccacctgcagtgtgtgaggaagaggctgctgcaccggcagagcacccagctgctggcccagaggctgagcaggacctgcttccggcagtggaggcagcagctggccgcccggcggcaggagcagagggccaccgtgcgggccctgtggttctgggccttcagcctgcaggccaaggtgtgggccacctggctggcctttgtgctggagaggaggaggaagaaggcccggctgcagtgggccctgcaggcctaccagggccagctgctgcaggagggcgccacccggctgctgcgctttgctgcctccatgaaggccagccggcagcagctgcaggcccagcagcaggtgcaggccgcccacagcctgcacagagctgtgagaagatgtgccaccctgtggaagcagaaggtgctgggccggggcggcaagccccagcccctggccgccatcgcccccagcaggaaggtgacctttgagggccccctgctgaacagaattgctgctggagctggagatggcaccctggagaccaagaggccccaggccagccggcccctgggcgccctgggccgcctggccgctgaggagccccacgccctggagctgaacacagcccacagcgccaggaagcagccccggcggccccacttcctgctggagcccgcccagagccagaggccccagaagccccaggagcacggcctgggcatggcccagcctgctgcccccagcctgacccggcccttcctggccgaggcccccacagccctggtgccccacagccccctgcccggggccctgagcagcgcccctggccccaagcagcccccaacagccagcactggacctgagctgctgctgctgcccctgagcagcttcatgccctgtggggctgctgccccagcccgggtgtctgcccagagggccaccccccgggacaagccccctgtgcccagcagcctggcctctgtgcctgacccccacctgctgctgcccggggacttcagcgccacccgggccggccctggcctgagcacagctggcagcctggacctggaggccgagctggaggagatccagcagcagctgctgcactaccagaccaccaagcagaacctgtggagctgccggcggcaggccagcagcctgcggcgctggctggagctgaaccgggaggagcccggccctgaggaccaggaggtggagcagcaggtgcagaaggagctggagcaggtggagatgcagatccagctgctggccgaggagctgcaggcccagaggcagcccatcggggcctgtgtggcccgcatccaggccctgcggcaggccctgtgctag

SEQ ID NO: 169523 - DNA, 3483 bp, synthetic construct; identical to SEQ ID NO: 169519
  misc_feature 1..3483: note = Description of Artificial Sequence: Synthetic coding sequence
  source 1..3483: mol_type = other DNA

SEQ ID NO: 169524 - DNA, 240 bp, synthetic construct
  misc_feature 1..240: note = Description of Artificial Sequence: Synthetic coding sequence
  source 1..240: mol_type = other DNA
atgaagaacctgctgacagagaagtgcatcagcagccacaacttccaccagaaggtgatcaagcagaggatggagaagaaggtggacagccgctacttcaaggatggagctgtgaagaagccctacagcgccaagaccctgagcaacaagaagagcagcgccagctttggcatcagaagagagctgcccagcaccagccacctggtgcagtaccggggcacccacacctgcaccaggtag

SEQ ID NO: 169525 - DNA, 3564 bp, synthetic construct
  misc_feature 1..3564: note = Description of Artificial Sequence: Synthetic coding sequence
  source 1..3564: mol_type = other DNA
atgaagaacctgctgacagagaagtgcatcagcagccacaacttccaccagaaggtgatcaagcagaggatggagaagaaggtggacagccgctacttcaaggatggagctgtgaagaagccctacagcgccaagaccctgagcaacaagaagagcagcgccagctttggcatcagaagagagctgcccagcaccagccacctggtgcagtaccggggcacccacacctgcacccggcagggccgcctgcgggagctgcgcatccgcttctactatgagcagaggctgctgaggaaggtgtttgaggagtggaaggaggagtggtgggtgttccagcacgagtggaagctgtgtgtgcgggctgactgccactaccgctactacctgtacaacctgatgttccagacctggaagacctacgtgcggcagcagcaggagatgaggaacaagtacatccgggcagaggtgcatgatgccaagcagaagatgaggcaggcctggaagtcctggctgatctacgtggtggtgcggaggaccaagctgcagatgcagaccacagccctggagttccggcagaggatcatcctgcgggtgtggtggagcacctggaggcagaggctgggccaggtgcgggtgtcccgggccctgcacgccagcgccctgaagcaccgggccctgagcctgcaggtgcaggcctggagccagtggagggagcagctgctgtatgtgcagaaggagaagcagaaggtggtgtctgctgtgaagcaccaccagcactggcagaagaggcgcttcctgaaggcctggctggagtacctgcaggtgcggcgggtgaagaggcagcagaatgagatggccgagcgcttccaccacgtgacagtgctgcagatctacttctgtgactggcagcaggcctgggagcggcgggagagcctgtatgcccaccacgcccaggtggagaagctggccaggaagatggccctgcggcgggccttcacccactggaagcactacatgctgctgtgtgccgaggaggccgcccagtttgagatggccgaggagcaccaccgccacagccagctgctgctgcaccgcttctggaacctgtggaggagccagatcgagcagaagaaggagcgggagctgctgcccctgctgcacgccgcctgggaccactacagaattgccctgctgtgcaagtgcatcgagctgtggctgcagtacacccagaagaggcgctacaagcagctgctgcaggcccgggcagatggccacttccagcagagggccctgcctgctgccttccacacctggaaccggctgtggcgctggaggcaccaggagaatgtgctgagcgcccgggccacccgcttccaccgggagaccctggagaagcaggtgttcagcctgtggaggcagaagatgttccagcaccgggagaaccggctggccgagaggatggccatcctgcacgccgagcggcagctgctgtaccgctcctggttcatgtggcaccagcaggccgccgcccggcaccaggagcaggagtggcagacagtggcctgtgcccaccacagacatggccgcctgaagaaggccttctgcctgtggagggagagcgcccagggcctgaggacagagaggacaggccgggtgcgggctgctgagttccacatggcccagctgctgcgctgggcctggagccagtggagggagtgcctggccctgcggggagctgagcggcagaagctgatgagagctgacctgcaccaccagcacagcgtgctgcaccgggccctgcaggcctgggtgacctaccagggccgggtgcgcagcatcctgcgggaggtggccgcccgggagagccagcacaaccggcagctgctgcggggggccctgcggcgctggaaggagaacaccatggcccgggtggatgaggccaagaagaccttccaggccagcacccactacagaaggaccatctgcagcaaggtgctggtgcagtggagggaggccgtgtctgtgcagatgtactaccggcagcaggaggactgtgccatctgggaggcccagaaggtgctggaccggggctgcctgcggacctggttccagcgctggtgggactgcagcagaagaagtgcccagcagaggctgcagctggagagagctgtgcagcaccaccaccggcagctgctgctggagggcctggcccgctggaagacccaccacctgcagtgtgtgaggaagaggctgctgcaccggcagagcacccagctgctggcccagaggctgagcaggacctgcttccggcagtggaggcagcagctggccgcccggcggcaggagcagagggccaccgtgcgggccctgtggttctgggccttcagcctgcaggccaaggtgtgggccacctggctggcctttgtgctggagaggaggaggaagaaggcccggctgcagtgggccctgcaggcctaccagggccagctgctgcaggagggcgccacccggctgctgcgctttgctgcctccatgaaggccagccggcagcagctgcaggcccagcagcaggtgcaggccgcccacagcctgcacagagctgtgagaagatgtgccaccctgtggaagcagaaggtgctgggccggggcggcaagccccagcccctggccgccatcgcccccagcaggaaggtgacctttgagggccccctgctgaacagaattgctgctggagctggagatggcaccctggagaccaagaggccccaggccagccggcccctgggcgccctgggccgcctggccgctgaggagccccacgccctggagctgaacacagcccacagcgccaggaagcagccccggcggccccacttcctgctggagcccgcccagagccagaggccccagaagccccaggagcacggcctgggcatggcccagcctgctgcccccagcctgacccggcccttcctggccgaggcccccacagccctggtgccccacagccccctgcccggggccctgagcagcgcccctggccccaagcagcccccaacagccagcactggacctgagctgctgctgctgcccctgagcagcttcatgccctgtggggctgctgccccagcccgggtgtctgcccagagggccaccccccgggacaagccccctgtgcccagcagcctggcctctgtgcctgacccccacctgctgctgcccggggacttcagcgccacccgggccggccctggcctgagcacagctggcagcctggacctggaggccgagctggaggagatccagcagcagctgctgcactaccagaccaccaagcagaacctgtggagctgccggcggcaggccagcagcctgcggcgctggctggagctgaaccgggaggagcccggccctgaggaccaggaggtggagcagcaggtgcagaaggagctggagcaggtggagatgcagatccagctgctggccgaggagctgcaggcccagaggcagcccatcggggcctgtgtggcccgcatccaggccctgcggcaggccctgtgctag

SEQ ID NO: 169526 - DNA, 378 bp, synthetic construct
  misc_feature 1..378: note = Description of Artificial Sequence: Synthetic coding sequence
  source 1..378: mol_type = other DNA
atggatgctgtggccgtgtaccacggcaagatcagccgggagactggagagaagctgctgctggccaccggcctggatggcagctacctgctgcgggacagcgagagcgtgcctggggtgtactgcctgtgtgtgctgtaccacggctacatctacacctacagagtgtcccagacagaaacaggctcctggagcgctgagacagcccctggggtgcacaagcgctacttcaggaagatcaagaacctgatcagcgccttccagaagccagaccagggcatcgtcatccccctgcagtaccctgtggagaagaagagcagcgcccggagcacccagggcatccgggaggaccctgatgtgtgcctgaaggccccctag

SEQ ID NO: 169527 - DNA, 387 bp, synthetic construct
  misc_feature 1..387: note = Description of Artificial Sequence: Synthetic coding sequence
  source 1..387: mol_type = other DNA
atggatgctgtggccgtgtaccacggcaagatcagccgggagactggagagaagctgctgctggccaccggcctggatggcagctacctgctgcgggacagcgagagcgtgcctggggtgtactgcctgtgtgtgctgtaccacggctacatctacacctacagagtgtcccagacagaaacaggctcctggagcgctgagacagcccctggggtgcacaagcgctacttcaggaagatcaagaacctgatcagcgccttccagaagccagaccagggcatcgtcatccccctgcagtaccctgtggagaagaagagcagcgcccggagcacccagggcaccaccggcatcagagaagatcctgatgtgtgcctgaaggccccctag

SEQ ID NO: 169528 - DNA, 177 bp, synthetic construct
  misc_feature 1..177: note = Description of Artificial Sequence: Synthetic coding sequence
  source 1..177: mol_type = other DNA
atggatgctgtggccgtgtaccacggcaagatcagccgggagactggagagaagctgctgctggccaccggcctggatggcagctacctgctgcgggacagcgagagcgtgcctggggtgtactgcctgtgtgtgctgcaccactggggctacatcaagttcatcaacaagctgtag

SEQ ID NO: 169529 - DNA, 234 bp, synthetic construct
  misc_feature 1..234: note = Description of Artificial Sequence: Synthetic coding sequence
  source 1..234: mol_type = other DNA
atggacctgccctactaccacggccgcctgaccaagcaggactgtgagaccctgctgctgaaggagggcgtggatggcaacttcctgctgcgggacagcgagagcatccctggggtgctgtgcctgtgtgtgtccttcaagaacatcgtgtacacctaccgcatcttccgggagaagcacggctactaccgcatccagaacagcaacagcgactatgtggatgtgctgccctag

SEQ ID NO: 169530 - DNA, 399 bp, synthetic construct
  misc_feature 1..399: note = Description of Artificial Sequence: Synthetic coding sequence
  source 1..399: mol_type = other DNA
atggacctgccctactaccacggccgcctgaccaagcaggactgtgagaccctgctgctgaaggagggcgtggatggcaacttcctgctgcgggacagcgagagcatccctggggtgctgtgcctgtgtgtgtccttcaagaacatcgtgtacacctaccgcatcttccgggagaagcacggctactaccgcatccagacagctgagggcagccccaagcaggtgttccccagcctgaaggagctgatcagcaagtttgagaagcccaaccagggcatggtggtgcacctgctgaagcccatcaagaggaccagccccagcctgcgctggaggggcctgaagctggagctggagacctttgtgaacagcaacagcgactatgtggatgtgctgccctag

SEQ ID NO: 169531 - DNA, 2271 bp, synthetic construct
  misc_feature 1..2271: note = Description of Artificial Sequence: Synthetic coding sequence
  source 1..2271: mol_type = other DNA
atgaatggagcccccagcccagaagatggagccagccccagcagcccccccctgcccccacctcctcctccttcctggagggagttctgtgagagccacgcccgggctgctgccctggactttgcccggcgcttccggctgtacctggccagccacccccagtatgccggccctggagctgaggccgccttcagccgccgctttgctgagctgttcctgcagcactttgaggccgaggtggcccgggccagcggcagcctgagcccccccatcctggcccccctgagccctggagctgagatcagcccccatgacctgagcctggagagctgccgggtgggcggccccctggccgtgctgggccccagccgcagcagcgaggacctggccggccccctgcccagctctgtgagcagcagcagcaccaccagcagcaagcccaagctgaagaagcgcttcagcctgcggtctgtgggccgctctgtgcggggctctgtgcggggcatcctgcagtggaggggcaccgtggacccccccagcagcgctggccccctggagaccagcagcggcccccctgtgctgggcggcaacagcaacagcaacagcagtggaggagctggcaccgtgggccggggcctggtgtctgatggcaccagccctggagagcgctggacccacagatttgagcggctgcggctgagccggggcggcggggccctgaaggatggagctggcatggtgcagcgggaggagctgctgtccttcatgggcgctgaggaggccgccccagaccctgctggggtgggccggggcggcggcgtggccggccccccatctgggggcggcggccagccccagtggcagaagtgccgcctgctgctgcggtctgagggggagggcggcggcggcagccggctggagttctttgtgccccccaaggccagccggccccggctgagcatcccctgcagcagcatcacagatgtgaggaccaccacagccctggagatgccagaccgggagaacacctttgtggtgaaggtggagggccccagcgagtacatcatggagaccgtggatgcccagcacgtgaaggcctgggtgtctgacatccaggagtgcctgagccctggcccctgcccagccaccagcccccggcccatgaccctgcccctggcccctggcaccagcttcctgacccgggagaacacagacagcctggagctgagctgcctgaaccacagcgagagcctgcccagccaggacctgctgctgggccccagcgagagcaatgaccggctgagccagggcgcctatggaggcctgagtgaccggcccagcgccagcatcagccccagcagcgccagcattgctgccagccactttgacagcatggagctgctgcccccagagctgcccccacgcatccccatcgaggagggcccccccaccggcaccgtgcaccccctgagcgccccctacccacccctggacaccccagagacagccaccggcagcttcctgttccagggcgagcctgagggcggggagggggaccagcccctgagcggctacccctggttccacggcatgctgagccggctgaaggccgcccagctggtgctgactggaggcaccggcagccatggagtcttcctggtgcggcagagcgagacccggcggggggagtatgtgctgaccttcaacttccagggcaaggccaagcacctgcggctgagcctgaatgaggagggccagtgccgggtgcagcacctgtggttccagagcatctttgacatgctggagcacttccgggtgcaccccatccccctggagagcggcggcagcagtgatgtggtgctggtgtcctatgtgcccagcagccagaggcagcaggagcccaccaccagccatgaccccccccagcccccagagccccccagctggacagaccccccccagcctggagctgaggaggccagccgggcccctgaggtggccgctgctgctgctgctgctgccaaggagcggcaggagaaggagaaggccggcggcggcggcgtgcctgaggagctggtgcctgtggtggagctggtgcctgtggtggagctggaggaggccatcgcccctggcagcgaggcccagggcgccggcagcggaggagatgctggggtgccccccatggtgcagctgcagcagagccccctgggcggagatggagaggagggcggccacccccgggccatcaacaaccagtacagctttgtgtag

SEQ ID NO: 169532 - DNA, 2016 bp, synthetic construct
  misc_feature 1..2016: note = Description of Artificial Sequence: Synthetic coding sequence
  source 1..2016: mol_type = other DNA
atgaatggagcccccagcccagaagatggagccagccccagcagcccccccctgcccccacctcctcctccttcctggagggagttctgtgagagccacgcccgggctgctgccctggactttgcccggcgcttccggctgtacctggccagccacccccagtatgccggccctggagctgaggccgccttcagccgccgctttgctgagctgttcctgcagcactttgaggccgaggtggcccgggccagcggcagcctgagcccccccatcctggcccccctgagccctggagctgagatcagcccccatgacctgagcctggagagctgccgggtgggcggccccctggccgtgctgggccccagccgcagcagcgaggacctggccggccccctgcccagctctgtgagcagcagcagcaccaccagcagcaagcccaagctgaagaagcgcttcagcctgcggtctgtgggccgctctgtgcggggctctgtgcggggcatcctgcagtggaggggcaccgtggacccccccagcagcgctggccccctggagaccagcagcggcccccctgtgctgggcggcaacagcaacagcaacagcagtggaggagctggcaccgtgggccggggcctggtgtctgatggcaccagccctggagagcgctggacccacagatttgagcggctgcggctgagccggggcggcggggccctgaaggatggagctggcatggtgcagcgggaggagctgctgtccttcatgggcgctgaggaggccgccccagaccctgctggggtgggccggggcggcggcgtggccggccccccatctgggggcggcggccagccccagtggcagaagtgccgcctgctgctgcggtctgagggggagggcggcggcggcagccggctggagttctttgtgccccccaaggccagccggccccggctgagcatcccctgcagcagcatcacagatgtgaggaccaccacagccctggagatgccagaccgggagaacacctttgtggtgaaggtggagggccccagcgagtacatcatggagaccgtggatgcccagcacgtgaaggcctgggtgtctgacatccaggagtgcctgagccctggcccctgcccagccaccagcccccggcccatgaccctgcccctggcccctggcaccagcttcctgacccgggagaacacagacagcctggagctgagctgcctgaaccacagcgagagcctgcccagccaggacctgctgctgggccccagcgagagcaatgaccggctgagccagggcgcctatggaggcctgagtgaccggcccagcgccagcatcagccccagcagcgccagcattgctgccagccactttgacagcatggagctgctgcccccagagctgcccccacgcatccccatcgaggagggcccccccaccggcaccgtgcaccccctgagcgccccctacccacccctggacaccccagagacagccaccggcagcttcctgttccagggcgagcctgagggcggggagggggaccagcccctgagcggctacccctggttccacggcatgctgagccggctgaaggccgcccagctggtgctgactggaggcaccggcagccatggagtcttcctggtgcggcagagcgagacccggcggggggagtatgtgctgaccttcaacttccagggcaaggccaagcacctgcggctgagcctgaatgaggagggccagtgccgggtgcagcacctgtggttccagagcatctttgacatgctggagcacttccgggtgcaccccatccccctggagagcggcggcagcagtgatgtggtgctggtgtcctatgtgcccagcagccagaggcagcagggccgggagcaggccggcagccatgctggggtgtgtgaaggagatggctgccacccagatgccagctgcaccctgatgccctttggagccagtgactgtgtgacagaccacctgccctag

SEQ ID NO: 169533 - DNA, 2052 bp, synthetic construct
  misc_feature 1..2052: note = Description of Artificial Sequence: Synthetic coding sequence
  source 1..2052: mol_type = other DNA
atgaatggagcccccagcccagaagatggagccagccccagcagcccccccctgcccccacctcctcctccttcctggagggagttctgtgagagccacgcccgggctgctgccctggactttgcccggcgcttccggctgtacctggccagccacccccagtatgccggccctggagctgaggccgccttcagccgccgctttgctgagctgttcctgcagcactttgaggccgaggtggcccgggccagcggcagcctgagcccccccatcctggcccccctgagccctggagctgagatcagcccccatgacctgagcctggagagctgccgggtgggcggccccctggccgtgctgggccccagccgcagcagcgaggacctggccggccccctgcccagctctgtgagcagcagcagcaccaccagcagcaagcccaagctgaagaagcgcttcagcctgcggtctgtgggccgctctgtgcggggctctgtgcggggcatcctgcagtggaggggcaccgtggacccccccagcagcgctggccccctggagaccagcagcggcccccctgtgctgggcggcaacagcaacagcaacagcagtggaggagctggcaccgtgggccggggcctggtgtctgatggcaccagccctggagagcgctggacccacagatttgagcggctgcggctgagccggggcggcggggccctgaaggatggagctggcatggtgcagcgggaggagctgctgtccttcatgggcgctgaggaggccgccccagaccctgctggggtgggccggggcggcggcgtggccggccccccatctgggggcggcggccagccccagtggcagaagtgccgcctgctgctgcggtctgagggggagggcggcggcggcagccggctggagttctttgtgccccccaaggccagccggccccggctgagcatcccctgcagcagcatcacagatgtgaggaccaccacagccctggagatgccagaccgggagaacacctttgtggtgaaggtggagggccccagcgagtacatcatggagaccgtggatgcccagcacgtgaaggcctgggtgtctgacatccaggagtgcctgagccctggcccctgcccagccaccagcccccggcccatgaccctgcccctggcccctggcaccagcttcctgacccgggagaacacagacagcctggagctgagctgcctgaaccacagcgagagcctgcccagccaggacctgctgctgggccccagcgagagcaatgaccggctgagccagggcgcctatggaggcctgagtgaccggcccagcgccagcatcagccccagcagcgccagcattgctgccagccactttgacagcatggagctgctgcccccagagctgcccccacgcatccccatcgaggagggcccccccaccggcaccgtgcaccccctgagcgccccctacccacccctggacaccccagagacagccaccggcagcttcctgttccagggcgagcctgagggcggggagggggaccagcccctgagcggctacccctggttccacggcatgctgagccggctgaaggccgcccagctggtgctgactggaggcaccggcagccatggagtcttcctggtgcggcagagcgagacccggcggggggagtatgtgctgaccttcaacttccagggcaaggccaagcacctgcggctgagcctgaatgaggagggccagtgccgggtgcagcacctgtggttccagagcatctttgacatgctggagcacttccgggtgcaccccatccccctggagagcggcggcagcagtgatgtggtgctggtgtcctatgtgcccagcagccagaggcagcagggcgagcagagccgctctgctggggaggaggtgcctgtgcaccccaggtctgaggccggcagccggctgggcgccatgaggggctgtgcccgggagatggatgccacccccatgcccccagcccccagctgccccagcgagcgggtgacagtgtag

SEQ ID NO: 169534 - DNA, 2016 bp, synthetic construct; identical to SEQ ID NO: 169532
  misc_feature 1..2016: note = Description of Artificial Sequence: Synthetic coding sequence
  source 1..2016: mol_type = other DNA

SEQ ID NO: 169535 - DNA, 1008 bp, synthetic construct
  misc_feature 1..1008: note = Description of Artificial Sequence: Synthetic coding sequence
  source 1..1008: mol_type = other DNA
atgccagaccgggagaacacctttgtggtgaaggtggagggccccagcgagtacatcatggagaccgtggatgcccagcacgtgaaggcctgggtgtctgacatccaggagtgcctgagccctggcccctgcccagccaccagcccccggcccatgaccctgcccctggcccctggcaccagcttcctgacccgggagaacacagacagcctggagctgagctgcctgaaccacagcgagagcctgcccagccaggacctgctgctgggccccagcgagagcaatgaccggctgagccagggcgcctatggaggcctgagtgaccggcccagcgccagcatcagccccagcagcgccagcattgctgccagccactttgacagcatggagctgctgcccccagagctgcccccacgcatccccatcgaggagggcccccccaccggcaccgtgcaccccctgagcgccccctacccacccctggacaccccagagacagccaccggcagcttcctgttccagggcgagcctgagggcggggagggggaccagcccctgagcggctacccctggttccacggcatgctgagccggctgaaggccgcccagctggtgctgactggaggcaccggcagccatggagtcttcctggtgcggcagagcgagacccggcggggggagtatgtgctgaccttcaacttccagggcaaggccaagcacctgcggctgagcctgaatgaggagggccagtgccgggtgcagcacctgtggttccagagcatctttgacatgctggagcacttccgggtgcaccccatccccctggagagcggcggcagcagtgatgtggtgctggtgtcctatgtgcccagcagccagaggcagcagggccgggagcaggccggcagccatgctggggtgtgtgaaggagatggctgccacccagatgccagctgcaccctgatgccctttggagccagtgactgtgtgacagaccacctgccctag

SEQ ID NO: 169536 - DNA, 1122 bp, synthetic construct
  misc_feature 1..1122: note = Description of Artificial Sequence: Synthetic coding sequence
  source 1..1122: mol_type = other DNA
atggccgaggccagccggccccggctgagcatcccctgcagcagcatcacagatgtgaggaccaccacagccctggagatgccagaccgggagaacacctttgtggtgaaggtggagggccccagcgagtacatcatggagaccgtggatgcccagcacgtgaaggcctgggtgtctgacatccaggagtgcctgagccctggcccctgcccagccaccagcccccggcccatgaccctgcccctggcccctggcaccagcttcctgacccgggagaacacagacagcctggagctgagctgcctgaaccacagcgagagcctgcccagccaggacctgctgctgggccccagcgagagcaatgaccggctgagccagggcgcctatggaggcctgagtgaccggcccagcgccagcatcagccccagcagcgccagcattgctgccagccactttgacagcatggagctgctgcccccagagctgcccccacgcatccccatcgaggagggcccccccaccggcaccgtgcaccccctgagcgccccctacccacccctggacaccccagagacagccaccggcagcttcctgttccagggcgagcctgagggcggggagggggaccagcccctgagcggctacccctggttccacggcatgctgagccggctgaaggccgcccagctggtgctgactggaggcaccggcagccatggagtcttcctggtgcggcagagcgagacccggcggggggagtatgtgctgaccttcaacttccagggcaaggccaagcacctgcggctgagcctgaatgaggagggccagtgccgggtgcagcacctgtggttccagagcatctttgacatgctggagcacttccgggtgcaccccatccccctggagagcggcggcagcagtgatgtggtgctggtgtcctatgtgcccagcagccagaggcagcagggcgagcagagccgctctgctggggaggaggtgcctgtgcaccccaggtctgaggccggcagccggctgggcgccatgaggggctgtgcccgggagatggatgccacccccatgcccccagcccccagctgccccagcgagcgggtgacagtgtag

SEQ ID NO: 169537 - DNA, 1728 bp, synthetic construct
  misc_feature 1..1728: note = Description of Artificial Sequence: Synthetic coding sequence
  source 1..1728: mol_type = other DNA
atgaatggacctgccctgcagcccagcagccccagcagcgcccccagcgccagccctgctgctgccccccggggctggagcgagttctgtgagctgcatgctgtggccgccgcccgggagctggcccggcagtactggctgtttgcccgggagcacccccagcacgcccccctgcgggcagagctggtgtccctgcagttcacagacctcttccagcgctacttctgccgggaggtgagagatggccgggcccctggccgggactacagagacaccggccggggccccccagccaaggccgaggccagccctgagcccggccctggccctgctgcccctggcctgcccaaggcccggagcagcgaggagctggccccacccaggcctcctggcccctgcagcttccagcacttcagaagaagcctgcggcacatcttcagaagaagatctgctggggagctgcctgctgcccacacagctgctgcccctggcaccccaggagaggccgctgagaccccagcccggcccggcctggccaagaagttcctgccctggagcctggcccgggagcccccacctgaggccctgaaggaggccgtgctgcgctacagcctggctgatgaggcctccatggattctggggcccgctggcagaggggccgcctggccctgcggcgggcccctggcccagatggccctgacagagtgctggagctgtttgacccccccaagagcagccggcccaagctgcaggccgcctgcagcagcatccaggaggtgcgctggtgcacccggctggagatgccagacaacctgtacacctttgtgctgaaggtgaaggacagaacagacatcatctttgaggtgggagatgagcagcagctgaacagctggatggccgagctgtctgagtgcaccggccggggcctggagagcacagaagctgagatgcacatccccagcgccctggagcccagcaccagcagcagcccccggggcagcacagacagcctgaaccagggcgccagccctgggggcctgctggaccctgcctgccagaagacagaccacttcctgagctgctacccctggttccacggccccatcagccgggtgaaggccgcccagctggtgcagctgcagggcccagatgcccacggcgtcttcctggtgcggcagagcgagaccaggagaggagaatatgtgctgaccttcaacttccagggcatcgccaagcacctgcggctgagcctgacagagcggggccagtgccgggtgcagcacctgcacttccccagcgtggtggacatgctgcaccacttccagaggagccccatccccctggagtgtggggccgcctgtgatgtgcggctgagcagctatgtggtggtggtgtcccagcccccaggcagctgcaacacagtgctcttccccttcagcctgccccactgggacagcgagagcctgccccactggggcagcgagctgggcctgccccacctgagcagcagcggctgcccccggggcctgagccctgagggcctgcccggccgcagcagccccccagagcagatcttccacctggtgcccagccctgaggagctggccaacagcctgcagcacctggagcacgagcctgtgaacagagcccgggacagcgactatgagatggacagcagcagccgcagccacctgcgggccatcgacaaccagtacacccccctgtag

SEQ ID NO: 169538 - DNA, 1122 bp, synthetic construct
  misc_feature 1..1122: note = Description of Artificial Sequence: Synthetic coding sequence
  source 1..1122: mol_type = other DNA
atgggcttccctgtgctgtgccggggctggaggaggacctggccaggctgtgcctcctggctgggcgcccccccaccccagaagcccctgctgagccccctgctgctgaaccacaggagcagcaagagcagccggcccaagctgcaggccgcctgcagcagcatccaggaggtgcgctggtgcacccggctggagatgccagacaacctgtacacctttgtgctgaaggtgaaggacagaacagacatcatctttgaggtgggagatgagcagcagctgaacagctggatggccgagctgtctgagtgcaccggccggggcctggagagcacagaagctgagatgcacatccccagcgccctggagcccagcaccagcagcagcccccggggcagcacagacagcctgaaccagggcgccagccctgggggcctgctggaccctgcctgccagaagacagaccacttcctgagctgctacccctggttccacggccccatcagccgggtgaaggccgcccagctggtgcagctgcagggcccagatgcccacggcgtcttcctggtgcggcagagcgagaccaggagaggagaatatgtgctgaccttcaacttccagggcatcgccaagcacctgcggctgagcctgacagagcggggccagtgccgggtgcagcacctgcacttccccagcgtggtggacatgctgcaccacttccagaggagccccatccccctggagtgtggggccgcctgtgatgtgcggctgagcagctatgtggtggtggtgtcccagcccccaggcagctgcaacacagtgctcttccccttcagcctgccccactgggacagcgagagcctgccccactggggcagcgagctgggcctgccccacctgagcagcagcggctgcccccggggcctgagccctgagggcctgcccggccgcagcagccccccagagcagatcttccacctggtgcccagccctgaggagctggccaacagcctgcagcacctggagcacgagcctgtgaacagagcccgggacagcgactatgagatggacagcagcagccgcagccacctgcgggccatcgacaaccagtacacccccctgtag

SEQ ID NO: 169539 - DNA, 1209 bp, synthetic construct
  misc_feature 1..1209: note = Description of Artificial Sequence: Synthetic coding sequence
  source 1..1209: mol_type = other DNA
atgatcccccccagcagccccagagaagatggagtggatggcctgcccaaggaggccgtgggcgctgagcagccccccagccctgccagcaccagcagccaggagagcaagctgcagaagctgaagaggagcctgtccttcaagaccaagagcctgcggagcaagtctgctgacaacttcttccagaggaccaacagcgaggacatgaagctgcaggcccacatggtggccgagatcagccccagcagcagccccctgcctgcccctggcagcctgaccagcaccccagcccgggccggcctgcaccctgggggcaaggcccacgccttccaggagtacatcttcaagaagcccaccttctgtgatgtgtgcaaccacatgattgtgggcaccaatgccaagcacggcctgcgctgcaaggcctgcaagatgagcatccaccacaagtgcacagatggcctggccccccagcgctgcatgggcaagctgcccaagggcttccgccgctactacagcagccccctgctgatccacgagcagtttggctgcatcaaggaggtgatgcccatcgcctgtggcaacaaggtggaccctgtgtatgagaccctgcgcttcggcaccagcctggcccagaggaccaagaagggcagcagcggcagcggcagtgacagcccccacaggaccagcaccagtgacctggtggaggtgcctgaggaggccaatggacctgggggcggctatgacctgaggaagaggagcaacagcgtcttcacctacccagaaaatggaacagatgacttccgggaccctgccaagaacatcaaccaccagggcagcctgagcaaggaccccctgcagatgaacacctacgtggccctgtacaagtttgtgccccaggagaatgaagacctggagatgaggcctggggacatcatcaccctgctggaggacagcaatgaagactggtggaagggcaagatccaggacagaattggcttcttccctgccaactttgtgcagaggctgcagcagaatgagaagatcttccgctgtgtgaggaccttcatcggctgcaaggagcagggccagatcaccctgaaggagaaccagatctgtgtgtcctctgaggaggagcaggacggcttcatccgggtgctgagcggcaagaagaagggcctcatccccctggatgtgctggagaacatctag

SEQ ID NO: 169540 - DNA, 1005 bp, synthetic construct
  misc_feature 1..1005: note = Description of Artificial Sequence: Synthetic coding sequence
  source 1..1005: mol_type = other DNA
atgaagctgcaggcccacatggtggccgagatcagccccagcagcagccccctgcctgcccctggcagcctgaccagcaccccagcccgggccggcctgcaccctgggggcaaggcccacgccttccaggagtacatcttcaagaagcccaccttctgtgatgtgtgcaaccacatgattgtgggcaccaatgccaagcacggcctgcgctgcaaggcctgcaagatgagcatccaccacaagtgcacagatggcctggccccccagcgctgcatgggcaagctgcccaagggcttccgccgctactacagcagccccctgctgatccacgagcagtttggctgcatcaaggaggtgatgcccatcgcctgtggcaacaaggtggaccctgtgtatgagaccctgcgcttcggcaccagcctggcccagaggaccaagaagggcagcagcggcagcggcagtgacagcccccacaggaccagcaccagtgacctggtggaggtgcctgaggaggccaatggacctgggggcggctatgacctgaggaagaggagcaacagcgtcttcacctacccagaaaatggaacagatgacttccgggaccctgccaagaacatcaaccaccagggcagcctgagcaaggaccccctgcagatgaacacctacgtggccctgtacaagtttgtgccccaggagaatgaagacctggagatgaggcctggggacatcatcaccctgctggaggacagcaatgaagactggtggaagggcaagatccaggacagaattggcttcttccctgccaactttgtgcagaggctgcagcagaatgagaagatcttccgctgtgtgaggaccttcatcggctgcaaggagcagggccagatcaccctgaaggagaaccagatctgtgtgtcctctgaggaggagcaggacggcttcatccgggtgctgagcggcaagaagaagggcctcatccccctggatgtgctggagaacatctag

SEQ ID NO: 169541 - DNA, 4422 bp, synthetic construct
  misc_feature 1..4422: note = Description of Artificial Sequence: Synthetic coding sequence
  source 1..4422: mol_type = other DNA
gtggccatcatcgccggcaactttgagctggccgagtacatcaagaaccacaaggagacagacatcgtgcccttccgggaggccccagcctacagcaacagaagaagaagaccacccaacaccctggccgccccccgggtgctgctgcggagcaacagcgacaacaacctgaatgccagcgccccagactgggccgtgtgcagcacagccaccagccacaggagcctgagcccccagctgctgcagcagatgcccagcaagccagagggcgccgccaagaccatcggcagctatgtgcccggccccaggagccgcagccccagcctgaaccggctgggcggcgctggagaagatggcaagaggccccagcccctgtggcacgtgggcagcccctttgccctgggcgccaacaaggacagcctgagcgcctttgagtacccaggccccaagaggaagctgtacagcgctgtgcccggccgcctgtttgtggccgtgaagccctaccagccccaggtggatggagagatccccctgcacagaggagacagagtgaaggtgctgagcattggagagggcggcttctgggagggcagcgcccggggccacatcggctggttcccagcagaatgtgtggaggaggtgcagtgcaagccccgggacagccaggccgagaccagggctgacaggagcaagaagctgttccgccactacacagtgggcagctatgacagctttgacaccagcagtgactgcatcatcgaggagaagacagtggtgctgcagaagaaggacaatgaaggcttcggctttgtgctgcggggggccaaggctgacacccccatcgaggagttcacccccaccccagccttccctgccctgcagtacctggagagcgtggatgagggcggcgtggcctggcaggccggcctgaggactggagacttcctgattgaggtgaacaatgaaaatgtggtgaaggtgggccaccggcaggtggtgaacatgatccggcagggcggcaaccacctggtgctgaaggtggtgacagtgaccaggaacctggaccctgatgacacagccaggaagaaggcccctcctccacccaagagggcccccaccacagccctgaccctgcggagcaagtccatgaccagcgagctggaggagctggtggacaaggacaagccagaggagatcgtgcctgccagcaagcccagcagagctgctgagaacatggctgtggagccccgggtggccaccatcaagcagaggcccagcagccgctgcttccctgctggcagtgacatgaacagcgtgtatgaaaggcagggcattgctgtgatgacccccaccgtgcccggcagccccaaggcccccttcctgggcatcccccggggcaccatgaggcggcagaagagcattgacagccgcatcttcctgagcggcatcacagaggaggagcggcagttcctggccccacccatgctgaagttcaccaggagcctgtccatgccagacaccagcgaggacatccccccaccaccccagagcgtgccccccagccccccaccacccagccccaccacctacaactgccccaagagccccaccccccgggtgtatggcaccatcaagccagccttcaaccagaacagcgctgccaaggtgtccccagccaccaggagtgacacagtggccaccatgatgagggagaagggcatgtacttcagaagagagctggaccgctacagcctggacagcgaggacctgtacagcagaaatgccggcccccaggccaacttcaggaacaagaggggccagatgcctgagaacccctacagcgaggtgggcaagatcgccagcaaggctgtgtatgtgcctgccaagccagcccggaggaagggcatgctggtgaagcagagcaatgtggaggacagccctgagaagacctgcagcatccccatccccaccatcatcgtgaaggagcccagcaccagcagcagcggcaagagcagccagggcagctccatggagattgacccccaggcccctgagccccccagccagctgcggccagatgagagcctgactgtgagcagcccctttgctgctgccatcgccggggctgtgcgggaccgggagaagaggctggaggcccggaggaacagccctgccttcctgagcacagacctgggagatgaagatgtgggcctgggccccccagcccccaggacccggcccagcatgtttcctgaggagggggactttgctgatgaagattctgctgagcagctgagcagccccatgcccagcgccaccccccgggagcctgagaaccactttgtgggcggcgctgaggccagcgcccctggagaggccggccggcccctgaacagcaccagcaaggcccagggccctgagagcagccctgctgtgcccagcgccagcagcggcacagctggccctggcaactacgtgcaccccctgaccggccgcctgctggaccccagcagccccctggccctggccctgagcgcccgggaccgggccatgaaggagagccagcagggccccaagggggaggcccccaaggctgacctgaacaagcccctgtacatcgacaccaagatgaggcccagcctggatgctggcttccccaccgtgacccggcagaacacccggggccccctgcggcggcaggagacagagaacaagtatgaaacagacctgggccgggacagaaaaggagatgacaagaagaacatgctgattgacatcatggacaccagccagcagaagtctgctggcctgctgatggtgcacacagtggatgccaccaagctggacaatgccctgcaggaggaggatgagaaggccgaggtggagatgaagccagacagcagccccagcgaggtgcctgagggcgtgtctgaaacagaaggagccctgcagatctctgctgcccctgagcccaccaccgtgcccggccgcaccatcgtggccgtgggctccatggaggaggccgtcatcctgcccttccgcatccccccaccacccctggcctctgtggacctggatgaggacttcatcttcacagagcccctgcccccacccctggagtttgccaacagctttgacatcccagatgaccgggccgcctctgtgcctgccctgagtgacctggtgaagcagaagaagagtgacaccccccagagccccagcctgaacagcagccagcccaccaacagcgctgacagcaagaagccagccagcctgagcaactgcctgcctgccagcttcctgcccccacctgagagctttgatgctgtggccgacagcggcatcgaggaggtggacagccgcagcagcagtgaccaccacctggagaccaccagcaccatcagcacagtgagcagcatcagcaccctgagcagcgagggcggagaaaatgtggacacctgcaccgtgtatgcagatggccaggccttcatggtggacaagccccctgtgccccccaagcccaagatgaagcccatcatccacaagagcaatgccctgtaccaggatgccctggtggaggaggatgtggacagctttgtgatccccccaccagcccctcctcctcctcctggcagcgcccagcccggcatggccaaggtgctgcagcccaggaccagcaagctgtggggagatgtgacagagatcaagagccccatcctgagcggccccaaggccaacgtcatcagcgagctgaacagcatcctgcagcagatgaaccgggagaagctggccaagccaggagagggcctggacagccccatgggcgccaagagcgccagcctggcccccaggagccctgagatcatgagcaccatcagcggcaccaggagcaccaccgtgaccttcaccgtgcggcccggcaccagccagcccatcaccctgcagagccggcccccagactatgagagcaggaccagcggcacccggcgggcccccagccctgtggtgagccccacagagatgaacaaggagaccctgcctgcccccctgtctgctgccacagccagccccagccctgccctgagtgatgtgttcagcctgcccagccagcccccatctggggacctgtttggcctgaacccagctggccgcagccgcagccccagccccagcatcctgcagcagcccatcagcaacaagcccttcaccaccaagcctgtgcacctgtggaccaagccagatgtggccgactggctggagagcctgaacctgggggagcacaaggaggccttcatggacaatgaaattgatggcagccacctgcccaacctgcagaaggaggacctgattgacctgggcgtgaccagggtgggccacaggatgaacatcgagcgggccctgaagcagctgctggacagatag

SEQ ID NO: 169542 - DNA, 5553 bp, synthetic construct
  misc_feature 1..5553: note = Description of Artificial Sequence: Synthetic coding sequence
  source 1..5553: mol_type = other DNA
atgcccaggagccccaccagcagtgaagatgagatggcccagagcttcagtgactacagcgtgggcagcgagagtgacagcagcaaggaggagaccatctatgacaccatccgggccacagctgagaagccaggaggagccaggacagaggagagccagggcaacaccctggtgatccgggtggtgattcatgacctgcagcagaccaagtgcatccgcttcaacccagatgccaccgtgtgggtggccaagcagaggatcctgtgcaccctgacccagagcctgaaggatgtgctgaactacggcctcttccagcctgccagcaatggaagagatggcaagttcctggatgaggagcggctgctgcgggagtacccccagcctgtgggggagggcgtgcccagcctggagttccgctacaagaagagggtgtacaagcaggccagcctggatgagaagcagctggccaagctgcacaccaagaccaacctgaagaagtgcatggaccacatccagcaccggctggtggagaagatcaccaagatgctggaccggggcctggaccccaacttccatgaccctgagaccggggagacccccctgaccctggccgcccagctggatgacagcgtggaggtgatcaaggccctgaagaatggaggagcccacctggacttccgggccaaggatggcatgacagccctgcacaaggccgcccgggccaggaaccaggtggccctgaagaccctgctggagctgggcgccagcccagactacaaggacagctatggcctgacccccctgtaccacacagccatcgtgggcggggacccctactgctgtgagctgctgctgcacgagcacgccaccgtgtgctgcaaggatgaaaatggctggcatgagatccaccagagccgctgctggggccacatcagcgagccccaccacaccctgctgagcggcagcgcccggagccagcagagccgcagcgccagcagcgccctgcacgtgtgtgccatgtacagcagcttcagctgtgtgcgcatcagcctgctcttccacggccgcatcacagagctgaagcagtacaagaagagcacccccttccaggtggccatcatcgccggcaactttgagctggccgagtacatcaagaaccacaaggagacagacatcgtgcccttccgggaggccccagcctacagcaacagaagaagaagaccacccaacaccctggccgccccccgggtgctgctgcggagcaacagcgacaacaacctgaatgccagcgccccagactgggccgtgtgcagcacagccaccagccacaggagcctgagcccccagctgctgcagcagatgcccagcaagccagagggcgccgccaagaccatcggcagctatgtgcccggccccaggagccgcagccccagcctgaaccggctgggcggcgctggagaagatggcaagaggccccagcccctgtggcacgtgggcagcccctttgccctgggcgccaacaaggacagcctgagcgcctttgagtacccaggccccaagaggaagctgtacagcgctgtgcccggccgcctgtttgtggccgtgaagccctaccagccccaggtggatggagagatccccctgcacagaggagacagagtgaaggtgctgagcattggagagggcggcttctgggagggcagcgcccggggccacatcggctggttcccagcagaatgtgtggaggaggtgcagtgcaagccccgggacagccaggccgagaccagggctgacaggagcaagaagctgttccgccactacacagtgggcagctatgacagctttgacaccagcagtgactgcatcatcgaggagaagacagtggtgctgcagaagaaggacaatgaaggcttcggctttgtgctgcggggggccaaggctgacacccccatcgaggagttcacccccaccccagccttccctgccctgcagtacctggagagcgtggatgagggcggcgtggcctggcaggccggcctgaggactggagacttcctgattgaggtgaacaatgaaaatgtggtgaaggtgggccaccggcaggtggtgaacatgatccggcagggcggcaaccacctggtgctgaaggtggtgacagtgaccaggaacctggaccctgatgacacagccaggaagaaggcccctcctccacccaagagggcccccaccacagccctgaccctgcggagcaagtccatgaccagcgagctggaggagctggtggacaagggcgtcatcaggaaggtgtctgacaagccagaggagatcgtgcctgccagcaagcccagcagagctgctgagaacatggctgtggagccccgggtggccaccatcaagcagaggcccagcagccgctgcttccctgctggcagtgacatgaacagcgtgtatgagcggcagggcattgctgtgatgacccccaccgtgcccggcagccccaaggcccccttcctgggcatcccccggggcaccatgaggcggcagaagagcattgacagccgcatcttcctgagcggcatcacagaggaggagcggcagttcctggccccacccatgctgaagttcaccaggagcctgtccatgccagacaccagcgaggacatccccccaccaccccagagcgtgccccccagccccccaccacccagccccaccacctacaactgccccaagagccccaccccccgggtgtatggcaccatcaagccagccttcaaccagaacagcgctgccaaggtgtccccagccaccaggagtgacacagtggccaccatgatgagggagaagggcatgtacttccggcgggagctggaccgctacagcctggacagtgaagatctctacagcagaaatgccggcccccaggccaacttcaggaacaagaggggccagatgcctgagaacccctacagcgaggtgggcaagatcgccagcaaggctgtgtatgtgcctgccaagccagcccggaggaagggcatgctggtgaagcagagcaatgtggaggacagccctgagaagacctgcagcatccccatccccaccatcatcgtgaaggagcccagcaccagcagcagcggcaagagcagccagggcagctccatggagattgacccccaggcccctgagccccccagccagctgcggccagatgagagcctgactgtgagcagcccctttgctgctgccatcgccggggctgtgcgggaccgggagaagaggctggaggcccggaggaacagccctgccttcctgagcacagacctgggagatgaagatgtgggcctgggccccccagcccccaggacccggcccagcatgtttcctgaggagggggactttgctgatgaggacagcgctgagcagctgagcagccccatgcccagcgccaccccccgggagcctgagaaccactttgtgggcggcgctgaggccagcgcccctggagaggccggccggcccctgaacagcaccagcaaggcccagggccctgagagcagccctgctgtgcccagcgccagcagcggcacagctggccctggcaactacgtgcaccccctgaccggccgcctgctggaccccagcagccccctggccctggccctgagcgcccgggaccgggccatgaaggagagccagcagggccccaagggggaggcccccaaggctgacctgaacaagcccctgtacatcgacaccaagatgaggcccagcctggatgctggcttccccaccgtgacccggcagaacacccggggccccctgcggcggcaggagacagagaacaagtatgaaacagacctgggccgggacagaaaaggagatgacaagaagaacatgctgattgacatcatggacaccagccagcagaagtctgctggcctgctgatggtgcacacagtggatgccaccaagctggacaatgccctgcaggaggaggatgagaaggccgaggtggagatgaagccagacagcagccccagcgaggtgcctgagggcgtgtctgaaacagagggcgccctgcagatctctgctgcccctgagcccaccaccgtgcccggccgcaccatcgtggccgtgggctccatggaggaggccgtcatcctgcccttccgcatccccccaccacccctggcctctgtggacctggatgaggacttcatcttcacagagcccctgcccccacccctggagtttgccaacagctttgacatcccagatgacagagctgcctctgtgcctgccctgagtgacctggtgaagcagaagaagagtgacaccccccagagccccagcctgaacagcagccagcccaccaacagcgctgacagcaagaagccagccagcctgagcaactgcctgcctgccagcttcctgcccccacctgagagctttgatgctgtggccgacagcggcatcgaggaggtggacagccgcagcagcagtgaccaccacctggagaccaccagcaccatcagcacagtgagcagcatcagcaccctgagcagcgagggcggggagaatgtggacacctgcaccgtgtatgcagatggccaggccttcatggtggacaagccccctgtgccccccaagcccaagatgaagcccatcatccacaagagcaatgccctgtaccaggatgccctggtggaggaggatgtggacagctttgtgattcctcctccagcccctcctcctcctcctggcagcgcccagcccggcatggccaaggtgctgcagcccaggaccagcaagctgtggggagatgtgacagagatcaagagccccatcctgagcggccccaaggccaacgtcatcagcgagctgaacagcatcctgcagcagatgaaccgggagaagctggccaagccaggagagggcctggacagccccatgggcgccaagagcgccagcctggcccccaggagccctgagatcatgagcaccatcagcggcaccaggagcaccaccgtgaccttcaccgtgcggcccggcaccagccagcccatcaccctgcagagccggcccccagactatgagagcaggaccagcggcacccggcgggcccccagccctgtggtgagccccacagagatgaacaaggagaccctgcctgcccccctgtctgctgccacagccagccccagccctgccctgagtgatgtgttcagcctgcccagccagccccccagcggggacctgtttggcctgaacccagctggccgcagccgcagccccagccccagcatcctgcagcagcccatcagcaacaagcccttcaccaccaagcctgtgcacctgtggaccaagccagatgtggccgactggctggagagcctgaacctgggggagcacaaggaggccttcatggacaatgaaattgatggcagccacctgcccaacctgcagaaggaggacctgattgacctgggcgtgaccagggtgggccacaggatgaacatcgagcgggccctgaagcagctgctggacagatag

SEQ ID NO: 169543 - DNA, 846 bp, synthetic construct
  misc_feature 1..846: note = Description of Artificial Sequence: Synthetic coding sequence
  source 1..846: mol_type = other DNA
atgatgatgaatgtgcctgggggcggcgctgctgctgtgatgatgacaggctacaacaacggccgctgccccaggaacagcctgtacagcgactgcatcatcgaggagaagacagtggtgctgcagaagaaggacaatgaaggatttggatttgtgctgcggggggccaaggctgacacccccatcgaggagttcacccccaccccagccttccctgccctgcagtacctggagagcgtggatgaaggaggagtggcctggcaggccggcctgaggactggagacttcctgattgaggtgaacaatgaaaatgtggtgaaggtgggccaccggcaggtggtgaacatgatccggcagggcggcaaccacctggtgctgaaggtggtgacagtgaccaggaacctggaccctgatgacacagccaggaagaaggcccctcctccacccaagagggcccccaccacagccctgaccctgcggagcaagtccatgaccagcgagctggaggagctggtggacaagggcgtcatcaggaagggcaaggacaagccagaggagatcgtgcctgccagcaagcccagcagagctgctgagaacatggctgtggagccccgggtggccaccatcaagcagaggcccagcagccgctgcttccctgctggcagtgacatgaacagcgtgtatgaaaggcagggcattgctgtgatgacccccaccgtgcccggcagccccaaggcccccttcctgggcatcccccggggcaccatgaggcggcagaagagcatcggcaagaagtgtggcaccccaccccagaagctgcccctgggcttccagacccagccctag

SEQ ID NO: 169544 - DNA, 3762 bp, synthetic construct
  misc_feature 1..3762: note = Description of Artificial Sequence: Synthetic coding sequence
  source 1..3762: mol_type = other DNA
atgatgaatgtgcctgggggcggcgctgctgctgtgatgatgacaggctacaacaacggccgctgccccaggaacagcctgtacagcgactgcatcatcgaggagaagacagtggtgctgcagaagaaggacaatgaaggcttcggctttgtgctgcggggggccaaggctgacacccccatcgaggagttcacccccaccccagccttccctgccctgcagtacctggagagcgtggatgagggcggcgtggcctggcaggccggcctgaggactggagacttcctgattgaggtgaacaatgaaaatgtggtgaaggtgggccaccggcaggtggtgaacatgatccggcagggcggcaaccacctggtgctgaaggtggtgacagtgaccaggaacctggaccctgatgacacagccaggaagaaggcccctcctccacccaagagggcccccaccacagccctgaccctgcggagcaagtccatgaccagcgagctggaggagctggtggacaaggacaagccagaggagatcgtgcctgccagcaagcccagcagagctgctgagaacatggctgtggagccccgggtggccaccatcaagcagaggcccagcagccgctgcttccctgctggcagtgacatgaacagcgtgtatgaaaggcagggcattgctgtgatgacccccaccgtgcccggcagccccaaggcccccttcctgggcatcccccggggcaccatgaggcggcagaagagcattgacagccgcatcttcctgagcggcatcacagaggaggagcggcagttcctggccccacccatgctgaagttcaccaggagcctgtccatgccagacaccagcgaggacatccccccaccaccccagagcgtgccccccagccccccaccacccagccccaccacctacaactgccccaagagccccaccccccgggtgtatggcaccatcaagccagccttcaaccagaacagcgctgccaaggtgtccccagccaccaggagtgacacagtggccaccatgatgagggagaagggcatgtacttcagaagagagctggaccgctacagcctggacagcgaggacctgtacagcagaaatgccggcccccaggccaacttcaggaacaagaggggccagatgcctgagaacccctacagcgaggtgggcaagatcgccagcaaggctgtgtatgtgcctgccaagccagcccggaggaagggcatgctggtgaagcagagcaatgtggaggacagccctgagaagacctgcagcatccccatccccaccatcatcgtgaaggagcccagcaccagcagcagcggcaagagcagccagggcagctccatggagattgacccccaggcccctgagccccccagccagctgcggccagatgagagcctgactgtgagcagcccctttgctgctgccatcgccggggctgtgcgggaccgggagaagaggctggaggcccggaggaacagccctgccttcctgagcacagacctgggagatgaagatgtgggcctgggccccccagcccccaggacccggcccagcatgtttcctgaggagggggactttgctgatgaagattctgctgagcagctgagcagccccatgcccagcgccaccccccgggagcctgagaaccactttgtgggcggcgctgaggccagcgcccctggagaggccggccggcccctgaacagcaccagcaaggcccagggccctgagagcagccctgctgtgcccagcgccagcagcggcacagctggccctggcaactacgtgcaccccctgaccggccgcctgctggaccccagcagccccctggccctggccctgagcgcccgggaccgggccatgaaggagagccagcagggccccaagggggaggcccccaaggctgacctgaacaagcccctgtacatcgacaccaagatgaggcccagcctggatgctggcttccccaccgtgacccggcagaacacccggggccccctgcggcggcaggagacagagaacaagtatgaaacagacctgggccgggacagaaaaggagatgacaagaagaacatgctgattgacatcatggacaccagccagcagaagtctgctggcctgctgatggtgcacacagtggatgccaccaagctggacaatgccctgcaggaggaggatgagaaggccgaggtggagatgaagccagacagcagccccagcgaggtgcctgagggcgtgtctgaaacagaaggagccctgcagatctctgctgcccctgagcccaccaccgtgcccggccgcaccatcgtggccgtgggctccatggaggaggccgtcatcctgcccttccgcatccccccaccacccctggcctctgtggacctggatgaggacttcatcttcacagagcccctgcccccacccctggagtttgccaacagctttgacatcccagatgaccgggccgcctctgtgcctgccctgagtgacctggtgaagcagaagaagagtgacaccccccagagccccagcctgaacagcagccagcccaccaacagcgctgacagcaagaagccagccagcctgagcaactgcctgcctgccagcttcctgcccccacctgagagctttgatgctgtggccgacagcggcatcgaggaggtggacagccgcagcagcagtgaccaccacctggagaccaccagcaccatcagcacagtgagcagcatcagcaccctgagcagcgagggcggagaaaatgtggacacctgcaccgtgtatgcagatggccaggccttcatggtggacaagccccctgtgccccccaagcccaagatgaagcccatcatccacaagagcaatgccctgtaccaggatgccctggtggaggaggatgtggacagctttgtgatccccccaccagcccctcctcctcctcctggcagcgcccagcccggcatggccaaggtgctgcagcccaggaccagcaagctgtggggagatgtgacagagatcaagagccccatcctgagcggccccaaggccaacgtcatcagcgagctgaacagcatcctgcagcagatgaaccgggagaagctggccaagccaggagagggcctggacagccccatgggcgccaagagcgccagcctggcccccaggagccctgagatcatgagcaccatcagcggcaccaggagcaccaccgtgaccttcaccgtgcggcccggcaccagccagcccatcaccctgcagagccggcccccagactatgagagcaggaccagcggcacccggcgggcccccagccctgtggtgagccccacagagatgaacaaggagaccctgcctgcccccctgtctgctgccacagccagccccagccctgccctgagtgatgtgttcagcctgcccagccagcccccatctggggacctgtttggcctgaacccagctggccgcagccgcagccccagccccagcatcctgcagcagcccatcagcaacaagcccttcaccaccaagcctgtgcacctgtggaccaagccagatgtggccgactggctggagagcctgaacctgggggagcacaaggaggccttcatggacaatgaaattgatggcagccacctgcccaacctgcagaaggaggacctgattgacctgggcgtgaccagggtgggccacaggatgaacatcgagcgggccctgaagcagctgctggacagatag

SEQ ID NO: 169545 - DNA, 843 bp, synthetic construct
  misc_feature 1..843: note = Description of Artificial Sequence: Synthetic coding sequence
  source 1..843: mol_type = other DNA
atgatgaatgtgcctgggggcggcgctgctgctgtgatgatgacaggctacaacaacggccgctgccccaggaacagcctgtacagcgactgcatcatcgaggagaagacagtggtgctgcagaagaaggacaatgaaggcttcggctttgtgctgcggggggccaaggctgacacccccatcgaggagttcacccccaccccagccttccctgccctgcagtacctggagagcgtggatgagggcggcgtggcctggcaggccggcctgaggactggagacttcctgattgaggtgaacaatgaaaatgtggtgaaggtgggccaccggcaggtggtgaacatgatccggcagggcggcaaccacctggtgctgaaggtggtgacagtgaccaggaacctggaccctgatgacacagccaggaagaaggcccctcctccacccaagagggcccccaccacagccctgaccctgcggagcaagtccatgaccagcgagctggaggagctggtggacaaggcctctgtgaggaagaagaaggacaagccagaggagatcgtgcctgccagcaagcccagcagagctgctgagaacatggctgtggagccccgggtggccaccatcaagcagaggcccagcagccgctgcttccctgctggcagtgacatgaacagcgtgtatgagcggcagggcattgctgtgatgacccccaccgtgcccggcagccccaaggcccccttcctgggcatcccccggggcaccatgaggcggcagaagagcatcggcaagaagtgtggcaccccaccccagaagctgcccctgggcttccagacccagccctag

SEQ ID NO: 169546 - DNA, 4413 bp, synthetic construct
  misc_feature 1..4413: note = Description of Artificial Sequence: Synthetic coding sequence
  source 1..4413: mol_type = other DNA
atgaagagcctgctgaatgccttcaccaagaaggaggtgcccttccgggaggccccagcctacagcaacagaagaagaagaccacccaacaccctggccgccccccgggtgctgctgcggagcaacagcgacaacaacctgaatgccagcgccccagactgggccgtgtgcagcacagccaccagccacaggagcctgagcccccagctgctgcagcagatgcccagcaagccagagggcgccgccaagaccatcggcagctatgtgcccggccccaggagccgcagccccagcctgaaccggctgggcggcgctggagaagatggcaagaggccccagcccctgtggcacgtgggcagcccctttgccctgggcgccaacaaggacagcctgagcgcctttgagtacccaggccccaagaggaagctgtacagcgctgtgcccggccgcctgtttgtggccgtgaagccctaccagccccaggtggatggagagatccccctgcacagaggagacagagtgaaggtgctgagcattggagagggcggcttctgggagggcagcgcccggggccacatcggctggttcccagcagaatgtgtggaggaggtgcagtgcaagccccgggacagccaggccgagaccagggctgacaggagcaagaagctgttccgccactacacagtgggcagctatgacagctttgacaccagcagtgactgcatcatcgaggagaagacagtggtgctgcagaagaaggacaatgaaggcttcggctttgtgctgcggggggccaaggctgacacccccatcgaggagttcacccccaccccagccttccctgccctgcagtacctggagagcgtggatgagggcggcgtggcctggcaggccggcctgaggactggagacttcctgattgaggtgaacaatgaaaatgtggtgaaggtgggccaccggcaggtggtgaacatgatccggcagggcggcaaccacctggtgctgaaggtggtgacagtgaccaggaacctggaccctgatgacacagccaggaagaaggcccctcctccacccaagagggcccccaccacagccctgaccctgcggagcaagtccatgaccagcgagctggaggagctggtggacaaggcctctgtgaggaagaagaaggacaagccagaggagatcgtgcctgccagcaagcccagcagagctgctgagaacatggctgtggagccccgggtggccaccatcaagcagaggcccagcagccgctgcttccctgctggcagtgacatgaacagcgtgtatgagcggcagggcattgctgtgatgacccccaccgtgcccggcagccccaaggcccccttcctgggcatcccccggggcaccatgaggcggcagaagagcattgacagccgcatcttcctgagcggcatcacagaggaggagcggcagttcctggccccacccatgctgaagttcaccaggagcctgtccatgccagacaccagcgaggacatccccccaccaccccagagcgtgccccccagccccccaccacccagccccaccacctacaactgccccaagagccccaccccccgggtgtatggcaccatcaagccagccttcaaccagaacagcgctgccaaggtgtccccagccaccaggagtgacacagtggccaccatgatgagggagaagggcatgtacttccggcgggagctggaccgctacagcctggacagtgaagatctctacagcagaaatgccggcccccaggccaacttcaggaacaagaggggccagatgcctgagaacccctacagcgaggtgggcaagatcgccagcaaggctgtgtatgtgcctgccaagccagcccggaggaagggcatgctggtgaagcagagcaatgtggaggacagccctgagaagacctgcagcatccccatccccaccatcatcgtgaaggagcccagcaccagcagcagcggcaagagcagccagggcagctccatggagattgacccccaggcccctgagccccccagccagctgcggccagatgagagcctgactgtgagcagcccctttgctgctgccatcgccggggctgtgcgggaccgggagaagaggctggaggcccggaggaacagccctgccttcctgagcacagacctgggagatgaagatgtgggcctgggccccccagcccccaggacccggcccagcatgtttcctgaggagggggactttgctgatgaggacagcgctgagcagctgagcagccccatgcccagcgccaccccccgggagcctgagaaccactttgtgggcggcgctgaggccagcgcccctggagaggccggccggcccctgaacagcaccagcaaggcccagggccctgagagcagccctgctgtgcccagcgccagcagcggcacagctggccctggcaactacgtgcaccccctgaccggccgcctgctggaccccagcagccccctggccctggccctgagcgcccgggaccgggccatgaaggagagccagcagggccccaagggggaggcccccaaggctgacctgaacaagcccctgtacatcgacaccaagatgaggcccagcctggatgctggcttccccaccgtgacccggcagaacacccggggccccctgcggcggcaggagacagagaacaagtatgaaacagacctgggccgggacagaaaaggagatgacaagaagaacatgctgattgacatcatggacaccagccagcagaagtctgctggcctgctgatggtgcacacagtggatgccaccaagctggacaatgccctgcaggaggaggatgagaaggccgaggtggagatgaagccagacagcagccccagcgaggtgcctgagggcgtgtctgaaacagagggcgccctgcagatctctgctgcccctgagcccaccaccgtgcccggccgcaccatcgtggccgtgggctccatggaggaggccgtcatcctgcccttccgcatccccccaccacccctggcctctgtggacctggatgaggacttcatcttcacagagcccctgcccccacccctggagtttgccaacagctttgacatcccagatgacagagctgcctctgtgcctgccctgagtgacctggtgaagcagaagaagagtgacaccccccagagccccagcctgaacagcagccagcccaccaacagcgctgacagcaagaagccagccagcctgagcaactgcctgcctgccagcttcctgcccccacctgagagctttgatgctgtggccgacagcggcatcgaggaggtggacagccgcagcagcagtgaccaccacctggagaccaccagcaccatcagcacagtgagcagcatcagcaccctgagcagcgagggcggggagaatgtggacacctgcaccgtgtatgcagatggccaggccttcatggtggacaagccccctgtgccccccaagcccaagatgaagcccatcatccacaagagcaatgccctgtaccaggatgccctggtggaggaggatgtggacagctttgtgattcctcctccagcccctcctcctcctcctggcagcgcccagcccggcatggccaaggtgctgcagcccaggaccagcaagctgtggggagatgtgacagagatcaagagccccatcctgagcggccccaaggccaacgtcatcagcgagctgaacagcatcctgcagcagatgaaccgggagaagctggccaagccaggagagggcctggacagccccatgggcgccaagagcgccagcctggcccccaggagccctgagatcatgagcaccatcagcggcaccaggagcaccaccgtgaccttcaccgtgcggcccggcaccagccagcccatcaccctgcagagccggcccccagactatgagagcaggaccagcggcacccggcgggcccccagccctgtggtgagccccacagagatgaacaaggagaccctgcctgcccccctgtctgctgccacagccagccccagccctgccctgagtgatgtgttcagcctgcccagccagccccccagcggggacctgtttggcctgaacccagctggccgcagccgcagccccagccccagcatcctgcagcagcccatcagcaacaagcccttcaccaccaagcctgtgcacctgtggaccaagccagatgtggccgactggctggagagcctgaacctgggggagcacaaggaggccttcatggacaatgaaattgatggcagccacctgcccaacctgcagaaggaggacctgattgacctgggcgtgaccagggtgggccacaggatgaacatcgagcgggccctgaagcagctgctggacagatag

SEQ ID NO: 169547 - DNA, 816 bp, synthetic construct
  misc_feature 1..816: note = Description of Artificial Sequence: Synthetic coding sequence
  source 1..816: mol_type = other DNA
atgatgatgaatgtgcctgggggcggcgctgctgctgtgatgatgacaggctacaacaacggccgctgccccaggaacagcctgtacagcgactgcatcatcgaggagaagacagtggtgctgcagaagaaggacaatgaaggatttggatttgtgctgcggggggccaaggctgacacccccatcgaggagttcacccccaccccagccttccctgccctgcagtacctggagagcgtggatgaaggaggagtggcctggcaggccggcctgaggactggagacttcctgattgaggtgaacaatgaaaatgtggtgaaggtgggccaccggcaggtggtgaacatgatccggcagggcggcaaccacctggtgctgaaggtggtgacagtgaccaggaacctggaccctgatgacacagccaggaagaaggcccctcctccacccaagagggcccccaccacagccctgaccctgcggagcaagtccatgaccagcgagctggaggagctggacaagccagaggagatcgtgcctgccagcaagcccagcagagctgctgagaacatggctgtggagccccgggtggccaccatcaagcagaggcccagcagccgctgcttccctgctggcagtgacatgaacagcgtgtatgaaaggcagggcattgctgtgatgacccccaccgtgcccggcagccccaaggcccccttcctgggcatcccccggggcaccatgaggcggcagaagagcatcggcaagaagtgtggcaccccaccccagaagctgcccctgggcttccagacccagccctag

SEQ ID NO: 169548 - DNA, 3765 bp, synthetic construct
  misc_feature 1..3765: note = Description of Artificial Sequence: Synthetic coding sequence
  source 1..3765: mol_type = other DNA
atgatgatgaatgtgcctgggggcggcgctgctgctgtgatgatgacaggctacaacaacggccgctgccccaggaacagcctgtacagcgactgcatcatcgaggagaagacagtggtgctgcagaagaaggacaatgaaggatttggatttgtgctgcggggggccaaggctgacacccccatcgaggagttcacccccaccccagccttccctgccctgcagtacctggagagcgtggatgaaggaggagtggcctggcaggccggcctgaggactggagacttcctgattgaggtgaacaatgaaaatgtggtgaaggtgggccaccggcaggtggtgaacatgatccggcagggcggcaaccacctggtgctgaaggtggtgacagtgaccaggaacctggaccctgatgacacagccaggaagaaggcccctcctccacccaagagggcccccaccacagccctgaccctgcggagcaagtccatgaccagcgagctggaggagctggtggacaaggacaagccagaggagatcgtgcctgccagcaagcccagcagagctgctgagaacatggctgtggagccccgggtggccaccatcaagcagaggcccagcagccgctgcttccctgctggcagtgacatgaacagcgtgtatgagcggcagggcattgctgtgatgacccccaccgtgcccggcagccccaaggcccccttcctgggcatcccccggggcaccatgaggcggcagaagagcattgacagccgcatcttcctgagcggcatcacagaggaggagcggcagttcctggccccacccatgctgaagttcaccaggagcctgtccatgccagacaccagcgaggacatccccccaccaccccagagcgtgccccccagccccccaccacccagccccaccacctacaactgccccaagagccccaccccccgggtgtatggcaccatcaagccagccttcaaccagaacagcgctgccaaggtgtccccagccaccaggagtgacacagtggccaccatgatgagggagaagggcatgtacttccggcgggagctggaccgctacagcctggacagtgaagatctctacagcagaaatgccggcccccaggccaacttcaggaacaagaggggccagatgcctgagaacccctacagcgaggtgggcaagatcgccagcaaggctgtgtatgtgcctgccaagccagcccggaggaagggcatgctggtgaagcagagcaatgtggaggacagccctgagaagacctgcagcatccccatccccaccatcatcgtgaaggagcccagcaccagcagcagcggcaagagcagccagggcagctccatggagattgacccccaggcccctgagccccccagccagctgcggccagatgagagcctgactgtgagcagcccctttgctgctgccatcgccggggctgtgcgggaccgggagaagaggctggaggcccggaggaacagccctgccttcctgagcacagacctgggagatgaagatgtgggcctgggccccccagcccccaggacccggcccagcatgtttcctgaggagggggactttgctgatgaggacagcgctgagcagctgagcagccccatgcccagcgccaccccccgggagcctgagaaccactttgtgggcggcgctgaggccagcgcccctggagaggccggccggcccctgaacagcaccagcaaggcccagggccctgagagcagccctgctgtgcccagcgccagcagcggcacagctggccctggcaactacgtgcaccccctgaccggccgcctgctggaccccagcagccccctggccctggccctgagcgcccgggaccgggccatgaaggagagccagcagggccccaagggggaggcccccaaggctgacctgaacaagcccctgtacatcgacaccaagatgaggcccagcctggatgctggcttccccaccgtgacccggcagaacacccggggccccctgcggcggcaggagacagagaacaagtatgaaacagacctgggccgggacagaaaaggagatgacaagaagaacatgctgattgacatcatggacaccagccagcagaagtctgctggcctgctgatggtgcacacagtggatgccaccaagctggacaatgccctgcaggaggaggatgagaaggccgaggtggagatgaagccagacagcagccccagcgaggtgcctgagggcgtgtctgaaacagagggcgccctgcagatctctgctgcccctgagcccaccaccgtgcccggccgcaccatcgtggccgtgggctccatggaggaggccgtcatcctgcccttccgcatccccccaccacccctggcctctgtggacctggatgaggacttcatcttcacagagcccctgcccccacccctggagtttgccaacagctttgacatcccagatgacagagctgcctctgtgcctgccctgagtgacctggtgaagcagaagaagagtgacaccccccagagccccagcctgaacagcagccagcccaccaacagcgctgacagcaagaagccagccagcctgagcaactgcctgcctgccagcttcctgcccccacctgagagctttgatgctgtggccgacagcggcatcgaggaggtggacagccgcagcagcagtgaccaccacctggagaccaccagcaccatcagcacagtgagcagcatcagcaccctgagcagcgagggcggggagaatgtggacacctgcaccgtgtatgcagatggccaggccttcatggtggacaagccccctgtgccccccaagcccaagatgaagcccatcatccacaagagcaatgccctgtaccaggatgccctggtggaggaggatgtggacagctttgtgattcctcctccagcccctcctcctcctcctggcagcgcccagcccggcatggccaaggtgctgcagcccaggaccagcaagctgtggggagatgtgacagagatcaagagccccatcctgagcggccccaaggccaacgtcatcagcgagctgaacagcatcctgcagcagatgaaccgggagaagctggccaagccaggagagggcctggacagccccatgggcgccaagagcgccagcctggcccccaggagccctgagatcatgagcaccatcagcggcaccaggagcaccaccgtgaccttcaccgtgcggcccggcaccagccagcccatcaccctgcagagccggcccccagactatgagagcaggaccagcggcacccggcgggcccccagccctgtggtgagccccacagagatgaacaaggagaccctgcctgcccccctgtctgctgccacagccagccccagccctgccctgagtgatgtgttcagcctgcccagccagccccccagcggggacctgtttggcctgaacccagctggccgcagccgcagccccagccccagcatcctgcagcagcccatcagcaacaagcccttcaccaccaagcctgtgcacctgtggaccaagccagatgtggccgactggctggagagcctgaacctgggggagcacaaggaggccttcatggacaatgaaattgatggcagccacctgcccaacctgcagaaggaggacctgattgacctgggcgtgaccagggtgggccacaggatgaacatcgagcgggccctgaagcagctgctggacagatag

SEQ ID NO: 169549 - DNA, 915 bp, synthetic construct
  misc_feature 1..915: note = Description of Artificial Sequence: Synthetic coding sequence
  source 1..915: mol_type = other DNA
atgcccaggagccccaccagcagtgaagatgagatggcccagagcttcagtgactacagcgtgggcagcgagagtgacagcagcaaggaggagaccatctatgacaccatccgggccacagctgagaagccaggaggagccaggacagaggagagccagggcaacaccctggtgatccgggtggtgattcatgacctgcagcagaccaagtgcatccgcttcaacccagatgccaccgtgtgggtggccaagcagaggatcctgtgcaccctgacccagagcctgaaggatgtgctgaactacggcctcttccagcctgccagcaatggaagagatggcaagttcctggatgaggagcggctgctgcgggagtacccccagcctgtgggggagggcgtgcccagcctggagttccgctacaagaagagggtgtacaagcaggccagcctggatgagaagcagctggccaagctgcacaccaagaccaacctgaagaagtgcatggaccacatccagcaccggctggtggagaagatcaccaagatgctggaccggggcctggaccccaacttccatgaccctgagaccggggagacccccctgaccctggccgcccagctggatgacagcgtggaggtgatcaaggccctgaagaatggaggagcccacctggacttccgggccaaggatggcatgacagccctgcacaaggccgcccgggccaggaaccaggtggccctgaagaccctgctggagctgggcgccagcccagactacaaggacagctatggcctgacccccctgtaccacacagccatcgtgggcggggacccctactgctgtgagctgctgctgcacgagcacgccaccgtgtgctgcaaggatgaaaatggctggcatgagatccaccagtag

SEQ ID NO: 169550 - DNA, 5244 bp, synthetic construct
  misc_feature 1..5244: note = Description of Artificial Sequence: Synthetic coding sequence
  source 1..5244: mol_type = other DNA
atggatggccctggggccagcgctgtggtggtgcgggtgggcatcccagacctgcagcagaccaagtgcctgcggctggaccctgctgcccctgtgtgggccgccaagcagagggtgctgtgtgccctgaaccacagcctgcaggatgccctgaactacggcctcttccagccccccagccggggccgggccggcaagttcctggatgaggagcggctgctgcaggagtacccacccaacctggacacccccctgccctacctggagttccgctacaagagaagagtgtatgcccagaacctgattgatgacaagcagtttgccaagctgcacaccaaggccaacctgaagaagttcatggactatgtgcagctgcacagcacagacaaggtggcccggctgctggacaagggcctggaccccaacttccatgaccctgacagcggggagtgccccctgagcctggccgcccagctggacaatgccacagacctgctgaaggtgctgaagaatggaggagcccacctggacttccgcaccagagatggcctgacagctgtgcactgtgccacccggcagagaaatgctgctgccctgaccaccctgctggacctgggcgccagcccagactacaaggacagccggggcctgacccccctgtaccacagcgccctgggcggcggagatgccctgtgctgtgagctgctgctgcatgaccacgcccagctgggcatcacagatgaaaatggctggcaggagatccaccaggcctgccgcttcggccacgtgcagcacctggagcacctgctcttctacggggctgacatgggcgcccagaatgccagcggcaacacagccctgcacatctgtgccctgtacaaccaggagagctgtgcccgggtgctgctcttccggggggccaacagagatgtgaggaactacaacagccagacagccttccaggtggccatcatcgccggcaactttgagctggccgaggtgatcaagacccacaaggacagtgatgtggtgcccttccgggagacccccagctatgccaagagaagaaggctggccggccccagcggcctggccagcccccggcccctgcagaggtctgccagtgacatcaacctgaagggggaggcccagcctgctgccagccctggccccagcctgcggagcctgccccaccagctgctgctgcagaggctgcaggaggagaaggaccgggacagagatgctgaccaggagagcaacatcagcggccccctggccggccgggccggccagagcaagatcagtgaccccggccctggccctggaggagtgggcggggcccccctgcccccacctggggcccccaggagctgcatccgcatccgggcccgcttccctgcccccccagcccccccagcccccccaccccggggccccaagaggaagctgtacagcgctgtgcccggcaggaagttcatcgctgtgaaggcccacagcccccagggcgagggggagatccccctgcacagaggagaggccgtgaaggtgctgagcattggagagggcggcttctgggagggcaccgtgaagggccgcacaggctggttccctgctgactgtgtggaggaggtgcagatgaggcagcacgacaccaggcctgagacccgggaggacaggaccaagaggctcttccgccactacacagtgggcagctatgacagcctgaccagccacagcgactatgtgattgatgacaaggtggccgtgctgcagaagagggaccacgagggcttcggctttgtgctgcggggggccaaggccgagacccccatcgaggagttcacccccaccccagccttccctgccctgcagtacctggagagcgtggatgtggagggcgtggcctggagggctggcctgaggactggagacttcctgattgaggtgaatggagtgaatgtggtgaaggtgggccacaagcaggtggtggccctgatccggcagggcggcaaccggctggtgatgaaggtggtgtctgtgaccaggaagccagaggaggatggagccaggagaagagcccctcctccacccaagagggcccccagcaccaccctgaccctgcggagcaagtccatgacagctgagctggaggagctggccagcatcagaagaaggaagggggagaagctggatgagatgctggccgctgctgctgagcccaccctgcggccagacattgctgatgctgacagcagagctgccaccgtgaagcagaggcccaccagccgccgcatcaccccagctgagatcagcagcctgtttgagcggcagggcctgcccggccctgagaagctgcccggcagcctgaggaagggcatccccaggaccaagtctgtgggagaagatgagaagctggccagcctgctggagggccgcttccccaggagcacctccatgcaggaccctgtgcgggagggccggggcatccccccaccaccccagacagcccctcctcctcctccagccccctactactttgacagcggccccccaccagccttcagccccccacctcctcctggccgggcctatgacacagtgcgcagcagcttcaagccaggcctggaggcccggctgggcgctggggccgccggcctgtatgagcctggagctgccctgggccccctgccctacccagagcggcagaagagggcccgctccatgatcatcctgcaggacagcgcccctgagagcggagatgccccccggcccccacctgctgccaccccacctgagcggcccaagaggcggccccggcccccaggccctgacagcccctatgccaacctgggcgccttcagcgccagcctgtttgcccccagcaagccccagaggaggaagagccccctggtgaagcagctgcaggtggaggatgcccaggagagagctgccctggccgtgggcagccctggccctgggggcggcagctttgcccgggagcccagccccacccaccggggccccaggcctgggggcctggactatggagctggagatggccctggcctggcctttggaggccctggccctgccaaggaccggcggctggaggagcggcggcgcagcacagtgttcctgtctgtgggcgccatcgagggcagcgcccctggagctgacctgcccagcctgcagcccagccgcagcattgatgagcggctgctgggcaccggccccacagctggccgggacctgctgctgcccagccctgtgtctgccctgaagcccctggtgtctggccccagcctgggccccagcggcagcaccttcatccaccccctgaccgggaagcccctggaccccagcagccccctggccctggccctggccgcccgggagcgggccctggccagccaggcccccagccgcagccccacccctgtgcacagcccagatgctgacaggcctggccccctgtttgtggatgtgcaggcccgggaccctgagcggggcagcctggccagccctgccttcagccccaggagccctgcctggatccctgtgcctgcccggcgggaggccgagaaggtgccccgggaggagaggaagagccctgaggacaagaagtccatgatcctgtctgtgctggacaccagcctgcagaggcctgctggcctcatcgtggtgcacgccaccagcaatggccaggagcccagccggctgggcggcgctgaggaggagcggcccggcaccccagagctggccccagcccccatgcagagcgctgctgtggccgagcccctgcccagcccccgggcccagcccccaggcggcaccccagcagatgctggccctggccagggcagcagcgaggaggagcctgagctggtgtttgctgtgaacctgcccccagcccagctgagcagcagtgatgaggagacccgggaggagctggcccgcatcggcctggtgcccccacctgaggagtttgccaatggagtgctgctggccacccccctggccggccctggccccagccccaccaccgtgcccagccctgccagcggcaagcccagcagcgagcccccaccagcccctgagagcgctgctgacagcggcgtggaggaggccgacaccaggagcagcagtgacccccacctggagaccaccagcaccatcagcacagtgtcctccatgagcaccctgagcagcgagagcggggagctgacagacacccacaccagctttgctgatggccacaccttcctgctggagaagccccctgtgccccccaagcccaagctgaagagccccctgggcaagggccctgtgaccttccgggaccccctgctgaagcagagcagtgacagcgagctgatggcccagcagcaccacgccgccagcgctggcctggccagcgctgctggccctgcccggccccgctacctgttccagaggaggagcaagctgtggggagaccctgtggagagccggggcctgcccggcccagaagatgacaagcccaccgtcatcagcgagctgagcagccggctgcagcagctgaacaaggacaccaggagcctgggggaggagcctgtgggcggcctgggcagcctgctggaccctgccaagaagagccccatcgctgctgcccggctcttcagcagcctgggggagctgagcagcatcagcgcccagaggagccctgggggccctgggggcggggccagctacagcgtgcggcccagcggccgctaccctgtggcccggcgggcccccagccctgtgaagccagccagcctggagcgggtggagggcctgggcgctggggccggcggggccggccggcccttcggcctgaccccacccaccatcctgaagagcagcagcctgagcatcccccatgagcccaaggaggtgcgctttgtggtgcgctctgtgtctgcccggagccgcagccccagccccagccccctgcccagccctgccagcggccctggccctggggcccctggcccccggcggcccttccagcagaagcccctgcagctgtggagcaagtttgatgtgggggactggctggagagcatccacctgggggagcaccgggacagatttgaggaccacgagattgagggcgcccacctgcctgccctgaccaaggatgactttgtggagctgggcgtgaccagggtgggccacaggatgaacatcgagcgggccctgcggcagctggatggcagctag

SEQ ID NO: 169551 - DNA, 5229 bp, synthetic construct
  misc_feature 1..5229: note = Description of Artificial Sequence: Synthetic coding sequence
  source 1..5229: mol_type = other DNA
atggatggccctggggccagcgctgtggtggtgcgggtgggcatcccagacctgcagcagaccaagtgcctgcggctggaccctgctgcccctgtgtgggccgccaagcagagggtgctgtgtgccctgaaccacagcctgcaggatgccctgaactacggcctcttccagccccccagccggggccgggccggcaagttcctggatgaggagcggctgctgcaggagtacccacccaacctggacacccccctgccctacctggagttccgctacaagagaagagtgtatgcccagaacctgattgatgacaagcagtttgccaagctgcacaccaaggccaacctgaagaagttcatggactatgtgcagctgcacagcacagacaaggtggcccggctgctggacaagggcctggaccccaacttccatgaccctgacagcggggagtgccccctgagcctggccgcccagctggacaatgccacagacctgctgaaggtgctgaagaatggaggagcccacctggacttccgcaccagagatggcctgacagctgtgcactgtgccacccggcagagaaatgctgctgccctgaccaccctgctggacctgggcgccagcccagactacaaggacagccggggcctgacccccctgtaccacagcgccctgggcggcggagatgccctgtgctgtgagctgctgctgcatgaccacgcccagctgggcatcacagatgaaaatggctggcaggagatccaccaggcctgccgcttcggccacgtgcagcacctggagcacctgctcttctacggggctgacatgggcgcccagaatgccagcggcaacacagccctgcacatctgtgccctgtacaaccaggagagctgtgcccgggtgctgctcttccggggggccaacagagatgtgaggaactacaacagccagacagccttccaggtggccatcatcgccggcaactttgagctggccgaggtgatcaagacccacaaggacagtgatgtggtgcccttccgggagacccccagctatgccaagagaagaaggctggccggccccagcggcctggccagcccccggcccctgcagaggtctgccagtgacatcaacctgaagggggaggcccagcctgctgccagccctggccccagcctgcggagcctgccccaccagctgctgctgcagaggctgcaggaggagaaggaccgggacagagatgctgaccaggagagcaacatcagcggccccctggccggccgggccggccagagcaagatcagcgagcccggggcccccaggagctgcatccgcatccgggcccgcttccctgcccccccagcccccccagcccccccaccccggggccccaagaggaagctgtacagcgctgtgcccggcaggaagttcatcgctgtgaaggcccacagcccccagggcgagggggagatccccctgcacagaggagaggccgtgaaggtgctgagcatcggggagggcggcttctgggagggcaccgtgaagggccgcacaggctggttccctgctgactgtgtggaggaggtgcagatgaggcagcacgacaccaggcctgagacccgggaggacaggaccaagaggctcttccgccactacacagtgggcagctatgacagcctgaccagccacagcgactatgtgattgatgacaaggtggccgtgctgcagaagagggaccacgagggctttggatttgtgctgcggggggccaaggccgagacccccatcgaggagttcacccccaccccagccttccctgccctgcagtacctggagagcgtggatgtggagggcgtggcctggagggctggcctgaggactggagacttcctgattgaggtgaatggagtgaatgtggtgaaggtgggccacaagcaggtggtggccctgatccggcagggcggcaaccggctggtgatgaaggtggtgtctgtgaccaggaagccagaagaagatggagcccggcggcgggcccctcctccacccaagagggcccccagcaccaccctgaccctgcggagcaagtccatgacagctgagctggaggagctgggggagtggaggggccgggagggcagcgagaagctggatgagatgctggccgctgctgctgagcccaccctgcggccagacattgctgatgctgacagcagagctgccaccgtgaagcagaggcccaccagccgccgcatcaccccagctgagatcagcagcctgtttgagcggcagggcctgcccggccctgagaagctgcccggcagcctgaggaagggcatccccaggaccaagtctgtgggagaagatgagaagctggccagcctgctggagggccgcttccccaggagcacctccatgcaggaccctgtgcgggagggccggggcatccccccaccaccccagacagcccctcctcctcctccagccccctactactttgacagcggccccccaccagccttcagccccccacctcctcctggccgggcctatgacacagtgcgcagcagcttcaagccaggcctggaggcccggctgggcgctggggccgccggcctgtatgagcctggagctgccctgggccccctgccctacccagagcggcagaagagggcccgctccatgatcatcctgcaggacagcgcccctgagagcggagatgccccccggcccccacctgctgccaccccacctgagcggcccaagaggcggccccggcccccaggccctgacagcccctatgccaacctgggcgccttcagcgccagcctgtttgcccccagcaagccccagaggaggaagagccccctggtgaagcagctgcaggtggaggatgcccaggagagagctgccctggccgtgggcagccctggccctgggggcggcagctttgcccgggagcccagccccacccaccggggccccaggcctgggggcctggactatggagctggagatggccctggcctggcctttggaggccctggccctgccaaggaccggcggctggaggagcggcggcgcagcacagtgttcctgtctgtgggcgccatcgagggcagcgcccctggagctgacctgcccagcctgcagcccagccgcagcattgatgagcggctgctgggcaccggccccacagctggccgggacctgctgctgcccagccctgtgtctgccctgaagcccctggtgtctggccccagcctgggccccagcggcagcaccttcatccaccccctgaccgggaagcccctggaccccagcagccccctggccctggccctggccgcccgggagcgggccctggccagccaggcccccagccgcagccccacccctgtgcacagcccagatgctgacaggcctggccccctgtttgtggatgtgcaggcccgggaccctgagcggggcagcctggccagccctgccttcagccccaggagccctgcctggatccctgtgcctgcccggcgggaggccgagaaggtgccccgggaggagaggaagagccctgaggacaagaagtccatgatcctgtctgtgctggacaccagcctgcagaggcctgctggcctcatcgtggtgcacgccaccagcaatggccaggagcccagccggctgggcggcgctgaggaggagcggcccggcaccccagagctggccccagcccccatgcagagcgctgctgtggccgagcccctgcccagcccccgggcccagcccccaggcggcaccccagcagatgctggccctggccagggcagcagcgaggaggagcctgagctggtgtttgctgtgaacctgcccccagcccagctgagcagcagtgatgaggagacccgggaggagctggcccgcatcggcctggtgcccccacctgaggagtttgccaatggagtgctgctggccacccccctggccggccctggccccagccccaccaccgtgcccagccctgccagcggcaagcccagcagcgagcccccaccagcccctgagagcgctgctgacagcggcgtggaggaggccgacaccaggagcagcagtgacccccacctggagaccaccagcaccatcagcacagtgtcctccatgagcaccctgagcagcgagagcggggagctgacagacacccacaccagctttgctgatggccacaccttcctgctggagaagccccctgtgccccccaagcccaagctgaagagccccctgggcaagggccctgtgaccttccgggaccccctgctgaagcagagcagtgacagcgagctgatggcccagcagcaccacgccgccagcgctggcctggccagcgctgctggccctgcccggccccgctacctgttccagaggaggagcaagctgtggggagaccctgtggagagccggggcctgcccggcccagaagatgacaagcccaccgtcatcagcgagctgagcagccggctgcagcagctgaacaaggacaccaggagcctgggggaggagcctgtgggcggcctgggcagcctgctggaccctgccaagaagagccccatcgctgctgcccgctgccgcagccccatggtgggcctgcggctcttcagcagcctgggggagctgagcagcatcagcgcccagaggagccctgggggccctgggggcggggccagctacagcgtgcggcccagcggccgctaccctgtggcccggcgggcccccagccctgtgaagccagccagcctggagcgggtggagggcctgggcgctggggccggcggggccggccggcccttcggcctgaccccacccaccatcctgaagagcagcagcctgagcatcccccatgagcccaaggaggtgcgctttgtggtgcgctctgtgtctgcccggagccgcagccccagccccagccccctgcccagccctgccagcggccctggccctggggcccctggcccccggcggcccttccagcagaagcccctgcagctgtggagcaagtttgatgtgggggactggctggagagcatccacctgggggagcaccgggacagatttgaagatcatgaaattgaaggagcccacctgcctgccctgaccaaggatgactttgtggagctgggcgtgaccagggtgggccacaggatgaacatcgagcgggccctgcggcagctggatggcagctag

SEQ ID NO: 169552 - DNA, 2736 bp, synthetic construct
  misc_feature 1..2736: note = Description of Artificial Sequence: Synthetic coding sequence
  source 1..2736: mol_type = other DNA
atgccaccccggcgcagcatcgtggaggtgaaggtgctggatgtgcagaagagaagagtgcccaacaagcactacgtgtacatcatccgggtgacctggagcagcggcagcacagaggccatctaccgccgctacagcaagttctttgacctgcagatgcagatgctggacaagttccccatggagggcggccagaaggaccccaagcagaggatcatccccttcctgcccgggaagatcctcttcagaagaagccacatcagagatgtggccgtgaagaggctcatccccattgatgagtactgcaaggccctgatccagctgcccccctacatcagccagtgtgatgaggtgctgcagttctttgagaccaggcctgaggacctgaacccccccaaggaggagcacatcggcaagaagaagagcggcggggaccagacctctgtggaccccatggtgctggagcagtatgtggtggtggccaactaccagaagcaggagagcagcgagatcagcctgtctgtgggccaggtggtggacatcatcgagaagaatgaaagtggctggtggtttgtgtccacagctgaggagcagggctgggtgcctgccacctgcctggagggccaggatggagtgcaggatgagttcagcctgcagcctgaggaggaggagaagtacaccgtcatctacccctacacagcccgggaccaggatgagatgaacctggagagaggagctgtggtggaggtgatccagaagaacctggagggctggtggaagatccgctaccagggcaaggagggctgggccccagccagctacctgaagaagaacagcggggagcccctgccccccaagccaggccctggcagccccagccaccctggggccctggacctggatggagtgtcccggcagcagaatgctgtgggccgggagaaggagctgctgagcagccagagagatggccgctttgagggccggcctgtgcctgatggagatgccaagcagaggagccccaagatgaggcagaggcctcctccaagaagagacatgaccatcccccggggcctgaacctgcccaagccacccatccccccccaggtggaggaggagtactacaccatcgccgagttccagaccaccatcccagatggcatctccttccaggccggcctgaaggtggaggtgattgagaagaacctgagcggctggtggtacatccagatcgaggacaaggagggctgggccccagccaccttcatcgacaagtacaagaagaccagcaatgccagccggcccaacttcctggcccccctgccccatgaggtgacccagctgcggctgggggaggccgccgccctggagaacaacacaggcagcgaggccaccggccccagccggcccctgcctgatgcccctcatggagtgatggacagcggcctgccctggagcaaggactggaagggcagcaaggatgtgctgaggaaggccagcagtgacatgtctgccagcgctggctatgaggagatcagtgaccctgacatggaggagaagcccagcctgccccccaggaaggagagcatcatcaagtctgagggggagctgctggagcgggagcgggagcggcagaggacagagcagctgcggggccccacccccaagcccccaggagtcatcctgcccatgatgcctgccaagcacatccccccagcccgggacagccggcggcctgagcccaagccagacaagagccgcctcttccagctgaagaatgacatgggcctggagtgtggccacaaggtgctggccaaggaggtgaagaagcccaacctgcggcccatcagcaagagcaagacagacctgcctgaggagaagccagatgccaccccccagaaccccttcctgaagagccggccccaggtgcggcccaagccagcccccagccccaagacagagcccccccagggcgaggaccaggtggacatctgcaacctgcggagcaagctgcggcctgccaagagccaggacaagagcctgctggatggagagggcccccaggccgtgggcggccaggatgtggccttcagccgctccttcctgcccggggagggccctggccgggcccaggacagaacaggcaagcaggacggcctgagccccaaggagatcagctgccgggccccacccaggcctgccaagaccacagatcctgtgtccaagtctgtgcctgtgcccctgcaggaggccccccagcagaggcctgtggtgcccccccggcggcccccaccacccaagaagaccagcagcagcagccggcccctgcctgaggtgcggggcccccagtgtgagggccacgagagccgggccgcccccaccccaggccgggccctgctggtgccccccaaggccaagcccttcctgagcaacagcctgggcggccaggatgacacccggggcaagggcagcctgggcccctggggcaccgggaagatcggggagaaccgggagaaggctgctgctgcctctgtgcccaatgctgatggcctgaaggacagcctgtatgtggccgtggccgactttgaaggagacaaggacaccagcagcttccaggagggcaccgtgtttgaggtgcgggagaagaacagcagcggctggtggttctgccaggtgctgagcggggcccccagctgggagggctggatccccagcaactacctgaggaagaagccctag

SEQ ID NO: 169553 - DNA, 2805 bp, synthetic construct
  misc_feature 1..2805: note = Description of Artificial Sequence: Synthetic coding sequence
  source 1..2805: mol_type = other DNA
atggaggagatctggaagttcagcacctacctgaacctgggctacgtgtccatgtgcctggagcacctgctgtttgaccacaagtactggctgaactgcatcctggtggaggacacagagatccaggtgtctgtggatgacaagcacctggagaccatctacctgggcctgctgatccaggagggccacttcttctgccgggccctgtgcagcgtgaccccacctgctgagaaggagggagaatgtctgaccctgtgcaagaatgagctgatctctgtgaagatggccgaggccggcagcgagctggagggcgtgtccctggtgacaggccagaggggcctggtgctggtgtctgccctggagcccctgcccctgcccttccaccagtggttcctgaagaactacccaggcagctgtggcctgagcaggaagagggactggacaggcagctaccagatcggccggggccgctgcaaggccctgaccggctatgagcccggggagaaggatgagctgaacttctaccagggcgagagcattgagatcattggatttgtgattcctggcctgcagtggttcatcggcaagagcaccagcagcggccaggtgggctttgtgcccaccagaaatattgatcctgacagctacagccccatgagcagaaattctgccttcctgagtgatgaggagcgctgcagcctgctggccctgggcagtgacaagcagacagagtgcagcagcttcctgcacaccctggccaggacagacatcacctctgtgtaccgcctgagcggctttgagagcatccagaaccccccaaatgacctgagcgccagccagcctgagggcttcaaggaggtgcggcccggccgggcctgggaggagcaccaggccgtgggcagccggcagagcagcagcagcgaggacagcagcctggaggaggagctgctgagcgccaccagtgacagctaccgcctgcctgagccagatgacctggatgatcctgagctgctgatggacctgagcacaggccaggaggaggaggccgagaactttgcccccatcctggccttcctggaccacgagggctatgctgaccacttcaagagcctgtatgacttctccttctccttcctgaccagcagcttctacagcttctctgaagaagatgaatttgtggcctacctggaggccagcaggaagtgggccaagaagagccacatgacctgggcccacgcccggctgtgcttcctgctgggccgcctgagcatcaggaaggtgaagctgagccaggcccgggtgtactttgaggaggccatccacatcctgaatggagcctttgaggacctgagcctggtggccaccctgtacatcaacctggccgccatctacctgaagcagaggctgcggcacaagggcagcgccctgctggagaaggccggggccctgctggcctgcctgcctgaccgggagagcagcgccaagcatgagctggatgtggtggcctacgtgctgcggcagggcatcgtggtgggcagcagccccctggaggcccgggcctgcttcctggccatccggctgctgctgagcctgggcagacatgaggaggtgctgccctttgctgagcggctgcagctgctgagcggccaccccccagccagcgaggccgtggcctctgtgctgtccttcctgtatgacaagaagtacctgccccacctggccgtggcctctgtgcagcagcacggcatccagagcgcccagggcatgagcctgcccatctggcaggtgcacctggtgctgcagaacaccaccaagctgctgggcttccccagccctggctggggcgaggtgtctgccctggcctgccccatgctgcggcaggccctggccgcctgtgaggagctggccgacaggagcacccagagggccctgtgcctgatcctgagcaaggtgtacctggagcacaggagcccagatggagccatccactacctgagccaggccctggtgctgggccagctgctgggggagcaggagagctttgagagcagcctgtgcctggcctgggcctacctgctggccagccaggccaagaaggccctggatgtgctggagcccctgctgtgcagcctgaaggagacagagagcctgacccagaggggcgtcatctacaacctgctgggcctggccctgcagggcgagggccgggtgaacagagctgccaagagctacctgcgggccctgaacagagcccaggaggtgggagatgtgcacaaccaggccgtggccatggccaacctgggccacctgagcctgaagtcctgggcccagcacccagccaggaactacctgctgcaggccgtgcggctgtactgtgagctgcaggccagcaaggagacagacatggagctggtgcaggtgttcctgtggctggcccaggtgctggtgtctggccaccagctgacccacggcctgctgtgctatgagatggccctgctgtttggcctgcggcaccgccacctgaagagcaaatatgtgccctgctgctgggaggccatcgagaagtctgtgggcagcagcttcatccacttcctgagccaggtgatctccttcatgagcctgctgtgtgtgcaggtgtccttccggccccccaaccccagcgccatcagcacagccctgtgcccccagaccctgcggcatgccagccccaccatgagcacaggctggccctggctgagcaacagcggcaccggccgctggaagggcggctgctggagcccctggggcagcttcatcggcacctag

SEQ ID NO: 169554 - DNA, 453 bp, synthetic construct
  misc_feature 1..453: note = Description of Artificial Sequence: Synthetic coding sequence
  source 1..453: mol_type = other DNA
atgtctgagcagatgatgcagagcgtgggctgccgcatcagcctgagcgtcttccagttcctgggggaccagaggcaggagctggtggccttccaccggctggccaccgtgtactacagcctgcacatgtatgagatggccgaggactgctacctgaagaccctgagcctgtgccccccctggctgcagagccccaaggaggccctgtactatgccaaggtgtactaccgcctgggccgcctgaccttctgccagctgaaggatgcccatgatgccacagagtacttcctgctggccctggccgctgctgtgctgctgggagatgaggagctgcaggacaccatccgcagccggctggacaacatctgccagagccccctgtggcacagccggcccagcggctgcagcagcgagcgggcccgctggctgagcggcggcggcctggccctgtag

SEQ ID NO: 169555 - DNA, 3867 bp, synthetic construct
  misc_feature 1..3867: note = Description of Artificial Sequence: Synthetic coding sequence
  source 1..3867: mol_type = other DNA
atgggcggctgcttctgcatcccccgggagaggagcctgacccggggccctgggaaggagacccccagcaaggaccccaccgtgtccagtgaatgtattgccagcagcgagtacaaggagaagtgcttcctgccccagaacatcaacccagacctgaccctgtccttctgtgtgaagagccgcagcagaagatgtgtgaatggccccctgcaggaggccgcccggcggcggctgtgggccctggagaatgaagaccaggaggtgaggatgctgttcaaggacctgagcgcccggctggtgtccatccagagccagagggcccagttcctgatcaccttcaagaccatggaggagatctggaagttcagcacctacctgaacctgggctacgtgtccatgtgcctggagcacctgctgtttgaccacaagtactggctgaactgcatcctggtggaggacacagagatccaggtgtctgtggatgacaagcacctggagaccatctacctgggcctgctgatccaggagggccacttcttctgccgggccctgtgcagcgtgaccccacctgctgagaaggagggggagtgcctgaccctgtgcaagaatgaactcatctctgtgaagatggccgaggccggcagcgagctggagggcgtgtccctggtgacaggccagaggggcctggtgctggtgtctgccctggagcccctgcccctgcccttccaccagtggttcctgaagaactacccaggcagctgtggcctgagcaggaagagggactggacaggcagctaccagatcggccggggccgctgcaaggccctgaccggctatgagcctggagagaaggatgagctgaacttctaccagggcgagagcattgagatcatcggcttcgtcatccctggcctgcagtggttcatcggcaagagcaccagcagcggccaggtgggctttgtgcccaccaggaacatcgaccctgacagctacagccccatgagcaggaacagcgccttcctgagtgatgaggagcgctgcagcctgctggccctgggcagtgacaagcagacagaatgtagcagcttcctgcacaccctggccaggacagacatcacctctgtgtaccgcctgagcggctttgagagcatccagaaccccccaaatgacctgagcgccagccagcctgagggcttcaaggaggtgcggcccggccgggcctgggaggagcaccaggccgtgggcagccggcagagcagcagcagcgaggacagcagcctggaggaggagctgctgagcgccaccagtgacagctaccgcctgcctgagccagatgacctggatgatcctgagctgctgatggacctgagcacaggccaggaggaggaggctgaaaattttgcccccatcctggccttcctggaccacgagggctacgccgaccacttcaagagcctgtatgacttctccttctccttcctgaccagcagcttctacagcttcagcgaggaggatgaatttgtggcctacctggaggccagcaggaagtgggccaagaagagccacatgacctgggcccacgcccggctgtgcttcctgctgggccgcctgagcatcaggaaggtgaagctgagccaggcccgggtgtactttgaggaggccatccacatcctgaatggagcctttgaggacctgagcctggtggccaccctgtacatcaacctggccgccatctacctgaagcagaggctgcggcacaagggcagcgccctgctggagaaggccggggccctgctggcctgcctgcctgaccgggagagcagcgccaagcatgagctggatgtggtggcctacgtgctgcggcagggcatcgtggtgggcagcagccccctggaggcccgggcctgcttcctggccatccggctgctgctgagcctgggcagacatgaggaggtgctgccctttgctgagcggctgcagctgctgagcggccaccccccagccagcgaggccgtggcctctgtgctgtccttcctgtatgacaagaagtacctgccccacctggccgtggcctctgtgcagcagcacggcatccagagcgcccagggcatgagcctgcccatctggcaggtgcacctggtgctgcagaacaccaccaagctgctgggcttccccagccctggctggggcgaggtgtctgccctggcctgccccatgctgcggcaggccctggccgcctgtgaggagctggccgacaggagcacccagagggccctgtgcctgatcctgagcaaggtgtacctggagcacaggagcccagatggagccatccactacctgagccaggccctggtgctgggccagctgctgggggagcaggagagctttgagagcagcctgtgcctggcctgggcctacctgctggccagccaggccaagaaggccctggatgtgctggagcccctgctgtgcagcctgaaggagacagagagcctgacccagaggggcgtcatctacaacctgctgggcctggccctgcagggcgagggccgggtgaacagagctgccaagagctacctgcgggccctgaacagagcccaggaggtgggagatgtgcacaaccaggccgtggccatggccaacctgggccacctgagcctgaagtcctgggcccagcacccagccaggaactacctgctgcaggccgtgcggctgtactgtgagctgcaggccagcaaggagacagacatggagctggtgcaggtgttcctgtggctggcccaggtgctggtgtctggccaccagctgacccacggcctgctgtgctatgagatggccctgctgtttggcctgcggcaccgccacctgaagagccagctgcaggccaccaagagcctgtgccacttctacagctctgtgagccccaaccctgaggcctgcatcacctaccacgagcactggctggccctggcccagcagctgcgggaccgggagatggagggccgcctgctggagagcctgggccagctgtacagaaacctgaacacagcccggagcctgcggcgcagcctgacctgcatcaaggagagcctgcgcatcttcatcgacctgggggagacagacaaggctgctgaggcctggctgggcgccggccgcctgcactacctgatgcaggaggatgagctggtggagctgtgcctgcaggccgccatccagacagccctgaagtctgaggagcccctgctggccctgaagctgtatgaggaggccggagatgtgttcttcaacggcaccaggcaccgccaccacgctgtggagtactaccgggccggggctgtgcccctggcccggcggctgaaggctgtgaggacagagctgcgcatcttcaacaagctgacagagctgcagatcagcctggagggctatgagaaggccctggagtttgccaccctggccgcccggctgagcacagtgactggagaccagaggcaggagctggtggccttccaccggctggccaccgtgtactacagcctgcacatgtatgagatggccgaggactgctacctgaagaccctgagcctgtgccccccctggctgcagagccccaaggaggccctgtactatgccaaggtgtactaccgcctgggccgcctgaccttctgccagctgaaggatgcccatgatgccacagagtacttcctgctggccctggccgctgctgtgctgctgggagatgaggagctgcaggacaccatccgcagccggctggacaacatctgccagagccccctgtggcacagccggcccagcggctgcagcagcgagcgggcccgctggctgagcggcggcggcctggccctgtag

SEQ ID NO: 169556 - DNA, 2181 bp, synthetic construct
  misc_feature 1..2181: note = Description of Artificial Sequence: Synthetic coding sequence
  source 1..2181: mol_type = other DNA
atggacctgagcacaggccaggaggaggaggccgagaactttgcccccatcctggccttcctggaccacgagggctatgctgaccacttcaagagcctgtatgacttctccttctccttcctgaccagcagcttctacagcttctctgaagaagatgaatttgtggcctacctggaggccagcaggaagtgggccaagaagagccacatgacctgggcccacgcccggctgtgcttcctgctgggccgcctgagcatcaggaaggtgaagctgagccaggcccgggtgtactttgaggaggccatccacatcctgaatggagcctttgaggacctgagcctggtggccaccctgtacatcaacctggccgccatctacctgaagcagaggctgcggcacaagggcagcgccctgctggagaaggccggggccctgctggcctgcctgcctgaccgggagagcagcgccaagcatgagctggatgtggtggcctacgtgctgcggcagggcatcgtggtgggcagcagccccctggaggcccgggcctgcttcctggccatccggctgctgctgagcctgggcagacatgaggaggtgctgccctttgctgagcggctgcagctgctgagcggccaccccccagccagcgaggccgtggcctctgtgctgtccttcctgtatgacaagaagtacctgccccacctggccgtggcctctgtgcagcagcacggcatccagagcgcccagggcatgagcctgcccatctggcaggtgcacctggtgctgcagaacaccaccaagctgctgggcttccccagccctggctggggcgaggtgtctgccctggcctgccccatgctgcggcaggccctggccgcctgtgaggagctggccgacaggagcacccagagggccctgtgcctgatcctgagcaaggtgtacctggagcacaggagcccagatggagccatccactacctgagccaggccctggtgctgggccagctgctgggggagcaggagagctttgagagcagcctgtgcctggcctgggcctacctgctggccagccaggccaagaaggccctggatgtgctggagcccctgctgtgcagcctgaaggagacagagagcctgacccagaggggcgtcatctacaacctgctgggcctggccctgcagggcgagggccgggtgaacagagctgccaagagctacctgcgggccctgaacagagcccaggaggtgggagatgtgcacaaccaggccgtggccatggccaacctgggccacctgagcctgaagtcctgggcccagcacccagccaggaactacctgctgcaggccgtgcggctgtactgtgagctgcaggccagcaaggagacagacatggagctggtgcaggtgttcctgtggctggcccaggtgctggtgtctggccaccagctgacccacggcctgctgtgctatgagatggccctgctgtttggcctgcggcaccgccacctgaagagccagctgcaggccaccaagagcctgtgccacttctacagctctgtgagccccaaccctgaggcctgcatcacctaccacgagcactggctggccctggcccagcagctgcgggaccgggagatggagggccgcctgctggagagcctgggccagctgtacagaaacctgaacacagcccggagcctgcggcgcagcctgacctgcatcaaggagagcctgcgcatcttcatcgacctgggggagacagacaaggctgctgaggcctggctgggcgccggccgcctgcactacctgatgcaggaggatgagctggtggagctgtgcctgcaggccgccatccagacagccctgaagtctgaggagcccctgctggccctgaagctgtatgaggaggccggagatgtgttcttcaacggcaccaggcaccgccaccacgctgtggagtactacagagctggagctgtgcccctggcccggcggctgaaggctgtgaggacagagctgcgcatcttcaacaagctgacagagctgcagatcagcctggagggctatgagaaggccctggagtttgccaccctggccgcccggctgagcacagtgacagaggcccgggccggcggcctgagccccccaggctacagcgtgctgctgcctgcccacgtgtag

SEQ ID NO: 169557 - DNA, 720 bp, synthetic construct
  misc_feature 1..720: note = Description of Artificial Sequence: Synthetic coding sequence
  source 1..720: mol_type = other DNA
atgcccctgctgctgctgggggagacagagcccctgaagctggagcgggactgccgcagccctgtggacccctgggccgccgccagcccagacctggccctggcctgcctgtgccactgccaggacctgagcagcggggccttcccagaccggggcgtgctgggcggcgtgctcttccccaccgtggagatggtgatcaaggtgtttgtggccaccagcagcggcagcatcgccatcaggaagaagcagcaggaggtggtgggcttcctggaggccaacaagattgacttcaaggagctggacattgctggagatgaggacaacagacgctggatgagagaaaatgtgcctggagagaagaagccccagaatggcatccccctgcccccccagatcttcaatgaggagcagtactgtggggactttgacagcttcttcagcgccaaggaggagaacatcatctacagcttcctgggcctggcccctcctccagacagcaaaggaagtgagaaggccgaggagggcggggagacagaggcccagaaggagggctctgaagatgtgggcaacctgcctgaggcccaggagaagaatgaggaggagggggagacagccacagaggagacagaggagatcgccatggagggcgctgagggggaggccgaggaggaggaggagacagctgagggggaggagcctggagaagatgaggacagctag

SEQ ID NO: 169558 - DNA, 387 bp, synthetic construct
  misc_feature 1..387: note = Description of Artificial Sequence: Synthetic coding sequence
  source 1..387: mol_type = other DNA
atgagagaaaatgtgcctggagagaagaagccccagaatggcatccccctgcccccccagatcttcaatgaggagcagtactgtggggactttgacagcttcttcagcgccaaggaggagaacatcatctacagcttcctgggcctggcccctcctccagacagcaagggcagcgagaaggccgaggagggcggggagacagaggcccagaaggagggctctgaagatgtgggcaacctgcctgaggcccaggagaagaatgaggaggagggggagacagccacagaggagacagaggagatcgccatggagggcgctgagggggaggccgaggaggaggaggagacagctgagggggaggagcccggggaggatgaggacagctag

SEQ ID NO: 169559 - DNA, 387 bp, synthetic construct; identical to SEQ ID NO: 169558
  misc_feature 1..387: note = Description of Artificial Sequence: Synthetic coding sequence
  source 1..387: mol_type = other DNA

SEQ ID NO: 169560 - DNA, 387 bp, synthetic construct; identical to SEQ ID NO: 169558
  misc_feature 1..387: note = Description of Artificial Sequence: Synthetic coding sequence
  source 1..387: mol_type = other DNA

SEQ ID NO: 169561 - DNA, 321 bp, synthetic construct
  misc_feature 1..321: note = Description of Artificial Sequence: Synthetic coding sequence
  source 1..321: mol_type = other DNA
atgagagaaaatgtgcctggagagaagaagccccagaatggcatccccctgcccccccagatcttcaatgaggagcagtactgtggggactttgacagcttcttcagcgccaaggaggagaacatcatctacagcttcctgggcctggcccctcctccagacagcaagggcagcgagaaggccgaggagggcggggagacagaggcccagaaggagggctctgaagatgtgggcaacctgcctgaggcccaggagaagaatgaggaggagggggagacagccacagaggagacagaggagatcgccatggagggcgcctag

SEQ ID NO: 169562 - DNA, 2373 bp, synthetic construct
  misc_feature 1..2373: note = Description of Artificial Sequence: Synthetic coding sequence
  source 1..2373: mol_type = other DNA
atgaacatcatgaacacagagcagagccagaacagcatcgtgagccgcatcaaggtgtttgagggccagaccaacatcgagaccagcggcctgcccaagaagccagagatcacccccaggagcctgccccccaagcccaccgtgagcagcggcaagcccagcgtggcccccaagccagctgccaacagagccagcggggagtgggacagcggcacagaaaatcggctgaaggtgaccagcaaggagggcctgaccccctacccacccctgcaggaggccggcagcatccctgtgaccaagccagagctgcccaagaagcccaaccctggcctcatccgctctgtgaaccctgagatccctggccggggccccctggccgagagcagtgacagcggcaagaaggtgcccaccccagccccccggcccctgctgctgaagaagtctgtgtcctctgagaaccccacctaccccagcgcccccctgaagcctgtgacagtgcccccccggctggccggggccagccaggccaaggcctacaagagcctgggggagggccccccagccaacccccctgtgcctgtgctgcagagcaagcccctggtggacatcgacctgatcagctttgatgatgatgtgctgcccaccccatctggcaacctggccgaggagagcgtgggcagcgagatggtgctggaccccttccagctgcctgccaagacagagcccatcaaggagagagctgtgcagcctgcccccaccaggaagcccaccgtcatccgcatcccagccaagccaggcaagtgcctgcacgaggacccccagagccccccacccctgcctgctgagaagcccatcggcaacaccttcagcacagtgtctgggaagctgagcaatgtggagaggaccaggaacctggagagcaaccaccctggccagacaggaggctttgtgcgggtgcccccccggctgccccccaggcctgtgaatggcaagaccatccccacccagcagccccccaccaaggtgcccccagagaggcctcctccacccaagctgagcgccacccggcgcagcaacaagaagctgcccttcaacagaagcagcagtgacatggacctgcagaagaagcagagcaacctggccaccggcctgagcaaggccaagagccaggtgttcaagaaccaggaccctgtgctgcccccccggcccaagccaggccaccccctgtacagcaagtacatgctgtctgtgccccatggaattgccaatgaagacatcgtgtcccagaaccctggagagctgagctgcaagagaggagatgtgctggtgatgctgaagcagacagagaacaactacctggagtgccagaagggggaggacaccggccgggtgcacctgagccagatgaagatcatcacccccctggatgagcacctgcggagccggcccaatgaccccagccacgcccagaagcctgtggacagcggggcccctcatgctgtggtgctgcatgacttccctgctgagcaggtggatgacctgaacctgaccagcggggagatcgtgtacctgctggagaagattgacacagactggtaccggggcaactgcaggaaccagatcggcatcttccctgccaactacgtgaaggtgatcatcgacatccctgagggcggcaatggcaagcgggagtgtgtgagcagccactgtgtgaagggcagccgctgtgtggccaggtttgagtacatcggggagcagaaggatgagctgtccttcagcgagggggagatcatcatcctgaaggagtatgtgaatgaggagtgggcccggggggaggtgcggggccgcacaggcatcttccccctgaactttgtggagcctgtggaggactaccccaccagcggggccaacgtgctgagcaccaaggtgcccctgaagaccaagaaggaggacagcggcagcaacagccaggtgaacagcctgcctgctgagtggtgtgaggccctgcacagcttcaccgctgagaccagtgatgacctgtccttcaagagaggagaccgcatccagatcctggagcggctggacagcgactggtgccggggccgcctgcaggaccgggagggcatcttccctgctgtgtttgtgcggccctgcccagctgaggccaagtccatgctggccatcgtgcccaagggcaggaaggccaaggccctgtatgacttccggggggagaatgaagatgagctgtccttcaaggccggggacatcatcacagagctggagagcgtggatgatgactggatgtctggagagctgatgggcaagagcggcatcttccccaagaactacatccagttcctgcagatctcctag

SEQ ID NO: 169563 - DNA, 2373 bp, synthetic construct; identical to SEQ ID NO: 169562
  misc_feature 1..2373: note = Description of Artificial Sequence: Synthetic coding sequence
  source 1..2373: mol_type = other DNA

SEQ ID NO: 169564 - DNA, 2304 bp, synthetic construct
  misc_feature 1..2304: note = Description of Artificial Sequence: Synthetic coding sequence
  source 1..2304: mol_type = other DNA
atgaacatcatgaacacagagcagagccagaacagcatcgtgagccgcatcaaggtgtttgagggccagaccaacatcgagaccagcggcctgcccaagaagccagagatcacccccaggagcctgccccccaagcccaccgtgagcagcggcaagcccagcgtggcccccaagccagctgccaacagagccagcggggagtgggacagcggcacagaaaatcggctgaaggtgaccagcaaggagggcctgaccccctacccacccctgcaggaggccggcagcatccctgtgaccaagccagagctgcccaagaagcccaaccctggcctcatccgctctgtgaaccctgagatccctggccggggccccctggccgagagcagtgacagcggcaagaaggtgcccaccccagccccccggcccctgctgctgaagaagtctgtgtcctctgagaaccccacctaccccagcgcccccctgaagcctgtgacagtgcccccccggctggccggggccagccaggccaaggcctacaagagcctgggggagggccccccagccaacccccctgtgcctgtgctgcagagcaagcccctggtggacatcgacctgatcagctttgatgatgatgtgctgcccaccccatctggcaacctggccgaggagagcgtgggcagcgagatggtgctggaccccttccagctgcctgccaagacagagcccatcaaggagagagctgtgcagcctgcccccaccaggaagcccaccgtcatccgcatcccagccaagccaggcaagtgcctgcacgaggacccccagagccccccacccctgcctgctgagaagcccatcggcaacaccttcagcacagtgtctgggaagctgagcaatgtggagaggaccaggaacctggagagcaaccaccctggccagacaggaggctttgtgcgggtgcccccccggctgccccccaggcctgtgaatggcaagaccatccccacccagcagccccccaccaaggtgcccccagagaggcctcctccacccaagctgagcgccacccggcgcagcaacaagaagctgcccttcaacagaagcagcagtgacatggacctgcagaagaagcagagcaacctggccaccggcctgagcaaggccaagagccaggtgttcaagaaccaggaccctgtgctgcccccccggcccaagccaggccaccccctgtacagcaagtacatgagaggagatgtgctggtgatgctgaagcagacagagaacaactacctggagtgccagaagggggaggacaccggccgggtgcacctgagccagatgaagatcatcacccccctggatgagcacctgcggagccggcccaatgaccccagccacgcccagaagcctgtggacagcggggcccctcatgctgtggtgctgcatgacttccctgctgagcaggtggatgacctgaacctgaccagcggggagatcgtgtacctgctggagaagattgacacagactggtaccggggcaactgcaggaaccagatcggcatcttccctgccaactacgtgaaggtgatcatcgacatccctgagggcggcaatggcaagagagaatgtgtgagcagccactgtgtgaagggcagccgctgtgtggccaggtttgagtacatcggggagcagaaggatgagctgtccttcagcgagggggagatcatcatcctgaaggagtatgtgaatgaggagtgggcccggggggaggtgcggggccgcacaggcatcttccccctgaactttgtggagcctgtggaggactaccccaccagcggggccaacgtgctgagcaccaaggtgcccctgaagaccaagaaggaggacagcggcagcaacagccaggtgaacagcctgcctgctgagtggtgtgaggccctgcacagcttcaccgctgagaccagtgatgacctgtccttcaagagaggagaccgcatccagatcctggagcggctggacagcgactggtgccggggccgcctgcaggaccgggagggcatcttccctgctgtgtttgtgcggccctgcccagctgaggccaagtccatgctggccatcgtgcccaagggcaggaaggccaaggccctgtatgacttcagaggagaaaatgaagatgagctgtccttcaaggccggggacatcatcacagagctggagagcgtggatgatgactggatgtctggagagctgatgggcaagagcggcatcttccccaagaactacatccagttcctgcagatctcctag

SEQ ID NO: 169565 - DNA, 2196 bp, synthetic construct
  misc_feature 1..2196: note = Description of Artificial Sequence: Synthetic coding sequence
  source 1..2196: mol_type = other DNA
atgaacatcatgaacacagagcagagccagaacagcatcgtgagccgcatcaaggtgtttgagggccagaccaacatcgagaccagcggcctgcccaagaagccagagatcacccccaggagcctgccccccaagcccaccgtgagcagcggcaagcccagcgtggcccccaagccagctgccaacagagccagcggggagtgggacagcggcacagaaaatcggctgaaggtgaccagcaaggagggcctgaccccctacccacccctgcaggaggccggcagcatccctgtgaccaagccagagctgcccaagaagcccaaccctggcctcatccgctctgtgaaccctgagatccctggccggggccccctggccgagagcagtgacagcggcaagaaggtgcccaccccagccccccggcccctgctgctgaagaagtctgtgtcctctgagaaccccacctaccccagcgcccccctgaagcctgtgacagtgcccccccggctggccggggccagccaggccaaggcctacaagagcctgggggagggccccccagccaacccccctgtgcctgtgctgcagagcaagcccctggtggacatcgacctgatcagctttgatgatgatgtgctgcccaccccatctggcaacctggccgaggagagcgtgggcagcgagatggtgctgggcctgcacgaggacccccagagccccccacccctgcctgctgagaagcccatcggcaacaccttcagcacagtgtctgggaagctgagcaatgtggagaggaccaggaacctggagagcaaccaccctggccagacaggaggctttgtgcgggtgcccccccggctgccccccaggcctgtgaatggcaagaccatccccacccagcagccccccaccaaggtgcccccagagaggcctcctccacccaagctgagcgccacccggcgcagcaacaagaagctgcccttcaacagaagcagcagtgacatggacctgcagaagaagcagagcaacctggccaccggcctgagcaaggccaagagccaggtgttcaagaaccaggaccctgtgctgcccccccggcccaagccaggccaccccctgtacagcaagtacatgagaggagatgtgctggtgatgctgaagcagacagagaacaactacctggagtgccagaagggggaggacaccggccgggtgcacctgagccagatgaagatcatcacccccctggatgagcacctgcggagccggcccaatgaccccagccacgcccagaagcctgtggacagcggggcccctcatgctgtggtgctgcatgacttccctgctgagcaggtggatgacctgaacctgaccagcggggagatcgtgtacctgctggagaagattgacacagactggtaccggggcaactgcaggaaccagatcggcatcttccctgccaactacgtgaaggtgatcatcgacatccctgagggcggcaatggcaagagagaatgtgtgagcagccactgtgtgaagggcagccgctgtgtggccaggtttgagtacatcggggagcagaaggatgagctgtccttcagcgagggggagatcatcatcctgaaggagtatgtgaatgaggagtgggcccggggggaggtgcggggccgcacaggcatcttccccctgaactttgtggagcctgtggaggactaccccaccagcggggccaacgtgctgagcaccaaggtgcccctgaagaccaagaaggaggacagcggcagcaacagccaggtgaacagcctgcctgctgagtggtgtgaggccctgcacagcttcaccgctgagaccagtgatgacctgtccttcaagagaggagaccgcatccagatcctggagcggctggacagcgactggtgccggggccgcctgcaggaccgggagggcatcttccctgctgtgtttgtgcggccctgcccagctgaggccaagtccatgctggccatcgtgcccaagggcaggaaggccaaggccctgtatgacttcagaggagaaaatgaagatgagctgtccttcaaggccggggacatcatcacagagctggagagcgtggatgatgactggatgtctggagagctgatgggcaagagcggcatcttccccaagaactacatccagttcctgcagatctcctag

SEQ ID NO: 169566 - DNA, 2196 bp, synthetic construct; identical to SEQ ID NO: 169565
  misc_feature 1..2196: note = Description of Artificial Sequence: Synthetic coding sequence
  source 1..2196: mol_type = other DNA

SEQ ID NO: 169567 - DNA, 2304 bp, synthetic construct; identical to SEQ ID NO: 169564
  misc_feature 1..2304: note = Description of Artificial Sequence: Synthetic coding sequence
  source 1..2304: mol_type = other DNA

SEQ ID NO: 169568 - DNA, 2304 bp, synthetic construct; identical to SEQ ID NO: 169564
  misc_feature 1..2304: note = Description of Artificial Sequence: Synthetic coding sequence
  source 1..2304: mol_type = other DNA

SEQ ID NO: 169569 - DNA, 2190 bp, synthetic construct
  misc_feature 1..2190: note = Description of Artificial Sequence: Synthetic coding sequence
  source 1..2190: mol_type = other DNA
atggatgacctgaccctgctggacctgctggagtgccctgtgtgctttgagaagctggatgtgacagccaaggtgctgccctgccagcacaccttctgcaagccctgcctgcagagggtcttcaaggcccacaaggagctgcgctgcccagaatgtaggacccctgtgttcagcaacatcgaggccctgcctgccaacctgctgctggtgcggctgctggatggagtgcgcagcggccagagcagcggccggggcggcagcttcagaagacctggcaccatgaccctgcaggacggcaggaagagcaggaccaacccccggcggctgcaggccagccccttccggctggtgcccaacgtgcgcatccacatggatggagtgccccgggccaaggccctgtgcaactaccggggccagaaccctggggacctgcgcttcaacaagggggacatcatcctgctgcggcggcagctggatgagaactggtaccagggcgagatcaatggcatcagcggcaacttccctgccagctctgtggaggtgatcaagcagctgccccagcccccacccctgtgccgggccctgtacaactttgacctgcggggcaaggacaagtctgagaaccaggactgcctgaccttcctgaaggatgacatcatcaccgtcatcagccgggtggatgagaactgggccgagggcaagctgggggacaaggtgggcatcttccccatcctgtttgtggagcccaacctgacagcccggcacctgctggagaagaacaagggccggcagagcagcaggaccaagaacctgagcctggtgagcagcagcagccggggcaacaccagcaccctgcggcggggccctggcagcaggaggaaggtgcccggccagttcagcatcaccacagccctgaacaccctgaacaggatggtgcacagccccagcggccgccacatggtggagatcagcacccctgtgctgatcagcagcagcaaccccagcgtcatcacccagcccatggagaaggcagatgtgcccagcagctgtgtgggccaggtgtccacctaccacccagcccctgtgtccccaggccacagcacagctgtggtgtccctgcccggcagccagcagcacctgagcgccaacatgtttgtggccctgcacagctacagcgcccacggcccagatgagctggacctgcagaagggggagggcgtgcgggtgctgggcaagtgccaggacggctggctgcggggcgtgtccctggtgacaggccgggtgggcatcttccccaacaactacgtgatccccatcttcaggaagaccagcagcttcccagacagccgcagccctggcctgtacaccacctggaccctgagcaccagctctgtgagcagccagggcagcatcagcgagggggacccccggcagagccggcccttcaagtctgtgtttgtgcccacagccatcgtgaaccctgtgcgcagcacagctggccctggcaccctgggccagggcagcctgaggaagggccgcagctccatgaggaagaatggcagcctgcagaggcccctgcagagcggcatccccaccctggtggtgggcagcctgcggcgcagccccaccatggtgctgcggccccagcagttccagttctaccagccccagggcatccccagcagccccagcgctgtggtggtggagatgggcagcaagccagccctgactggagagcccgccctgacctgcatcagccggggcagcgaggcctggatccacagcgctgccagcagcctcatcatggaggacaaggagatccccatcaagtctgagcccctgcccaagcccccagccagcgccccacccagcatcctggtgaagccagagaacagcagaaatggcatcgagaagcaggtgaagacagtgcgcttccagaactacagccccccacccaccaagcactacaccagccaccccaccagcggcaagccagagcagcctgccaccctgaaggccagccagcctgaggccgccagcctgggccctgagatgacagtgctgtttgcccacaggagcggctgccacagcggccagcagacagacctgcggaggaagagcgccctgggcaaggccaccaccctggtgtccacagccagcggcacccagaccgtcttccccagcaagtag

SEQ ID NO: 169570 - DNA, 2190 bp, synthetic construct; identical to SEQ ID NO: 169569
  misc_feature 1..2190: note = Description of Artificial Sequence: Synthetic coding sequence
  source 1..2190: mol_type = other DNA

SEQ ID NO: 169571 - DNA, 387 bp, synthetic construct
  misc_feature 1..387: note = Description of Artificial Sequence: Synthetic coding sequence
  source 1..387: mol_type = other DNA
atggaggacaaggagatccccatcaagtctgagcccctgcccaagcccccagccagcgcccctccttccatcctggtgaagccagagaacagcagaaatggaattgagaagcaggtgaagacagtgcgcttccagaactacagccccccacccaccaagcactacaccagccaccccaccagcggcaagccagagcagcctgccaccctgaaggccagccagcctgaggccgccagcctgggccctgagatgacagtgctgtttgcccacaggagcggctgccacagcggccagcagacagacctgcggaggaagagcgccctgggcaaggccaccaccctggtgtccacagccagcggcacccagacagtgttccccagcaagtag

SEQ ID NO: 169572 - DNA, 1686 bp, synthetic construct
  misc_feature 1..1686: note = Description of Artificial Sequence: Synthetic coding sequence
  source 1..1686: mol_type = other DNA
atggctgctgaggagatgcactggcctgtgcccatgaaggccatcggggcccagaacctgctgaccatgcctgggggcgtggccaaggccggctacctgcacaagaagggcggcacccagctgcagctgctgaagtggcccctgcgcttcgtcatcatccacaagagatgtgtgtactacttcaagagcagcaccagcgccagcccccagggcgccttcagcctgagcggctacaacagagtgatgagagctgctgaggagaccaccagcaacaacgtgttccccttcaagatcatccacatcagcaagaagcacaggacctggttcttcagcgccagcagcgaggaggagaggaagtcctggatggccctgctgcggcgggagatcggccacttccacgagaagaaggacctgcccctggacaccagtgacagcagcagtgacacagacagcttctatggagctgtggagaggcctgtggacatcagcctgagcccctaccccacagacaatgaagattatgaacatgatgatgaagatgacagctacctggagccagacagccctgagcccggccgcctggaggatgccctgatgcaccccccagcctacccacctcctcctgtgcccacccccaggaagccagccttcagtgacatgccccgggcccacagcttcaccagcaaaggacctggccccctgctgcccccacctccacccaagcacggcctgcctgatgtgggcctggccgctgaggacagcaagagggaccccctgtgcccccggcgggcagagccctgcccccgggtgcctgccacccccaggaggatgtctgacccccccctgagcaccatgcccacagcccctggcctgaggaagccaccctgcttccgggagagcgccagccccagccctgagccctggaccccaggccacggggcctgcagcaccagcagcgctgccatcatggccacagccaccagcaggaactgtgacaagctgaagagcttccacctgagcccccggggcccccccaccagcgagcccccacctgtgcctgccaacaagcccaagttcctgaagattgctgaagaagatcctccccgggaggccgccatgcctggcctgtttgtgccccctgtggccccccggcccccagccctgaagctgcctgtgcctgaggccatggcccggcctgctgtgctgcccaggcctgagaagccccagctgccccacctgcagaggagccccccagatggccagagcttccgctccttctcctttgagaagccccggcagcccagccaggccgacacaggaggagatgacagtgatgaggactatgagaaggtgcccctgcccaacagcgtgtttgtgaacaccacagagagctgtgaggtggagcggctcttcaaggccaccagccccagaggagagccccaggacggcctgtactgcatccggaacagcagcaccaagagcggcaaggtgctggtggtgtgggatgagaccagcaacaaggtgaggaactaccgcatctttgagaaggacagcaagttctacctggagggggaggtgctgtttgtgtctgtgggctccatggtggagcactaccacacccacgtgctgcccagccaccagagcctgctgctgcggcacccctacggctacacaggccccaggtag

SEQ ID NO: 169573 - DNA, 294 bp, synthetic construct
  misc_feature 1..294: note = Description of Artificial Sequence: Synthetic coding sequence
  source 1..294: mol_type = other DNA
atggctgctgaggagatgcactggcctgtgcccatgaaggccatcggggcccagaacctgctgaccatgcctgggggcgtggccaaggccggctacctgcacaagaagggcggcacccagctgcagctgctgaagtggcccctgcgcttcgtcatcatccacaagagatgtgtgtactacttcaagagcagcaccagcgccagcccccagggcgccttcagcctgagcggctacaaccggcagccccggccccagcctgcccaggccctgagccagacagaagctggcccctag

SEQ ID NO: 169574 - DNA, 1686 bp, synthetic construct; identical to SEQ ID NO: 169572
  misc_feature 1..1686: note = Description of Artificial Sequence: Synthetic coding sequence
  source 1..1686: mol_type = other DNA

SEQ ID NO: 169575 - DNA, 1770 bp, synthetic construct
  misc_feature 1..1770: note = Description of Artificial Sequence: Synthetic coding sequence
  source 1..1770: mol_type = other DNA
atggccagcctgggccccaggaccccagcccccagccgcagccggggcagaagagccatgtgctgggtgtccaccatctccttcatggctgctgaggagatgcactggcctgtgcccatgaaggccatcggggcccagaacctgctgaccatgcctgggggcgtggccaaggccggctacctgcacaagaagggcggcacccagctgcagctgctgaagtggcccctgcgcttcgtcatcatccacaagagatgtgtgtactacttcaagagcagcaccagcgccagcccccagggcgccttcagcctgagcggctacaacagagtgatgagagctgctgaggagaccaccagcaacaacgtgttccccttcaagatcatccacatcagcaagaagcacaggacctggttcttcagcgccagcagcgaggaggagaggaagtcctggatggccctgctgcggcgggagatcggccacttccacgagaagaaggacctgcccctggacaccagtgacagcagcagtgacacagacagcttctatggagctgtggagaggcctgtggacatcagcctgagcccctaccccacagacaatgaagattatgaacatgatgatgaagatgacagctacctggagccagacagccctgagcccggccgcctggaggatgccctgatgcaccccccagcctacccacctcctcctgtgcccacccccaggaagccagccttcagtgacatgccccgggcccacagcttcaccagcaaaggacctggccccctgctgcccccacctccacccaagcacggcctgcctgatgtgggcctggccgctgaggacagcaagagggaccccctgtgcccccggcgggcagagccctgcccccgggtgcctgccacccccaggaggatgtctgacccccccctgagcaccatgcccacagcccctggcctgaggaagccaccctgcttccgggagagcgccagccccagccctgagccctggaccccaggccacggggcctgcagcaccagcagcgctgccatcatggccacagccaccagcaggaactgtgacaagctgaagagcttccacctgagcccccggggcccccccaccagcgagcccccacctgtgcctgccaacaagcccaagttcctgaagattgctgaagaagatcctccccgggaggccgccatgcctggcctgtttgtgccccctgtggccccccggcccccagccctgaagctgcctgtgcctgaggccatggcccggcctgctgtgctgcccaggcctgagaagccccagctgccccacctgcagaggagccccccagatggccagagcttccgctccttctcctttgagaagccccggcagcccagccaggccgacacaggaggagatgacagtgatgaggactatgagaaggtgcccctgcccaacagcgtgtttgtgaacaccacagagagctgtgaggtggagcggctcttcaaggccaccagccccagaggagagccccaggacggcctgtactgcatccggaacagcagcaccaagagcggcaaggtgctggtggtgtgggatgagaccagcaacaaggtgaggaactaccgcatctttgagaaggacagcaagttctacctggagggggaggtgctgtttgtgtctgtgggctccatggtggagcactaccacacccacgtgctgcccagccaccagagcctgctgctgcggcacccctacggctacacaggccccaggtag

SEQ ID NO: 169576 - DNA, 1686 bp, synthetic construct; identical to SEQ ID NO: 169572
  misc_feature 1..1686: note = Description of Artificial Sequence: Synthetic coding sequence
  source 1..1686: mol_type = other DNA

SEQ ID NO: 169577 - DNA, 429 bp, synthetic construct
  misc_feature 1..429: note = Description of Artificial Sequence: Synthetic coding sequence
  source 1..429: mol_type = other DNA
atggctgctgaggagatgcactggcctgtgcccatgaaggccatcggggcccagaacctgctgaccatgcctgggggcgtggccaaggccggctacctgcacaagaagggcggcacccagctgcagctgctgaagtggcccctgcgcttcgtcatcatccacaagagatgtgtgtactacttcaagagcagcaccagcgccagcccccagggcgccttcagcctgagcggctacaacagagtgatgagagctgctgaggagaccaccagcaacaacgtgttccccttcaagatcatccacatcagcaagaagcacaggacctggttcttcagcgccagcagcgaggaggagaggaagtcctggatggccctgctgcggcgggagatcggccacttccacgagaagaaggacctgcccctggacacctag

SEQ ID NO: 169578 - DNA, 429 bp, synthetic construct; identical to SEQ ID NO: 169577
  misc_feature 1..429: note = Description of Artificial Sequence: Synthetic coding sequence
  source 1..429: mol_type = other DNA

SEQ ID NO: 169579 - DNA, 1857 bp, synthetic construct
  misc_feature 1..1857: note = Description of Artificial Sequence: Synthetic coding sequence
  source 1..1857: mol_type = other DNA
atggccggcagcggcccccggcccaggtcctggggcagaagagaggccggggccagagatgaggccgctgctgctgggggccggggccctggcccctgccgctgcagccagggcagaagagcctggatcgcccctgggaagccagccatgcctgctgcctggacccccttcatggctgctgaggagatgcactggcctgtgcccatgaaggccatcggggcccagaacctgctgaccatgcctggaggagtggccaaggccggctacctgcacaagaagggcggcacccagctgcagctgctgaagtggcccctgcgctttgtgatcatccacaagagatgtgtgtactacttcaagagcagcaccagcgccagcccccagggcgccttcagcctgagcggctacaacagagtgatgagagctgctgaggagaccaccagcaacaacgtgttccccttcaagatcatccacatcagcaagaagcacaggacctggttcttcagcgccagcagcgaggaggagaggaagtcctggatggccctgctgcggcgggagatcggccacttccacgagaagaaggacctgcccctggacaccagtgacagcagcagtgacacagacagcttctacggggctgtggagaggcctgtggacatcagcctgagcccctaccccacagacaatgaagattatgaacatgatgatgaagatgacagctacctggagccagacagccctgagcccggccgcctggaggatgccctgatgcaccccccagcctacccacctcctcctgtgcccacccccaggaagccagccttcagtgacatgccccgggcccacagcttcaccagcaagggccctggccccctgctgcccccacctccacccaagcacggcctgcctgatgtgggcctggccgctgaggacagcaagagggaccccctgtgccccaggagagctgagccctgcccccgggtgcctgccacccccaggaggatgtctgacccccccctgagcaccatgcccacagcccctggcctgaggaagccaccctgcttccgggagagcgccagccccagccctgagccctggaccccaggccatggagcctgcagcaccagcagcgctgccatcatggccacagccaccagcaggaactgtgacaagctgaagagcttccacctgagcccccggggcccccccaccagcgagcccccacctgtgcctgccaacaagcccaagttcctgaagattgctgaggaggaccccccccgggaggccgccatgcctggcctgtttgtgccccctgtggccccccggcccccagccctgaagctgcctgtgcctgaggccatggcccggcctgctgtgctgcccaggcctgagaagccccagctgccccacctgcagaggagccccccagatggccagagcttccgctccttctcctttgagaagccccggcagcccagccaggccgacacaggaggagatgacagtgatgaagattatgagaaggtgcccctgcccaacagcgtgtttgtgaacaccacagagagctgtgaggtggagcggctcttcaaggccaccagccccagaggagagccccaggacggcctgtactgcatccggaacagcagcaccaagagcggcaaggtgctggtggtgtgggatgagaccagcaacaaggtgaggaactaccgcatctttgagaaggacagcaagttctacctggagggggaggtgctgtttgtgtctgtgggctccatggtggagcactaccacacccacgtgctgcccagccaccagagcctgctgctgcggcacccctacggctacacaggccccaggtag

SEQ ID NO: 169580 - DNA, 519 bp, synthetic construct
  misc_feature 1..519: note = Description of Artificial Sequence: Synthetic coding sequence
  source 1..519: mol_type = other DNA
atggctgctgaggagatgcactggcctgtgcccatgaaggccatcggggcccagaacctgctgaccatgcctgggggcgtggccaaggccggctacctgcacaagaagggcggcacccagctgcagctgctgaagtggcccctgcgcttcgtcatcatccacaagagatgtgtgtactacttcaagagcagcaccagcgccagcccccagggcgccttcagcctgagcggctacaacagagtgatgagagctgctgaggagaccaccagcaacaacgtgttccccttcaagatcatccacatcagcaagaagcacaggacctggttcttcagcgccagcagcgaggaggagaggaagtcctggatggccctgctgcggcgggagatcggccacttccacgagaagaaggacctgcccctggacaccagtgacagcagcagtgacacagacagcttctatggagctgtggagaggcctgtggacatcagcctgagcccctaccccacagacaatgaatag

SEQ ID NO: 169581 - DNA, 567 bp, synthetic construct
  misc_feature 1..567: note = Description of Artificial Sequence: Synthetic coding sequence
  source 1..567: mol_type = other DNA
atggctgctgaggagatgcactggcctgtgcccatgaaggccatcggggcccagaacctgctgaccatgcctgggggcgtggccaaggccggctacctgcacaagaagggcggcacccagctgcagctgctgaagtggcccctgcgcttcgtcatcatccacaagagatgtgtgtactacttcaagagcagcaccagcgccagcccccagggcgccttcagcctgagcggctacaacagagtgatgagagctgctgaggagaccaccagcaacaacgtgttccccttcaagatcatccacatcagcaagaagcacaggacctggttcttcagcgccagcagcgaggaggagaggaagtcctggatggccctgctgcggcgggagatcggccacttccacgagaagaaggacctgcccctggacaccagtgacagcagcagtgacacagacagcttctatggagctgtggagaggcctgtggacatcagcctgagcccctaccccacagacaatgaagattatgaacatgatgatgaagatgacagctacctggagccagacagctag

SEQ ID NO: 169582 - DNA, 1686 bp, synthetic construct; identical to SEQ ID NO: 169572
  misc_feature 1..1686: note = Description of Artificial Sequence: Synthetic coding sequence
  source 1..1686: mol_type = other DNA

SEQ ID NO: 169583 - DNA, 585 bp, synthetic construct
  misc_feature 1..585: note = Description of Artificial Sequence: Synthetic coding sequence
  source 1..585: mol_type = other DNA
atggctgctgaggagatgcactggcctgtgcccatgaaggccatcggggcccagaacctgctgaccatgcctgggggcgtggccaaggccggctacctgcacaagaagggcggcacccagctgcagctgctgaagtggcccctgcgcttcgtcatcatccacaagagatgtgtgtactacttcaagagcagcaccagcgccagcccccagggcgccttcagcctgagcggctacaacagagtgatgagagctgctgaggagaccaccagcaacaacgtgttccccttcaagatcatccacatcagcaagaagcacaggacctggttcttcagcgccagcagcgaggaggagaggaagtcctggatggccctgctgcggcgggagatcggccacttccacgagaagaaggacctgcccctggacaccagtgacagcagcagtgacacagacagcttctatggagctgtggagaggcctgtggacatcagcctgagcccctaccccacagacaatgaagattatgaacatgatgatgaagatgacagctacctggagccagacagccctgagcccggccgcctgtag

SEQ ID NO: 169584 - DNA, 411 bp, synthetic construct
  misc_feature 1..411: note = Description of Artificial Sequence: Synthetic coding sequence
  source 1..411: mol_type = other DNA
atggctgctgaggagatgcactggcctgtgcccatgaaggccatcggggcccagaacctgctgaccatgcctgggggcgtggccaaggccggctacctgcacaagaagggcggcacccagctgcagctgctgaagtggcccctgcgcttcgtcatcatccacaagagatgtgtgtactacttcaagagcagcaccagcgccagcccccagggcgccttcagcctgagcggctacaacagagtgatgagagctgctgaggagaccaccagcaacaacgtgttccccttcaagatcatccacatcagcaagaagcacaggacctggttcttcagcgccagcagcgaggaggagaggaagtcctggatggccctgctgcggcgggagatcggccacttccacgagaagaagtag

SEQ ID NO: 169585 - DNA, 2892 bp, synthetic construct
  misc_feature 1..2892: note = Description of Artificial Sequence: Synthetic coding sequence
  source 1..2892: mol_type = other DNA
atggccgcccagaggatccgggccgccaacagcaatggcctgccccgctgcaagtctgagggcaccctgattgacctgtctgagggcttcagcgagaccagcttcaatgacatcaaggtgcccagccccagcgccctgctggtggacaaccccaccccatttggaaatgccaaggaggtgattgccatcaaggactactgccccaccaacttcaccaccctgaagttcagcaagggggaccacctgtatgtgctggacaccagcggcggggagtggtggtacgcccacaacaccacagagatgggctacatccccagcagctatgtgcagcccctgaactacagaaacagcaccctgagtgacagcggcatgattgacaacctgcctgacagcccagatgaggtggccaaggagctggagctgctgggcggctggacagatgacaagaaggtgcccggccgcatgtacagcaacaaccccttctggaatggagtgcagaccaaccccttcctgaatggaaatgtgcctgtgatgcccagcctggatgagctgaaccccaagagcacagtggacctgctgctgtttgatgctggcaccagcagcttcacagagagcagcagcgccaccaccaacagcactggaaacatctttgatgagctgcctgtgaccaacggcctgcacgccgagccccctgtgagaagagacaaccccttcttccgcagcaagaggagctacagcctgtctgagctgtctgtgctgcaggccaagagtgatgcccccaccagcagcagcttcttcaccggcctgaagagccctgcccctgagcagttccagagccgggaggacttcagaacagcctggctgaaccacaggaagctggcccggagctgccacgacctggacctgctgggccagagccctggctggggccagacccaggccgtggagaccaacatcgtgtgcaagctggacagcagcggcggcgctgtgcagctgcctgacaccagcatcagcatccacgtgcctgagggccacgtggcccctggagagacccagcagatctccatgaaggccctgctggacccccccctggagctgaacagcgacaggagctgcagcatcagccctgtgctggaggtgaagctgagcaacctggaggtgaagaccagcatcatcctggagatgaaggtgtctgctgagatcaagaatgacctcttcagcaagagcacagtgggcctgcagtgcctgcggagtgacagcaaggagggcccctacgtgtctgtgcccctgaactgcagctgtggggacacagtgcaggcccagctgcacaacctggagccctgcatgtatgtggccgtggtggcccacggccccagcatcctgtaccccagcacagtgtgggacttcatcaacaagaaggtgacagtgggcctgtatggccccaagcacatccaccccagcttcaagacagtggtgaccatctttggacatgactgtgcccccaagaccctgctggtgtctgaggtgacccggcaggcccccaacccagcccctgtggccctgcagctgtggggcaagcaccagtttgtgctgagccggccccaggacctgaaggtgtgcatgttcagcaacatgaccaactatgaggtgaaggccagcgagcaggccaaggtggtgcggggcttccagctgaagctgggcaaggtgtcccggctcatcttccccatcaccagccagaaccccaatgagctgagtgacttcaccctgcgggtgcaggtgaaggatgaccaggaggccatcctgacccagttctgtgtgcagaccccccagcccccacccaagagcgccatcaagcccagcggccagaggcgcttcctgaagaagaatgaggtgggcaagatcatcctgagcccctttgccaccaccaccaagtaccccaccttccaggacaggcctgtgagcagcctgaagtttgggaagctgctgaagacagtggtgcggcagaacaagaaccactacctgctggagtacaagaagggagatggcatcgccctgctgtctgaggagcgggtgcggctgcggggccagctgtggaccaaggagtggtacatcggctactaccagggccgggtgggcctggtgcacaccaagaatgtgctggtggtgggccgggcccggcccagcctgtgcagcggccctgagctgagcacctctgtgctgctggagcagatcctgcggccctgcaagttcctgacctacatctatgcctctgtgaggaccctgctgatggagaacatcagctcctggaggagctttgctgatgccctgggctacgtgaacctgcccctgaccttcttctgcagagctgagctggacagcgagcctgagcgggtggcctctgtgctggagaagctgaaggaggactgcaacaacacagagaacaaggagaggaagagcttccagaaggagctggtgatggccctgctgaagatggactgccagggcctggtggtgcggctcatccaggactttgtgctgctgaccacagctgtggaggtggcccagcgctggagggagctggccgagaagctggccaaggtgtccaagcagcagatggatgcctatgagagcccccaccgggacagaaatggagtggtggacagcgaggccatgtggaagccagcctatgacttcctgctgacctggagccaccagatcggggacagctacagagatgtgatccaggagctgcacctgggcctggacaagatgaagaaccccatcaccaagcgctggaagcacctgaccggcaccctcatcctggtgaacagcctggatgtgctgcgggctgctgccttctccccagctgaccaggatgactttgtgatctag

SEQ ID NO: 169586 - DNA, 2892 bp, synthetic construct; identical to SEQ ID NO: 169585
  misc_feature 1..2892: note = Description of Artificial Sequence: Synthetic coding sequence
  source 1..2892: mol_type = other DNA

SEQ ID NO: 169587 - DNA, 2892 bp, synthetic construct; identical to SEQ ID NO: 169585
  misc_feature 1..2892: note = Description of Artificial Sequence: Synthetic coding sequence
  source 1..2892: mol_type = other DNA

SEQ ID NO: 169588 - DNA, 369 bp, synthetic construct
  misc_feature 1..369: note = Description of Artificial Sequence: Synthetic coding sequence
  source 1..369: mol_type = other DNA
atggccgcccagaggatccgggccgccaacagcaatggcctgccccgctgcaagtctgagggcaccctgattgacctgtctgagggcttcagcgagaccagcttcaatgacatcaaggtgcccagccccagcgccctgctggtggacaaccccaccccatttggaaatgccaaggaggtgattgccatcaaggactactgccccaccaacttcaccaccctgaagttcagcaagggggaccacctgtatgtgctggacaccagcggcggggagtggtggtacgcccacaacaccacagagatgggctacatccccagcagctatgtgcagcccctgaactacagaaacagcaccctgagtgacagctag

SEQ ID NO: 169589 - DNA, 1662 bp, synthetic construct
  misc_feature 1..1662: note = Description of Artificial Sequence: Synthetic coding sequence
  source 1..1662: mol_type = other DNA
atggccgcccagaggatccgggccgccaacagcaatggcctgccccgctgcaagtctgagggcaccctgattgacctgtctgagggcttcagcgagaccagcttcaatgacatcaaggtgcccagccccagcgccctgctggtggacaaccccaccccatttggaaatgccaaggaggtgattgccatcaaggactactgccccaccaacttcaccaccctgaagttcagcaagggggaccacctgtatgtgctggacaccagcggcggggagtggtggtacgcccacaacaccacagagatgggctacatccccagcagctatgtgcagcccctgaactacagaaacagcaccctgagtgacagcggcatgattgacaacctgcctgacagcccagatgaggtggccaaggagctggagctgctgggcggctggacagatgacaagaaggtgcccggccgcatgtacagcaacaaccccttctggaatggagtgcagaccaaccccttcctgaatggaaatgtgcctgtgatgcccagcctggatgagctgaaccccaagagcacagtggacctgctgctgtttgatgctggcaccagcagcttcacagagagcagcagcgccaccaccaacagcactggaaacatctttgatgagctgcctgtgaccaacggcctgcacgccgagccccctgtgagaagagacaaccccttcttccgcagcaagaggagctacagcctgtctgagctgtctgtgctgcaggccaagagtgatgcccccaccagcagcagcttcttcaccggcctgaagagccctgcccctgagcagttccagagccgggaggacttcagaacagcctggctgaaccacaggaagctggcccggagctgccacgacctggacctgctgggccagagccctggctggggccagacccaggccgtggagaccaacatcgtgtgcaagctggacagcagcggcggcgctgtgcagctgcctgacaccagcatcagcatccacgtgcctgagggccacgtggcccctggagagacccagcagatctccatgaaggccctgctggacccccccctggagctgaacagcgacaggagctgcagcatcagccctgtgctggaggtgaagctgagcaacctggaggtgaagaccagcatcatcctggagatgaaggtgtctgctgagatcaagaatgacctcttcagcaagagcacagtgggcctgcagtgcctgcggagtgacagcaaggagggcccctacgtgtctgtgcccctgaactgcagctgtggggacacagtgcaggcccagctgcacaacctggagccctgcatgtatgtggccgtggtggcccacggccccagcatcctgtaccccagcacagtgtgggacttcatcaacaagaaggtgacagtgggcctgtatggccccaagcacatccaccccagcttcaagacagtggtgaccatctttggacatgactgtgcccccaagaccctgctggtgtctgaggtgacccggcaggcccccaacccccccatcaccaagcgctggaagcacctgaccggcaccctcatcctggtgaacagcctggatgtgctgcgggctgctgccttctccccagctgaccaggatgactttgtgatctag

SEQ ID NO: 169590 - DNA, 171 bp, synthetic construct
  misc_feature 1..171: note = Description of Artificial Sequence: Synthetic coding sequence
  source 1..171: mol_type = other DNA
atggccgcccagaggatccgggccgccaacagcaatggcctgccccgctgcaagtctgagggcaccctgattgacctgtctgagggcttcagcgagaccagcttcaatgacatcaaggtgcccagccccagcgccctgctggtggacaaccccacccccttcggcaactag

SEQ ID NO: 169591 - DNA, 522 bp, synthetic construct
  misc_feature 1..522: note = Description of Artificial Sequence: Synthetic coding sequence
  source 1..522: mol_type = other DNA
atggccgcccagaggatccgggccgccaacagcaatggcctgccccgctgcaagtctgagggcaccctgattgacctgtctgagggcttcagcgagaccagcttcaatgacatcaaggtgcccagccccagcgccctgctggtggacaaccccaccccatttggaaatgccaaggaggtgattgccatcaaggactactgccccaccaacttcaccaccctgaagttcagcaagggggaccacctgtatgtgctggacaccagcggcggggagtggtggtacgcccacaacaccacagagatgggctacatccccagcagctatgtgcagcccctgaactacagaaacagcaccctgagtgacagcggcatgattgacaacctgcctgacagcccagatgaggtggccaaggagctggagctgctgggcggctggacagatgacaagaaggtgcccggccgcatgtacagcaacaaccccttctggaatggagtgcagaccaaccccttcctgaatggatag

SEQ ID NO: 169592 - DNA, 174 bp, synthetic construct
  misc_feature 1..174: note = Description of Artificial Sequence: Synthetic coding sequence
  source 1..174: mol_type = other DNA
atggccgcccagaggatccgggccgccaacagcaatggcctgccccgctgcaagtctgagggcaccctgattgacctgtctgagggcttcagcgagaccagcttcaatgacatcaaggtgcccagccccagcgccctgctggtggacaaccccaccccatttggaaatgcctag

SEQ ID NO: 169593 - DNA, 606 bp, synthetic construct
  misc_feature 1..606: note = Description of Artificial Sequence: Synthetic coding sequence
  source 1..606: mol_type = other DNA
atggagaacatcagctcctggaggagctttgctgatgccctgggctacgtgaacctgcccctgaccttcttctgcagagctgagctggacagcgagcctgagcgggtggcctctgtgctggagaagctgaaggaggactgcaacaacacagagaacaaggagaggaagagcttccagaaggagctggtgatggccctgctgaagatggactgccagggcctggtggtgcggctcatccaggactttgtgctgctgaccacagctgtggaggtggcccagcgctggagggagctggccgagaagctggccaaggtgtccaagcagcagatggatgcctatgagagcccccaccgggacagaaatggagtggtggacagcgaggccatgtggaagccagcctatgacttcctgctgacctggagccaccagatcggggacagctacagagatgtgatccaggagctgcacctgggcctggacaagatgaagaaccccatcaccaagcgctggaagcacctgaccggcaccctcatcctggtgaacagcctggatgtgctgcgggctgctgccttctccccagctgaccaggatgactttgtgatctag

SEQ ID NO: 169594 - DNA, 897 bp, synthetic construct
  misc_feature 1..897: note = Description of Artificial Sequence: Synthetic coding sequence
  source 1..897: mol_type = other DNA
atgctgaaccacgccacccagagggtgatggaggccgagcagaccaagaccaggtctgagctggtgcacaaggagacagctgcccgctacaatgctgccatgggccgcatgaggcagctggagaagaagctgaagagggccatcaacaagagcaagccctactttgagctgaaggccaagtactacgtgcagctggagcagctgaagaagacagtggatgacctgcaggccaagctgaccctggccaagggggagtacaagatggccctgaagaacctggagatgatcagtgatgagatccatgaaagaagaagaagcagcgccatgggcccccggggctgcggcgtgggcgctgagggcagcagcacctctgtggaggacctgcccggcagcaagccagagccagatgccatctctgtggccagcgaggcctttgaagatgacagctgcagcaactttgtgtctgaagatgattctgagacccagagcgtgagcagcttcagcagcggccccaccagccccagcgagatgccagaccagtttcctgctgtggtgcggcccggcagcctggacctgcccagccctgtgtccctgtctgaatttggcatgatgtttcctgtgctgggccccaggagtgaatgttctggggccagcagcccagaatgtgaggtggagcggggggacagagctgagggcgctgagaacaagaccagtgacaaggccaacaacaacagaggcctgagcagcagcagcggcagcggcggcagcagcaagagccagagcagcaccagccctgagggccaggccctggagaacaggatgaagcagctgagcctgcagtgcagcaagggcagagatggcatcatcgctgacatcaagatggtgcagattggatag

SEQ ID NO: 169595 - DNA, 387 bp, synthetic construct
  misc_feature 1..387: note = Description of Artificial Sequence: Synthetic coding sequence
  source 1..387: mol_type = other DNA
atgctgaaccacgccacccagagggtgatggaggccgagcagaccaagaccaggtctgagctggtgcacaaggagacagctgcccgctacaatgctgccatgggccgcatgaggcagctggagaagaagctgaagagggccatcaacaagagcaagccctactttgagctgaaggccaagtactacgtgcagctggagcagctgaagaagacagtggatgacctgcaggccaagctgaccctggccaagggggagtacaagatggccctgaagaacctggagatgatcagtgatgagatccatgaaagaagaagaagcagcgccatgggcccccggggctgcggcgtgggcgctgagggcagcagcacctctgtggaggacctgtag

SEQ ID NO: 169596 - DNA, 1368 bp, synthetic construct
  misc_feature 1..1368: note = Description of Artificial Sequence: Synthetic coding sequence
  source 1..1368: mol_type = other DNA
atggatgctgccctgaagaggagccgctctgaggagcctgctgagatcctgcccccagccagagatgaggaggaggaggaggaggagggcatggagcagggcctggaggaggaggaggaggtggacccccgcatccagggcgagctggagaagctgaaccagagcacagatgacatcaacagaagagaaacagagctggaggatgcccggcagaagttccgctctgtgctggtggaggccaccgtgaagctggatgagctggtgaagaagattggcaaggctgtggaggacagcaagccctactgggaggccaggagagtggcccggcaggcccagctggaggcccagaaggccacccaggacttccagagggccacagaggtgctgcgggccgccaaggagaccatcagcctggccgagcagaggctgctggaggatgacaagaggcagtttgattctgcctggcaggagatgctgaaccacgccacccagagggtgatggaggccgagcagaccaagaccaggtctgagctggtgcacaaggagacagctgcccgctacaatgctgccatgggccgcatgaggcagctggagaagaagctgaagagggccatcaacaagagcaagccctactttgagctgaaggccaagtactacgtgcagctggagcagctgaagaagacagtggatgacctgcaggccaagctgaccctggccaagggggagtacaagatggccctgaagaacctggagatgatcagtgatgagatccacgagaggagaagaagcagcgccatgggcccccggggctgcggcgtgggcgctgagggcagcagcacctctgtggaggacctgcccggcagcaagccagagccagatgccatctctgtggccagcgaggcctttgaagatgacagctgcagcaactttgtgtctgaagatgacagcgagacccagagcgtgtcctccttcagcagcggccccaccagccccagcgagatgccagaccagtttcctgctgtggtgcggcccggcagcctggacctgcccagccctgtgtccctgtctgaatttggcatgatgtttcctgtgctgggccccaggtctgagtgcagcggggccagcagcccagaatgtgaggtggagcggggggacagagctgagggcgctgagaacaagaccagtgacaaggccaacaacaacagaggcctgagcagcagcagcggcagcggcggcagcagcaagagccagagcagcaccagccctgagggccaggccctggagaacaggatgaagcagctgagcctgcagtgcagcaagggcagagatggcatcatcgctgacatcaagatggtgcagatcggctag

SEQ ID NO: 169597 - DNA, 897 bp, synthetic construct; identical to SEQ ID NO: 169594
  misc_feature 1..897: note = Description of Artificial Sequence: Synthetic coding sequence
  source 1..897: mol_type = other DNA

SEQ ID NO: 169598 - DNA, 156 bp, synthetic construct
  misc_feature 1..156: note = Description of Artificial Sequence: Synthetic coding sequence
  source 1..156: mol_type = other DNA
atgctgaaccacgccacccagagggtgatggaggccgagcagaccaagaccaggtctgagctggtgcacaaggagacagctgcccgctacaatgctgccatgggccgcatgaggcagctggagaagaagctgaagagggccatcaacaagagctag

SEQ ID NO: 169599 - DNA, 897 bp, synthetic construct; identical to SEQ ID NO: 169594
  misc_feature 1..897: note = Description of Artificial Sequence: Synthetic coding sequence
  source 1..897: mol_type = other DNA

SEQ ID NO: 169600 - DNA, 2580 bp, synthetic construct
  misc_feature 1..2580: note = Description of Artificial Sequence: Synthetic coding sequence
  source 1..2580: mol_type = other DNA
atgatggagggcctgaagaagaggaccaggaaggccttcggcatcaggaagaaggagaaggacacagacagcacaggcagcccagacagagatggcatccagggcaagaagaagacccagaagacccagctgctgctgaccagctgcttctggctgcgggccctgagcctgaccctgagccagaagaagagcaatggagccccaaatggcttctatgcagaaattgactgggagcgctacaacagccctgagctggatgaggagggctacagcatccggcctgaggagcccggcagcaccaagggcaagcacttctacagcagcagcgagagcgaggaggaggaggagagccacaagaagttcaacatcaagatcaagcccctgcagagcaaggacatcctgaagaatgctgccaccgtggatgagctgaaggccagcatcggcaacatcgccctgagccccagccctgtgaggaagagcccccggcgcagccctggggccatcaagaggaacctgagcagcgaggaggtggcccggcccaggaggagcacccccaccccagagctgatcagcaagaagcccccagatgacaccacagccctggcccccctgtttggaccacccctggagagcgcctttgatgagcagaagacagaggtgctgctggaccagcctgagatctggggcagcggccagcccatcaaccccagcatggagagccccaagctgacccggcccttccccaccggcaccccaccacccctgccccccaagaatgtgcctgccaccccacccaggacaggcagccccctgaccatcggccctggaaatgaccagagcgccacagaggtgaagattgagaagctgcccagcatcaatgacctggacagcatctttggacctgtgctgagccccaagtctgtggccgtgaatgctgaggagaagtgggtgcacttcagtgacaccagccctgagcacgtgaccccagagctgaccccccgggagaaggtggtgagccccccagccaccccagacaacccagctgacagccctgcccctggccccctgggccccccaggccccaccggccccccaggccccccaggccccccaagaaatgtgctgagccccctgaacctggaggaggtgcagaagaaggtggccgagcagaccttcatcaaggatgactacctggagaccatcagcagccccaaggactttggcctgggccagagggccaccccacctcctcctcctccacccacctacagaacagtggtgagcagccctggccctggcagcggccctggccctggcaccaccagtgatggcaagacagaggcccagcgctaccaggtgatctgccccagcctgcaggccggcggcaatgagctggacagctacagcggggccagcagccctgcccggcctgccacccccctggtgccctgccgcagcaccaccccacctcctcctccaccccggccccccagccggcccaagctgcccccaggcaagccaggagtgggagatgtgtcccggcccttcagcccccccatccacagcagcagccccccacccatcgcccccctggcccgggcagagagcaccagcagcatcagcagcaccaacagcctgtctgctgccaccacccccaccgtggagaatgagcagcccagcctggtgtggtttgaccggggcaagttctacctgacctttgagggcagcagccggggccccagccccctgaccatgggcgcccaggacaccctgcctgtggccgccgccttcacagagaccgtgaatgcctacttcaagggagctgaccccagcaagtgcatcgtgaagatcaccggggagatggtgctgtccttccctgctggcatcaccaggcactttgccaacaaccccagccctgctgccctgaccttccgggtcatcaacttcagccggctggagcacgtgctgcccaacccccagctgctgtgctgtgacaacacccagaatgatgccaacaccaaggagttctgggtgaacatgcccaacctgatgacccacctgaagaaggtgtctgagcagaagccccaggccacctactacaacgtggacatgctgaagtaccaggtgtctgcccagggcatccagagcacccccctgaacctggccgtgaactggaggtgtgagcccagcagcacagacctgagaattgactacaagtacaacacagatgccatgaccacagctgtggccctgaacaacgtgcagttcctggtgcccattgatggaggagtgaccaagctgcaggccgtgctgcccccagctgtgtggaatgctgagcagcagaggatcctgtggaagatcccagacatcagccagaagtcagaaaatggaggagtgggcagcctgctggcccgcttccagctgtctgagggccccagcaagcccagccccctggtggtgcagttcaccagcgagggcagcaccctgagcggctgtgacatcgagctggtgggcgccggctaccgcttcagcctcatcaagaagagatttgctgctgggaagtacctggccgacaactag

SEQ ID NO: 169601 - DNA, 1857 bp, synthetic construct
  misc_feature 1..1857: note = Description of Artificial Sequence: Synthetic coding sequence
  source 1..1857: mol_type = other DNA
atgatggagggcctgaagaagaggaccaggaaggccttcggcatcaggaagaaggagaaggacacagacagcacaggcagcccagacagagatggcatcaacagccctgagctggatgaggagggctacagcatccggcctgaggagcccggcagcaccaagggcaagcacttctacagcagcagcgagagcgaggaggaggaggagagccacaagaagttcaacatcaagatcaagcccctgcagagcaaggacatcctgaagaatgctgccaccgtggatgagctgaaggccagcatcggcaacatcgccctgagccccagccctgtgaggaagagccccaggaggagccctggggccatcaagaggaacctgagcagcgaggaggtggcccggccccggcgcagcacccccaccccagagctgatcagcaagaagcccccagatgacaccacagccctggcccccctgtttggcccccccctggagagcgcctttgatgagcagaagacagaggtgctgctggaccagcctgagatctggggcagcggccagcccatcaaccccagcatggagagccccaagctgacccggcccttccccaccggcaccccaccacccctgccccccaagaatgtgcctgccaccccacccaggacaggcagccccctgaccatcggccctggggccagcagccctgcccggcctgccacccccctggtgccctgccgcagcaccaccccacctcctcctccacccaggcctcccagccggcccaagctgcccccaggcaagccaggagtgggagatgtgtcccggcccttcagcccccccatccacagcagcagccccccacccatcgcccccctggcccgggcagagagcaccagcagcatcagcagcaccaacagcctgtctgctgccaccacccccaccgtggagaatgagcagcccagcctggtgtggtttgaccggggcaagttctacctgacctttgagggcagcagccggggccccagccccctgaccatgggcgcccaggacaccctgcctgtggccgccgccttcacagaaacagtgaatgcctacttcaagggagctgaccccagcaaatgtattgtgaagatcactggagagatggtgctgtccttccctgctggcatcaccaggcactttgccaacaaccccagccctgctgccctgaccttccgggtcatcaacttcagccggctggagcacgtgctgcccaacccccagctgctgtgctgtgacaacacccagaatgatgccaacaccaaggagttctgggtgaacatgcccaacctgatgacccacctgaagaaggtgtctgagcagaagccccaggccacctactacaacgtggacatgctgaagtaccaggtgtctgcccagggcatccagagcacccccctgaacctggccgtgaactggaggtgtgagcccagcagcacagacctgagaattgactacaagtacaacacagatgccatgaccacagctgtggccctgaacaacgtgcagttcctggtgcccattgatggcggcgtgaccaagctgcaggccgtgctgcccccagctgtgtggaatgctgagcagcagaggatcctgtggaagatcccagacatcagccagaagtcagaaaatggaggagtgggcagcctgctggcccgcttccagctgtctgagggccccagcaagcccagccccctggtggtgcagttcaccagcgagggcagcaccctgagcggctgtgacatcgagctggtgggcgccggctaccgcttcagcctcatcaagaagagatttgctgctgggaagtacctggccgacaactag

SEQ ID NO: 169602 - DNA, 1893 bp, synthetic construct
  misc_feature 1..1893: note = Description of Artificial Sequence: Synthetic coding sequence
  source 1..1893: mol_type = other DNA
atggagggcctgaagaagaggaccaggaaggccttcggcatcaggaagaaggagaaggacacagacagcacaggcagcccagacagagatggcatcaagaagagcaatggagcccccaacggcttctacgccgagattgactgggagcgctacaacagccctgagctggatgaggagggctacagcatccggcctgaggagcccggcagcaccaagggcaagcacttctacagcagcagcgagagcgaggaggaggaggagagccacaagaagttcaacatcaagatcaagcccctgcagagcaaggacatcctgaagaatgctgccaccgtggatgagctgaaggccagcatcggcaacatcgccctgagccccagccctgtgggcgccatcaagaggaacctgagcagcgaggaggtggcccggccccggcgcagcacccccaccccagagctgatcagcaagaagcccccagatgacaccacagccctggcccccctgtttggcccccccctggagagcgcctttgatgagcagaagacagaggtgctgctggaccagcctgagatctggggcagcggccagcccatcaaccccagcatggagagccccaagctgacccggcccttccccaccggcaccccaccacccctgccccccaagaatgtgcctgccaccccacccaggacaggcagccccctgaccatcggccctggggccagcagccctgcccggcctgccacccccctggtgccctgccgcagcaccaccccacctcctcctccacccaggcctcccagccggcccaagctgcccccaggcaagccaggagtgggagatgtgtcccggcccttcagcccccccatccacagcagcagccccccacccatcgcccccctggcccgggcagagagcaccagcagcatcagcagcaccaacagcctgtctgctgccaccacccccaccgtggtgtctgaagatgatgtgttctatgacaagctgcccagctttgaaagaagatgtgagaccccagctggcagcagccggggccccagccccctgaccatgggcgcccaggacaccctgcctgtggccgccgccttcacagaaacagtgaatgcctacttcaagggagctgaccccagcaaatgtattgtgaagatcactggagagatggtgctgtccttccctgctggcatcaccaggcactttgccaacaaccccagccctgctgccctgaccttccgggtcatcaacttcagccggctggagcacgtgctgcccaacccccagctgctgtgctgtgacaacacccagaatgatgccaacaccaaggagttctgggtgaacatgcccaacctgatgacccacctgaagaaggtgtctgagcagaagccccaggccacctactacaacgtggacatgctgaagtaccaggtgtctgcccagggcatccagagcacccccctgaacctggccgtgaactggaggtgtgagcccagcagcacagacctgagaattgactacaagtacaacacagatgccatgaccacagctgtggccctgaacaacgtgcagttcctggtgcccattgatggcggcgtgaccaagctgcaggccgtgctgcccccagctgtgtggaatgctgagcagcagaggatcctgtggaagatcccagacatcagccagaagtcagaaaatggaggagtgggcagcctgctggcccgcttccagctgtctgagggccccagcaagcccagccccctggtggtgcagttcaccagcgagggcagcaccctgagcggctgtgacatcgagctggtgggcgccggctaccgcttcagcctcatcaagaagagatttgctgctgggaagtacctggccgacaactag

SEQ ID NO: 169603 - DNA, 2487 bp, synthetic construct
  misc_feature 1..2487: note = Description of Artificial Sequence: Synthetic coding sequence
  source 1..2487: mol_type = other DNA
atgatggagggcctgaagaagaggaccaggaaggccttcggcatcaggaagaaggagaaggacacagacagcacaggcagcccagacagagatggcatccagcccagcccccatgagcccccctacaacagcaaggcagaatgtgcccgggagggcggcaagaaggtgtccaagaagagcaatggagccccaaatggcttctatgcagaaattgactgggagcgctacaacagccctgagctggatgaggagggctacagcatccggcctgaggagcccggcagcaccaagggcaagcacttctacagcagcagcgagagcgaggaggaggaggagagccacaagaagttcaacatcaagatcaagcccctgcagagcaaggacatcctgaagaatgctgccaccgtggatgagctgaaggccagcatcggcaacatcgccctgagccccagccctgtgaggaagagcccccggcgcagccctggggccatcaagaggaacctgagcagcgaggaggtggcccggcccaggaggagcacccccaccccagagctgatcagcaagaagcccccagatgacaccacagccctggcccccctgtttggaccacccctggagagcgcctttgatgagcagaagacagaggtgctgctggaccagcctgagatctggggcagcggccagcccatcaaccccagcatggagagccccaagctgacccggcccttccccaccggcaccccaccacccctgccccccaagaatgtgcctgccaccccacccaggacaggcagccccctgaccatcggccctggaaatgaccagagcgccacagaggtgaagattgagaagctgcccagcatcaatgacctggacagcatctttggacctgtgctgagccccaagtctgtggccgtgaatgctgaggagaagtgggtgcacttcagtgacaccagccctgagcacgtgaccccagagctgaccccccgggagaaggtggtgagccccccagccaccccagacaacccagctgacagccctgcccctggccccctgggccccccaggccccaccggccccccaggccccccaggccccccaagaaatgtgctgagccccctgaacctggaggaggtgcagaagaaggtggccgagcagaccttcatcaaggatgactacctggagaccatcagcagccccaaggactttggcctgggccagagggccaccccacctcctcctcctccacccacctacagaacagtggtgagcagccctggccctggcagcggccctggccctggcaccaccagcggggccagcagccctgcccggcctgccacccccctggtgccctgccgcagcaccaccccacctcctcctccacccaggcctcccagccggcccaagctgcccccaggcaagccaggagtgggagatgtgtcccggcccttcagcccccccatccacagcagcagccccccacccatcgcccccctggcccgggcagagagcaccagcagcatcagcagcaccaacagcctgtctgctgccaccacccccaccgtggagaatgagcagcccagcctggtgtggtttgaccggggcaagttctacctgacctttgagggcagcagccggggccccagccccctgaccatgggcgcccaggacaccctgcctgtggccgccgccttcacagaaacagtgaatgcctacttcaagggagctgaccccagcaaatgtattgtgaagatcactggagagatggtgctgtccttccctgctggcatcaccaggcactttgccaacaaccccagccctgctgccctgaccttccgggtcatcaacttcagccggctggagcacgtgctgcccaacccccagctgctgtgctgtgacaacacccagaatgatgccaacaccaaggagttctgggtgaacatgcccaacctgatgacccacctgaagaaggtgtctgagcagaagccccaggccacctactacaacgtggacatgctgaagtaccaggtgtctgcccagggcatccagagcacccccctgaacctggccgtgaactggaggtgtgagcccagcagcacagacctgagaattgactacaagtacaacacagatgccatgaccacagctgtggccctgaacaacgtgcagttcctggtgcccattgatggcggcgtgaccaagctgcaggccgtgctgcccccagctgtgtggaatgctgagcagcagaggatcctgtggaagatcccagacatcagccagaagtcagaaaatggaggagtgggcagcctgctggcccgcttccagctgtctgagggccccagcaagcccagccccctggtggtgcagttcaccagcgagggcagcaccctgagcggctgtgacatcgagctggtgggcgccggctaccgcttcagcctcatcaagaagagatttgctgctgggaagtacctggccgacaactag

SEQ ID NO: 169604 - DNA, 2577 bp, synthetic construct
  misc_feature 1..2577: note = Description of Artificial Sequence: Synthetic coding sequence
  source 1..2577: mol_type = other DNA
atggagggcctgaagaagaggaccaggaaggccttcggcatcaggaagaaggagaaggacacagacagcacaggcagcccagacagagatggcatccagggcaagaagaagacccagaagacccagctgctgctgaccagctgcttctggctgcgggccctgagcctgaccctgagccagaagaagagcaatggagcccccaacggcttctacgccgagattgactgggagcgctacaacagccctgagctggatgaggagggctacagcatccggcctgaggagcccggcagcaccaagggcaagcacttctacagcagcagcgagagcgaggaggaggaggagagccacaagaagttcaacatcaagatcaagcccctgcagagcaaggacatcctgaagaatgctgccaccgtggatgagctgaaggccagcatcggcaacatcgccctgagccccagccctgtgaggaagaaggagcggcgggagaagggggccatcaagaggaacctgagcagcgaggaggtggcccggccccggcgcagcacccccaccccagagctgatcagcaagaagcccccagatgacaccacagccctggcccccctgtttggcccccccctggagagcgcctttgatgagcagaagacagaggtgctgctggaccagcctgagatctggggcagcggccagcccatcaaccccagcatggagagccccaagctgacccggcccttccccaccggcaccccaccacccctgccccccaagaatgtgcctgccaccccacccaggacaggcagccccctgaccatcggccctggaaatgaccagagcgccacagaggtgaagattgagaagctgcccagcatcaatgacctggacagcatcttcggccctgtgctgagccccaagtctgtggccgtgaatgctgaggagaagtgggtgcacttcagtgacaccagccctgagcacgtgaccccagagctgaccccccgggagaaggtggtgtccccaccagccaccccagacaacccagctgacagccctgcccctggccccctgggccccccaggccccactggacctcctggccccccaggccccccaagaaatgtgctgagccccctgaacctggaggaggtgcagaagaaggtggccgagcagaccttcatcaaggatgactacctggagaccatcagcagccccaaggactttggcctgggccagagggccaccccacctcctcctcctccacccacctacagaacagtggtgagcagccctggccctggcagcggccctggccctggcaccaccagtgatggcaagacagaggcccagcgctaccaggtgatctgccccagcctgcaggccggcggcaatgagctggacagctacagcggggccagcagccctgcccggcctgccacccccctggtgccctgccgcagcaccaccccacctcctcctccacccaggcctcccagccggcccaagctgcccccaggcaagccaggagtgggagatgtgtcccggcccttcagcccccccatccacagcagcagccccccacccatcgcccccctggcccgggcagagagcaccagcagcatcagcagcaccaacagcctgtctgctgccaccacccccaccgtggagaatgagcagcccagcctggtgtggtttgaccggggcaagttctacctgacctttgagggcagcagccggggccccagccccctgaccatgggcgcccaggacaccctgcctgtggccgccgccttcacagaaacagtgaatgcctacttcaagggagctgaccccagcaaatgtattgtgaagatcactggagagatggtgctgtccttccctgctggcatcaccaggcactttgccaacaaccccagccctgctgccctgaccttccgggtcatcaacttcagccggctggagcacgtgctgcccaacccccagctgctgtgctgtgacaacacccagaatgatgccaacaccaaggagttctgggtgaacatgcccaacctgatgacccacctgaagaaggtgtctgagcagaagccccaggccacctactacaacgtggacatgctgaagtaccaggtgtctgcccagggcatccagagcacccccctgaacctggccgtgaactggaggtgtgagcccagcagcacagacctgagaattgactacaagtacaacacagatgccatgaccacagctgtggccctgaacaacgtgcagttcctggtgcccattgatggcggcgtgaccaagctgcaggccgtgctgcccccagctgtgtggaatgctgagcagcagaggatcctgtggaagatcccagacatcagccagaagtcagaaaatggaggagtgggcagcctgctggcccgcttccagctgtctgagggccccagcaagcccagccccctggtggtgcagttcaccagcgagggcagcaccctgagcggctgtgacatcgagctggtgggcgccggctaccgcttcagcctcatcaagaagagatttgctgctgggaagtacctggccgacaactag

SEQ ID NO: 169605 - DNA, 1896 bp, synthetic construct
  misc_feature 1..1896: note = Description of Artificial Sequence: Synthetic coding sequence
  source 1..1896: mol_type = other DNA
atgatggagggcctgaagaagaggaccaggaaggccttcggcatcaggaagaaggagaaggacacagacagcacaggcagcccagacagagatggcatcaagaagagcaatggagccccaaatggcttctatgcagaaattgactgggagcgctacaacagccctgagctggatgaggagggctacagcatccggcctgaggagcccggcagcaccaagggcaagcacttctacagcagcagcgagagcgaggaggaggaggagagccacaagaagttcaacatcaagatcaagcccctgcagagcaaggacatcctgaagaatgctgccaccgtggatgagctgaaggccagcatcggcaacatcgccctgagccccagccctgtgggcgccatcaagaggaacctgagcagcgaggaggtggcccggcccaggaggagcacccccaccccagagctgatcagcaagaagcccccagatgacaccacagccctggcccccctgtttggaccacccctggagagcgcctttgatgagcagaagacagaggtgctgctggaccagcctgagatctggggcagcggccagcccatcaaccccagcatggagagccccaagctgacccggcccttccccaccggcaccccaccacccctgccccccaagaatgtgcctgccaccccacccaggacaggcagccccctgaccatcggccctggggccagcagccctgcccggcctgccacccccctggtgccctgccgcagcaccaccccacctcctcctccaccccggccccccagccggcccaagctgcccccaggcaagccaggagtgggagatgtgtcccggcccttcagcccccccatccacagcagcagccccccacccatcgcccccctggcccgggcagagagcaccagcagcatcagcagcaccaacagcctgtctgctgccaccacccccaccgtggtgtctgaagatgatgtgttctatgacaagctgcccagctttgagcggcgctgtgagaccccagctggcagcagccggggccccagccccctgaccatgggcgcccaggacaccctgcctgtggccgccgccttcacagagaccgtgaatgcctacttcaagggagctgaccccagcaagtgcatcgtgaagatcaccggggagatggtgctgtccttccctgctggcatcaccaggcactttgccaacaaccccagccctgctgccctgaccttccgggtcatcaacttcagccggctggagcacgtgctgcccaacccccagctgctgtgctgtgacaacacccagaatgatgccaacaccaaggagttctgggtgaacatgcccaacctgatgacccacctgaagaaggtgtctgagcagaagccccaggccacctactacaacgtggacatgctgaagtaccaggtgtctgcccagggcatccagagcacccccctgaacctggccgtgaactggaggtgtgagcccagcagcacagacctgagaattgactacaagtacaacacagatgccatgaccacagctgtggccctgaacaacgtgcagttcctggtgcccattgatggaggagtgaccaagctgcaggccgtgctgcccccagctgtgtggaatgctgagcagcagaggatcctgtggaagatcccagacatcagccagaagtcagaaaatggaggagtgggcagcctgctggcccgcttccagctgtctgagggccccagcaagcccagccccctggtggtgcagttcaccagcgagggcagcaccctgagcggctgtgacatcgagctggtgggcgccggctaccgcttcagcctcatcaagaagagatttgctgctgggaagtacctggccgacaactag

SEQ ID NO: 169606 - DNA, 2496 bp, synthetic construct
  misc_feature 1..2496: note = Description of Artificial Sequence: Synthetic coding sequence
  source 1..2496: mol_type = other DNA
atggagggcctgaagaagaggaccaggaaggccttcggcatcaggaagaaggagaaggacacagacagcacaggcagcccagacagagatggcatccagggcaagaagaagacccagaagacccagctgctgctgaccagctgcttctggctgcgggccctgagcctgaccctgagccagaagaagagcaatggagcccccaacggcttctacgccgagattgactgggagcgctacaacagccctgagctggatgaggagggctacagcatccggcctgaggagcccggcagcaccaagggcaagcacttctacagcagcagcgagagcgaggaggaggaggagagccacaagaagttcaacatcaagatcaagcccctgcagagcaaggacatcctgaagaatgctgccaccgtggatgagctgaaggccagcatcggcaacatcgccctgagccccagccctgtgaggaagaaggagcggcgggagaagggggccatcaagaggaacctgagcagcgaggaggtggcccggccccggcgcagcacccccaccccagagctgatcagcaagaagcccccagatgacaccacagccctggcccccctgtttggcccccccctggagagcgcctttgatgagcagaagacagaggtgctgctggaccagcctgagatctggggcagcggccagcccatcaaccccagcatggagagccccaagctgacccggcccttccccaccggcaccccaccacccctgccccccaagaatgtgcctgccaccccacccaggacaggcagccccctgaccatcggccctggaaatgaccagagcgccacagaggtgaagattgagaagctgcccagcatcaatgacctggacagcatcttcggccctgtgctgagccccaagtctgtggccgtgaatgctgaggagaagtgggtgcacttcagtgacaccagccctgagcacgtgaccccagagctgaccccccgggagaaggtggtgtccccaccagccaccccagacaacccagctgacagccctgcccctggccccctgggccccccaggccccactggacctcctggccccccaggccccccaagaaatgtgctgagccccctgaacctggaggaggtgcagaagaaggtggccgagcagaccttcatcaaggatgactacctggagaccatcagcagccccaaggactttggcctgggccagagggccaccccacctcctcctcctccacccacctacagaacagtggtgagcagccctggccctggcagcggccctggccctggcaccaccagcggggccagcagccctgcccggcctgccacccccctggtgccctgccgcagcaccaccccacctcctcctccaccccggccccccagccggcccaagctgcccccaggcaagccaggagtgggagatgtgtcccggcccttcagcccccccatccacagcagcagccccccacccatcgcccccctggcccgggcagagagcaccagcagcatcagcagcaccaacagcctgtctgctgccaccacccccaccgtggagaatgagcagcccagcctggtgtggtttgaccggggcaagttctacctgacctttgagggcagcagccggggccccagccccctgaccatgggcgcccaggacaccctgcctgtggccgccgccttcacagagaccgtgaatgcctacttcaagggagctgaccccagcaagtgcatcgtgaagatcaccggggagatggtgctgtccttccctgctggcatcaccaggcactttgccaacaaccccagccctgctgccctgaccttccgggtcatcaacttcagccggctggagcacgtgctgcccaacccccagctgctgtgctgtgacaacacccagaatgatgccaacaccaaggagttctgggtgaacatgcccaacctgatgacccacctgaagaaggtgtctgagcagaagccccaggccacctactacaacgtggacatgctgaagtaccaggtgtctgcccagggcatccagagcacccccctgaacctggccgtgaactggaggtgtgagcccagcagcacagacctgagaattgactacaagtacaacacagatgccatgaccacagctgtggccctgaacaacgtgcagttcctggtgcccattgatggaggagtgaccaagctgcaggccgtgctgcccccagctgtgtggaatgctgagcagcagaggatcctgtggaagatcccagacatcagccagaagtcagaaaatggaggagtgggcagcctgctggcccgcttccagctgtctgagggccccagcaagcccagccccctggtggtgcagttcaccagcgagggcagcaccctgagcggctgtgacatcgagctggtgggcgccggctaccgcttcagcctcatcaagaagagatttgctgctgggaagtacctggccgacaactag

SEQ ID NO: 169607 - DNA, 783 bp, synthetic construct
  misc_feature 1..783: note = Description of Artificial Sequence: Synthetic coding sequence
  source 1..783: mol_type = other DNA
atgatggagggcctgaagaagaggaccaggaaggccttcggcatcaggaagaaggagaaggacacagacagcacaggcagcccagacagagatggcatccagcccagcccccatgagcccccctacaacagcaaggcagaatgtgcccgggagggcggcaagaaggtgtccaagaagagcaatggagccccaaatggcttctatgcagaaattgactgggagcgctacaacagccctgagctggatgaggagggctacagcatccggcctgaggagcccggcagcaccaagggcaagcacttctacagcagcagcgagagcgaggaggaggaggagagccacaagaagttcaacatcaagatcaagcccctgcagagcaaggacatcctgaagaatgctgccaccgtggatgagctgaaggccagcatcggcaacatcgccctgagccccagccctgtgggcgccatcaagaggaacctgagcagcgaggaggtggcccggcccaggaggagcacccccaccccagagctgatcagcaagaagcccccagatgacaccacagccctggcccccctgtttggaccacccctggagagcgcctttgatgagcagaagacagaggtgctgctggaccagcctgagatctggggcagcggccagcccatcaaccccagcatggagagccccaagctgacccggcccttccccaccggcaccccaccacccctgccccccaagaatgtgcctgccaccccacccaggacaggcagccccctgacctag

SEQ ID NO: 169608 - DNA, 1002 bp, synthetic construct
  misc_feature 1..1002: note = Description of Artificial Sequence: Synthetic coding sequence
  source 1..1002: mol_type = other DNA
atgacctgcagcgtgacccacatcgtgtccttcagcctgcccttcctgaaccccagccacccagccagcaccccaggccacacagaaaatgagcagcccagcctggtgtggtttgaccggggcaagttctacctgacctttgagggcagcagccggggccccagccccctgaccatgggcgcccaggacaccctgcctgtggccgccgccttcacagagaccgtgaatgcctacttcaagggagctgaccccagcaagtgcatcgtgaagatcaccggggagatggtgctgtccttccctgctggcatcaccaggcactttgccaacaaccccagccctgctgccctgaccttccgggtcatcaacttcagccggctggagcacgtgctgcccaacccccagctgctgtgctgtgacaacacccagaatgatgccaacaccaaggagttctgggtgaacatgcccaacctgatgacccacctgaagaaggtgtctgagcagaagccccaggccacctactacaacgtggacatgctgaagtaccaggtgtctgcccagggcatccagagcacccccctgaacctggccgtgaactggaggtgtgagcccagcagcacagacctgagaattgactacaagtacaacacagatgccatgaccacagctgtggccctgaacaacgtgcagttcctggtgcccattgatggaggagtgaccaagctgcaggccgtgctgcccccagctgtgtggaatgctgagcagcagaggatcctgtggaagatcccagacatcagccagaagtcagaaaatggaggagtgggcagcctgctggcccgcttccagctgtctgagggccccagcaagcccagccccctggtggtgcagttcaccagcgagggcagcaccctgagcggctgtgacatcgagctggtgggcgccggctaccgcttcagcctcatcaagaagagatttgctgctgggaagtacctggccgacaactag

SEQ ID NO: 169609 - DNA, 1107 bp, synthetic construct
  misc_feature 1..1107: note = Description of Artificial Sequence: Synthetic coding sequence
  source 1..1107: mol_type = other DNA
atgtctgtggccggcctgaagaagcagttctacaaggccagccagctggtgtctgagaaggtgggcggcgctgagggcaccaagctggatgatgacttcaaggagatggagaagaaggtggatgtgaccagcaaggctgtgacagaggtgctggcccggaccatcgagtacctgcagcccaacccagccagccgggccaagctgaccatgctgaacacagtgtccaagatccggggccaggtgaagaaccctggctacccccagagcgagggcctgctgggggagtgcatgatccgccacggcaaggagctgggcggggagagcaactttggagatgccctgctggatgctggggagagcatgaagaggctggccgaggtgaaggacagcctggacatcgaggtgaagcagaacttcatcgaccccctgcagaacctgtgtgagaaggacctgaaggagatccagcaccacctgaagaagctggagggccggcggctggactttgactacaagaagaagaggcagggcaagatcccagatgaggagctgcggcaggccctggagaagtttgaggagagcaaggaggtggccgagacctccatgcacaacctgctggagacagacatcgagcaggtgtcccagctgagcgccctggtggatgcccagctggactaccaccggcaggccgtgcagatcctggatgagctggccgagaagctgaagaggaggatgagggaggccagcagccggcccaagcgggagtacaagcccaagccccgggagccctttgacctgggggagcctgagcagagcaatggaggcttcccctgcaccacagcccccaagattgctgccagcagcagcttccgcagcagtgacaagcccatccgcacccccagccgctccatgccacccctggaccagcccagctgcaaggccctgtatgactttgagccagaaaatgatggagagctgggcttccacgagggagatgtgatcaccctgaccaaccagattgatgagaactggtatgagggcatgctggatggccagagcggcttcttccccctgtcctatgtggaggtgctggtgcccctgccccagtag

SEQ ID NO: 169610 - DNA, 963 bp, synthetic construct
  misc_feature 1..963: note = Description of Artificial Sequence: Synthetic coding sequence
  source 1..963: mol_type = other DNA
atgtctgtggccggcctgaagaagcagttctacaaggccagccagctggtgtctgagaaggtgggcggcgctgagggcaccaagctggatgatgacttcaaggagatggagaagaaggtggatgtgaccagcaaggctgtgacagaggtgctggcccggaccatcgagtacctgcagcccaaccctggagatgccctgctggatgctggggagagcatgaagaggctggccgaggtgaaggacagcctggacatcgaggtgaagcagaacttcatcgaccccctgcagaacctgtgtgagaaggacctgaaggagatccagcaccacctgaagaagctggagggccggcggctggactttgactacaagaagaagaggcagggcaagatcccagatgaggagctgcggcaggccctggagaagtttgaggagagcaaggaggtggccgagacctccatgcacaacctgctggagacagacatcgagcaggtgtcccagctgagcgccctggtggatgcccagctggactaccaccggcaggccgtgcagatcctggatgagctggccgagaagctgaagaggaggatgagggaggccagcagccggcccaagcgggagtacaagcccaagccccgggagccctttgacctgggggagcctgagcagagcaatggaggcttcccctgcaccacagcccccaagattgctgccagcagcagcttccgcagcagtgacaagcccatccgcacccccagccgctccatgccacccctggaccagcccagctgcaaggccctgtatgactttgagccagaaaatgatggagagctgggcttccacgagggagatgtgatcaccctgaccaaccagattgatgagaactggtatgagggcatgctggatggccagagcggcttcttccccctgtcctatgtggaggtgctggtgcccctgccccagtag

SEQ ID NO: 169611 - DNA, 915 bp, synthetic construct
  misc_feature 1..915: note = Description of Artificial Sequence: Synthetic coding sequence
  source 1..915: mol_type = other DNA
atgtctgtggccggcctgaagaagcagttctacaaggccagccagctggtgtctgagaaggtgggcggcgctgagggcaccaagctggatgatgacttcaaggagatggagaagaaggtggatgtgaccagcaaggctgtgacagaggtgctggcccggaccatcgagtacctgcagcccaacccagccagccgggccaagctgaccatgctgaacacagtgtccaagatccggggccagaacctgtgtgagaaggacctgaaggagatccagcaccacctgaagaagctggagggccggcggctggactttgactacaagaagaagaggcagggcaagatcccagatgaggagctgcggcaggccctggagaagtttgaggagagcaaggaggtggccgagacctccatgcacaacctgctggagacagacatcgagcaggtgtcccagctgagcgccctggtggatgcccagctggactaccaccggcaggccgtgcagatcctggatgagctggccgagaagctgaagaggaggatgagggaggccagcagccggcccaagcgggagtacaagcccaagccccgggagccctttgacctgggggagcctgagcagagcaatggaggcttcccctgcaccacagcccccaagattgctgccagcagcagcttccgcagcagtgacaagcccatccgcacccccagccgctccatgccacccctggaccagcccagctgcaaggccctgtatgactttgagccagaaaatgatggagagctgggcttccacgagggagatgtgatcaccctgaccaaccagattgatgagaactggtatgagggcatgctggatggccagagcggcttcttccccctgtcctatgtggaggtgctggtgcccctgccccagtag

SEQ ID NO: 169612 - DNA, 1059 bp, synthetic construct
  misc_feature 1..1059: note = Description of Artificial Sequence: Synthetic coding sequence
  source 1..1059: mol_type = other DNA
atgtctgtggccggcctgaagaagcagttccacaaggccacccagaaggtgtctgagaaggtgggcggcgctgagggcaccaagctggatgatgacttcaaggagatggagaggaaggtggatgtgaccagcagagctgtgatggagatcatgaccaagaccatcgagtacctgcagcccaacccagccagccgggccaagctgtccatgatcaacaccatgagcaagatccggggccaggagaagggccctggctacccccaggccgaggccctgctggccgaggccatgctgaagtttggccgggagctgggagatgactgcaactttggacctgccctgggggaggtgggggaggccatgagggagctgtctgaggtgaaggacagcctggacatcgaggtgaagcagaacttcatcgaccccctgcagaacctgcatgacaaggacctgcgggagatccagcaccacctgaagaagctggagggccggcggctggactttgactacaagaagaagaggcagggcaagatcccagatgaggagctgcggcaggccctggagaagtttgatgagagcaaggagattgctgagagctccatgttcaacctgctggagatggacatcgagcaggtgtcccagctgagcgccctggtgcaggcccagctggagtaccacaagcaggccgtgcagatcctgcagcaggtgacagtgcggctggaggagcgcatccggcaggccagcagccagccccggcgggagtaccagcccaagcccaggatgagcctggagttccccactggagacagcacccagcccaacggcggcctgagccacacaggcacccccaagcccagcggcgtgcagatggaccagccctgctgccgggccctgtatgactttgagccagaaaatgaaggagagctgggcttcaaggagggggacatcatcaccctgaccaaccagattgatgagaactggtatgagggcatgctgcacggccacagcggcttcttccccatcaactacgtggagatcctggtggccctgccccactag

SEQ ID NO: 169613 - DNA, 678 bp, synthetic construct
  misc_feature 1..678: note = Description of Artificial Sequence: Synthetic coding sequence
  source 1..678: mol_type = other DNA
atgtctgtggccggcctgaagaagcagttccacaaggccacccagaaggtgtctgagaaggtgggcggcgctgagggcaccaagctggatgatgacttcaaggagatggagaggaaggtggatgtgaccagcagagctgtgatggagatcatgaccaagaccatcgagtacctgcagcccaaccctggcagcctggaggccgaggccctgctggccgaggccatgctgaagtttggccgggagctgggagatgactgcaactttggacctgccctgggggaggtgggggaggccatgagggagctgtctgaggtgaaggacagcctggacatcgaggtgaagcagaacttcatcgaccccctgcagaacctgcatgacaaggacctgcgggagatccagcaccacctgaagaagctggagggccggcggctggactttgactacaagaagaagaggcagggcaagatcccagatgaggagctgcggcaggccctggagaagtttgatgagagcaaggagattgctgagagctccatgttcaacctgctggagatggacatcgagcaggtgtcccagctgagcgccctggtgcaggcccagctggagtaccacaagcaggccgtgcagatcctgcagcaggtgacagtgcggctggaggagcgcatccggcaggcctag

SEQ ID NO: 169614 - DNA, 918 bp, synthetic construct
  misc_feature 1..918: note = Description of Artificial Sequence: Synthetic coding sequence
  source 1..918: mol_type = other DNA
atggagatcatgaccaagaccatcgagtacctgcagcccaacccagccagccgggccaagctgtccatgatcaacaccatgagcaagatccggggccaggagaagggccctggctacccccaggccgaggccctgctggccgaggccatgctgaagtttggccgggagctgggagatgactgcaactttggacctgccctgggggaggtgggggaggccatgagggagctgtctgaggtgaaggacagcctggacatcgaggtgaagcagaacttcatcgaccccctgcagaacctgcatgacaaggacctgcgggagatccagcaccacctgaagaagctggagggccgccgcctggactttgactacaagaagaagaggcagggcaagatcccagatgaggagctgcggcaggccctggagaagtttgatgagagcaaggagattgctgagagctccatgttcaacctgctggagatggacatcgagcaggtgtcccagctgagcgccctggtgcaggcccagctggagtaccacaagcaggccgtgcagatcctgcagcaggtgacagtgcggctggaggagcgcatccggcaggccagcagccagccccggcgggagtaccagcccaagcccaggatgagcctggagttccccaccggggacagcacccagcccaatggaggcctgagccacacaggcacccccaagcccagcggcgtgcagatggaccagccctgctgccgggccctgtatgactttgagccagaaaatgaaggagagctgggcttcaaggagggggacatcatcaccctgaccaaccagattgatgagaactggtatgagggcatgctgcacggccacagcggcttcttccccatcaactacgtggagatcctggtggccctgccccactag

SEQ ID NO: 169615 - DNA, 546 bp, synthetic construct
  misc_feature 1..546: note = Description of Artificial Sequence: Synthetic coding sequence
  source 1..546: mol_type = other DNA
atgtctgtggccggcctgaagaagcagttccacaaggccacccagaaggtgtctgagaaggtgggcggcgctgagggcaccaagctggatgatgacttcaaggagatggagattgagcaggtgtcccagctgagcgccctggtgcaggcccagctggagtaccacaagcaggccgtgcagatcctgcagcaggtgacagtgcggctggaggagcgcatccggcaggccagcagccagccccggcgggagtaccagcccaagcccaggatgagcctggagttccccaccggggacagcacccagcccaatggaggcctgagccacacaggcacccccaagcccagcggcgtgcagatggaccagccctgctgccgggccctgtatgactttgagccagaaaatgaaggagagctgggcttcaaggagggggacatcatcaccctgaccaaccagattgatgagaactggtatgagggcatgctgcacggccacagcggcttcttccccatcaactacgtggagatcctggtggccctgccccactag

SEQ ID NO: 169616 - DNA, 1068 bp, synthetic construct
  misc_feature 1..1068: note = Description of Artificial Sequence: Synthetic coding sequence
  source 1..1068: mol_type = other DNA
atggatggcatctttgctggcatcatctgcaaccaggccaaccgctgcctgacctggaccagccagcagctgttcagcgagaagatcagcggggctgagggcaccaagctggatgatgagttcctggacatggagaggaagattgatgtgaccaacaaggtggtggccgagatcctgagcaagaccacagagtacctgcagcccaacccagcctaccgggccaagctgggcatgctgaacacagtgtccaagatccggggccaggtgaagaccaccggctacccccagacagagggcctgctgggggactgcatgctgaagtatggcaaggagctgggggaggacagcacctttggaaatgccctgattgaggtgggggagagcatgaagctgatggccgaggtgaaggacagcctggacatcaacgtgaagcagaccttcatcgaccccctgcagctgctgcaggacaaggacctgaaggagatcggccaccacctgaagaagctggagggccggcggctggactatgactacaagaagaagagggtgggcaagatcccagatgaggaggtgcggcaggccgtggagaagtttgaggagagcaaggagctggccgagaggtccatgttcaacttcctggagaatgatgtggagcaggtgtcccagctggccgtgttcattgaagctgccctggactaccaccggcagagcacagagatcctgcaggagctgcagagcaagctgcagatgaggatctctgctgccagctctgtgccccggcgggagtacaagcccaggcctgtgaagaggagcagcagcgagctgaatggagtgtccaccacctctgtggtgaagaccaccggcagcaacatccccatggaccagccctgctgccggggcctgtatgactttgagcctgagaaccagggcgagctgggcttcaaggagggggacatcatcaccctgaccaaccagattgatgagaactggtatgagggcatgatccacggggagagcggcttcttccccatcaactacgtggaggtgattgtgcccctgccccagtag

SEQ ID NO: 169617 - DNA, 1044 bp, synthetic construct
  misc_feature 1..1044: note = Description of Artificial Sequence: Synthetic coding sequence
  source 1..1044: mol_type = other DNA
atgtctgtggccggcctgaagaagcagttccacaaggccagccagctgttcagcgagaagatcagcggggctgagggcaccaagctggatgatgagttcctggacatggagaggaagattgatgtgaccaacaaggtggtggccgagatcctgagcaagaccacagagtacctgcagcccaacccagcctaccgggccaagctgggcatgctgaacacagtgtccaagatccggggccaggtgaagaccaccggctacccccagacagagggcctgctgggggactgcatgctgaagtatggcaaggagctgggggaggacagcacctttggaaatgccctgattgaggtgggggagagcatgaagctgatggccgaggtgaaggacagcctggacatcaacgtgaagcagaccttcatcgaccccctgcagctgctgcaggacaaggacctgaaggagatcggccaccacctgaagaagctggagggccggcggctggactatgactacaagaagaagagggtgggcaagatcccagatgaggaggtgcggcaggccgtggagaagtttgaggagagcaaggagctggccgagaggtccatgttcaacttcctggagaatgatgtggagcaggtgtcccagctggccgtgttcattgaagctgccctggactaccaccggcagagcacagagatcctgcaggagctgcagagcaagctgcagatgaggatctctgctgccagctctgtgccccggcgggagtacaagcccaggcctgtgaagaggagcagcagcgagctgaatggagtgtccaccacctctgtggtgaagaccaccggcagcaacatccccatggaccagccctgctgccggggcctgtatgactttgagcctgagaaccagggcgagctgggcttcaaggagggggacatcatcaccctgaccaaccagattgatgagaactggtatgagggcatgatccacggggagagcggcttcttccccatcaactacgtggaggtgattgtgcccctgccccagtag

SEQ ID NO: 169618 - DNA, 1068 bp, synthetic construct; identical to SEQ ID NO: 169616
  misc_feature 1..1068: note = Description of Artificial Sequence: Synthetic coding sequence
  source 1..1068: mol_type = other DNA

SEQ ID NO: 169619 - DNA, 867 bp, synthetic construct
  misc_feature 1..867: note = Description of Artificial Sequence: Synthetic coding sequence
  source 1..867: mol_type = other DNA
atgtctgtggccggcctgaagaagcagttccacaaggccagccagctgttcagcgagaagatcagcggggctgagggcaccaagctggatgatgagttcctggacatggagaggaagattgatgtgaccaacaaggtggtggccgagatcctgagcaagaccacagagtacctgcagcccaacccagcctaccgggccaagctgggcatgctgaacacagtgtccaagatccggggccaggtgaagaccaccggctacccccagacagagggcctgctgggggactgcatgctgaagtatggcaaggagctgggggaggacagcacctttggaaatgccctgattgaggtgggggagagcatgaagctgatggccgaggtgaaggacagcctggacatcaacgtgaagcagaccttcatcgaccccctgcagctgctgcaggacaaggacctgaaggagatcggccaccacctgaagaagctggagggccggcggctggactatgactacaagaagaagagggtgggcaagatcccagatgaggaggtgcggcaggccgtggagaagtttgaggagagcaaggagctggccgagaggtccatgttcaacttcctggagaatgatgtggagcaggtgtcccagctggccgtgttcattgaagctgccctggactaccaccggcagagcacagagatcctgcaggagctgcagagcaagctgcagatgaggatctctgctgccagctctgtgccccggcgggagtacaagcccaggcctgtgaagaggagcagcagcgagctgaatggagtgtccaccacctctgtggtgaagaccacagcctacagccggctggagcctgctgactag

SEQ ID NO: 169620 - DNA, 1662 bp, synthetic construct
  misc_feature 1..1662: note = Description of Artificial Sequence: Synthetic coding sequence
  source 1..1662: mol_type = other DNA
atggtggaggccatcgtggagtttgactaccaggcccagcatgatgatgagctgaccatctctgtgggggagatcatcaccaacatcaggaaggaggatggcggctggtgggagggccagatcaatggccggcggggcctcttcccagacaactttgtgcgggagatcaagaaggagatgaagaaggaccccctgaccaacaaggcccctgagaagcccctgcacgaggtgcccagcggcaacagcctgctgagcagcgagaccatcctgcggaccaacaagagaggagagaggagaagaagacgctgccaggtggccttctcctacctgccccagaatgatgatgagctggagctgaaggtgggggacatcatcgaggtggtgggggaggtggaggagggctggtgggagggcgtgctgaatggcaagacaggcatgttccccagcaacttcatcaaggagctgagcggggagagtgatgagctgggcatcagccaggatgagcagctgagcaagagcaggcctgagggcctgcccccagccagcctgctgcccttccctgcccatggagccaagggcaagaccacctttgagggcaccatcctgtacagagctgcccctgggaagacagagggccaccggcgctactacagcctgcgggagaccactggaagtgaaagtgatggaggagacagcagcagcaccaagtctgagggcgccaatggaacagtggccacagctgccatccagcccaagaaggtgaagggcgtgggctttggagacatcttcaaggacaagcccatcaagctgcggcccaggagcattgaggtggagaatgacttcctgcctgtggagaagaccatcggcaagaagctgcctgccaccacagccaccccagacagcagcaagacagagatggacagcaggaccaagagcaaggactactgcaaggtgatcttcccctatgaggcccagaatgatgatgagctgaccatcaaggagggggacatcgtgaccctcatcaacaaggactgcattgatgtgggctggtgggagggggagctgaatggccggcggggcgtcttcccagacaactttgtgaagctgctgcccccagactttgagaaggagggcaaccggcccaagaagcccccaccacccagcgcccctgtgatcaagcagggcgccggcaccacagagaggaagcatgagatcaagaagatccccccagagaggcctgagatgctgcccaacagaacagaggagaaggagaggcctgagcgggagcccaagctggacctgcagaagcccagcgtgcctgccatcccccccaagaagcccaggcctcccaagaccaacagcctgagcaggcctggggccctgcccccccggcggcctgagaggcctgtgggccccctgacccacacccgctactgctgtgccctgaccagcggggccggcgtgggctggctgtggaaggagcaccggcggggcacagactgccaccggccctgggaggagggccgcggggagggcggggcccaggccagcctgctgcaccccccagccaagctgtctgaggacaccggccacttctgcccctgcagctgcacccaggccggcgtgtctgtgcggctgcggggagctgtgtgggtgtcctag

SEQ ID NO: 169621 - DNA, 1887 bp, synthetic construct
  misc_feature 1..1887: note = Description of Artificial Sequence: Synthetic coding sequence
  source 1..1887: mol_type = other DNA
atggaggtgtctgctgccaaggcccccagcgctgctgacctgtctgaaattgagatcaagaaggagatgaagaaggaccccctgaccaacaaggcccctgagaagcccctgcacgaggtgcccagcggcaacagcctgctgagcagcgagaccatcctgcggaccaacaagagaggagagaggagaagaagacgctgccaggtggccttctcctacctgccccagaatgatgatgagctggagctgaaggtgggggacatcatcgaggtggtgggggaggtggaggagggctggtgggagggcgtgctgaatggcaagacaggcatgttccccagcaacttcatcaaggagctgtctggagagagtgatgagctgggcatcagccaggatgagcagctgagcaagagcagcctgcgggagaccaccggcagcgagagtgatggaggagacagcagcagcaccaagtctgagggcgccaacggcaccgtggccacagctgccatccagcccaagaaggtgaagggcgtgggctttggagacatcttcaaggacaagcccatcaagctgcggcccaggagcattgaggtggagaatgacttcctgcctgtggagaagaccatcggcaagaagctgcctgccaccacagccaccccagacagcagcaagacagagatggacagcaggaccaagagcaaggactactgcaaggtgatcttcccctatgaggcccagaatgatgatgagctgaccatcaaggagggggacatcgtgaccctcatcaacaaggactgcattgatgtgggctggtgggagggggagctgaatggaagaagaggagtcttcccagacaactttgtgaagctgctgcccccagactttgagaaggagggcaaccggcccaagaagcccccacctccttctgcccctgtgatcaagcagggcgccggcaccacagagaggaagcatgagatcaagaagatccccccagagaggcctgagatgctgcccaacagaacagaggagaaggagaggcctgagcgggagcccaagctggacctgcagaagcccagcgtgcctgccatcccccccaagaagccccggccccccaagaccaacagcctgagcaggcctggggccctgcccccaagaagacctgagaggcctgtgggccccctgacccacaccaggggggacagccccaagattgacctggccggcagcagcctgagcggcatcctggacaaggacctgagtgacaggagcaatgacatcgacctggagggctttgattctgtggtgagcagcacagagaagctgagccaccccaccaccagccggcccaaggccaccggccggcggccccccagccagagcctgaccagcagcagcctgagcagcccagacatctttgacagccccagccctgaggaggacaaggaggagcacatcagcctggcccacagaggagtggatgccagcaagaagaccagcaagacagtgaccatcagccaggtgtctgacaacaaggccagcctgccccccaagccaggcaccatggctgctgggggcggcggccctgcccccctgagcagcgctgcccccagccccctgagcagcagcctgggcacagctggccaccgggccaacagccccagcctgtttggaacagagggcaagcccaagatggagcctgctgccagcagccaggccgctgtggaggagctgcggacccaggtgcgggagctgcggagcatcatcgagaccatgaaggaccagcagaagcgggagatcaagcagctgctgtctgagctggatgaggagaagaagatccggctgcggctgcagatggaggtgaatgacatcaagaaggccctgcagagcaagtag

SEQ ID NO: 169622 - DNA, 1953 bp, synthetic construct
  misc_feature 1..1953: note = Description of Artificial Sequence: Synthetic coding sequence
  source 1..1953: mol_type = other DNA
atgaagaaggaccccctgaccaacaaggcccctgagaagcccctgcacgaggtgcccagcggcaacagcctgctgagcagcgagaccatcctgcggaccaacaagagaggagagaggagaagaagacgctgccaggtggccttctcctacctgccccagaatgatgatgagctggagctgaaggtgggggacatcatcgaggtggtgggggaggtggaggagggctggtgggagggcgtgctgaatggcaagacaggcatgttccccagcaacttcatcaaggagctgtctggagagagtgatgagctgggcatcagccaggatgagcagctgagcaagagcaggcctgagggcctgcccccagccagcctgctgcccttccctgcccacggggccaagggcaagaccacctttgagggcaccatcctgtaccgggccgcccctgggaagacagagggccaccggcgctactacagcctgcgggagaccaccggcagcgagagtgatggaggagacagcagcagcaccaagtctgagggcgccaacggcaccgtggccacagctgccatccagcccaagaaggtgaagggcgtgggctttggagacatcttcaaggacaagcccatcaagctgcggcccaggagcattgaggtggagaatgacttcctgcctgtggagaagaccatcggcaagaagctgcctgccaccacagccaccccagacagcagcaagacagagatggacagcaggaccaagagcaaggactactgcaaggtgatcttcccctatgaggcccagaatgatgatgagctgaccatcaaggagggggacatcgtgaccctcatcaacaaggactgcattgatgtgggctggtgggagggggagctgaatggaagaagaggagtcttcccagacaactttgtgaagctgctgcccccagactttgagaaggagggcaaccggcccaagaagcccccacctccttctgcccctgtgatcaagcagggcgccggcaccacagagaggaagcatgagatcaagaagatccccccagagaggcctgagatgctgcccaacagaacagaggagaaggagaggcctgagcgggagcccaagctggacctgcagaagcccagcgtgcctgccatcccccccaagaagccccggccccccaagaccaacagcctgagcaggcctggggccctgcccccaagaagacctgagaggcctgtgggccccctgacccacaccaggggggacagccccaagattgacctggccggcagcagcctgagcggcatcctggacaaggacctgagtgacaggagcaatgacatcgacctggagggctttgattctgtggtgagcagcacagagaagctgagccaccccaccaccagccggcccaaggccaccggccggcggccccccagccagagcctgaccagcagcagcctgagcagcccagacatctttgacagccccagccctgaggaggacaaggaggagcacatcagcctggcccacagaggagtggatgccagcaagaagaccagcaagacagtgaccatcagccaggtgtctgacaacaaggccagcctgccccccaagccaggcaccatggctgctgggggcggcggccctgcccccctgagcagcgctgcccccagccccctgagcagcagcctgggcacagctggccaccgggccaacagccccagcctgtttggaacagagggcaagcccaagatggagcctgctgccagcagccaggccgctgtggaggagctgcggacccaggtgcgggagctgcggagcatcatcgagaccatgaaggaccagcagaagcgggagatcaagcagctgctgtctgagctggatgaggagaagaagatccggctgcggctgcagatggaggtgaatgacatcaagaaggccctgcagagcaagtag

SEQ ID NO: 169623 - DNA, 1284 bp, synthetic construct
  misc_feature 1..1284: note = Description of Artificial Sequence: Synthetic coding sequence
  source 1..1284: mol_type = other DNA
atgggagaggagaccatcggcaagaagctgcctgccaccacagccaccccagacagcagcaagacagagatggacagcaggaccaagagcaaggactactgcaaggtgatcttcccctatgaggcccagaatgatgatgagctgaccatcaaggagggggacatcgtgaccctcatcaacaaggactgcattgatgtgggctggtgggagggggagctgaatggccggcggggcgtcttcccagacaactttgtgaagctgctgcccccagactttgagaaggagggcaaccggcccaagaagcccccaccacccagcgcccctgtgatcaagcagggcgccggcaccacagagaggaagcatgagatcaagaagatccccccagagaggcctgagatgctgcccaacagaacagaggagaaggagaggcctgagcgggagcccaagctggacctgcagaagcccagcgtgcctgccatcccccccaagaagcccaggcctcccaagaccaacagcctgagcaggcctggggccctgcccccccggcggcctgagaggcctgtgggccccctgacccacaccaggggggacagccccaagattgacctggccggcagcagcctgagcggcatcctggacaaggacctgagtgacaggagcaatgacatcgacctggagggctttgacagcgtggtgagcagcacagagaagctgagccaccccaccaccagccggcccaaggccactggaagaagaccacccagccagagcctgaccagcagcagcctgagcagcccagacatctttgacagccccagccctgaggaggacaaggaggagcacatcagcctggcccaccggggcgtggatgccagcaagaagaccagcaagacagtgaccatcagccaggtgtctgacaacaaggccagcctgccccccaagccaggcaccatggccgccggcggcggcggccctgcccccctgagcagcgctgcccccagccccctgagcagcagcctgggcacagctggccaccgggccaacagccccagcctgtttggaacagagggcaagcccaagatggagcctgctgccagcagccaggccgctgtggaggagctgcggacccaggtgcgggagctgcggagcatcatcgagaccatgaaggaccagcagaagcgggagatcaagcagctgctgtctgagctggatgaggagaagaagatccggctgcggctgcagatggaggtgaatgacatcaagaaggccctgcagagcaagtag

SEQ ID NO: 169624 - DNA, 1938 bp, synthetic construct
  misc_feature 1..1938: note = Description of Artificial Sequence: Synthetic coding sequence
  source 1..1938: mol_type = other DNA
ctgaccaacaaggcccctgagaagcccctgcacgaggtgcccagcggcaacagcctgctgagcagcgagaccatcctgcggaccaacaagagaggagagaggagaagaagacgctgccaggtggccttctcctacctgccccagaatgatgatgagctggagctgaaggtgggggacatcatcgaggtggtgggggaggtggaggagggctggtgggagggcgtgctgaatggcaagacaggcatgttccccagcaacttcatcaaggagctgagcggggagagtgatgagctgggcatcagccaggatgagcagctgagcaagagcaggcctgagggcctgcccccagccagcctgctgcccttccctgcccatggagccaagggcaagaccacctttgagggcaccatcctgtacagagctgcccctgggaagacagagggccaccggcgctactacagcctgcgggagaccactggaagtgaaagtgatggaggagacagcagcagcaccaagtctgagggcgccaatggaacagtggccacagctgccatccagcccaagaaggtgaagggcgtgggctttggagacatcttcaaggacaagcccatcaagctgcggcccaggagcattgaggtggagaatgacttcctgcctgtggagaagaccatcggcaagaagctgcctgccaccacagccaccccagacagcagcaagacagagatggacagcaggaccaagagcaaggactactgcaaggtgatcttcccctatgaggcccagaatgatgatgagctgaccatcaaggagggggacatcgtgaccctcatcaacaaggactgcattgatgtgggctggtgggagggggagctgaatggccggcggggcgtcttcccagacaactttgtgaagctgctgcccccagactttgagaaggagggcaaccggcccaagaagcccccaccacccagcgcccctgtgatcaagcagggcgccggcaccacagagaggaagcatgagatcaagaagatccccccagagaggcctgagatgctgcccaacagaacagaggagaaggagaggcctgagcgggagcccaagctggacctgcagaagcccagcgtgcctgccatcccccccaagaagcccaggcctcccaagaccaacagcctgagcaggcctggggccctgcccccccggcggcctgagaggcctgtgggccccctgacccacaccaggggggacagccccaagattgacctggccggcagcagcctgagcggcatcctggacaaggacctgagtgacaggagcaatgacatcgacctggagggctttgacagcgtggtgagcagcacagagaagctgagccaccccaccaccagccggcccaaggccactggaagaagaccacccagccagagcctgaccagcagcagcctgagcagcccagacatctttgacagccccagccctgaggaggacaaggaggagcacatcagcctggcccaccggggcgtggatgccagcaagaagaccagcaagacagtgaccatcagccaggtgtctgacaacaaggccagcctgccccccaagccaggcaccatggccgccggcggcggcggccctgcccccctgagcagcgctgcccccagccccctgagcagcagcctgggcacagctggccaccgggccaacagccccagcctgtttggaacagagggcaagcccaagatggagcctgctgccagcagccaggccgctgtggaggagctgcggacccaggtgcgggagctgcggagcatcatcgagaccatgaaggaccagcagaagcgggagatcaagcagctgctgtctgagctggatgaggagaagaagatccggctgcggctgcagatggaggtgaatgacatcaagaaggccctgcagagcaagtag

SEQ ID NO: 169625 - DNA, 450 bp, synthetic construct
  misc_feature 1..450: note = Description of Artificial Sequence: Synthetic coding sequence
  source 1..450: mol_type = other DNA
tttgagaccagcgagaggagaagaagacgctgccaggtggccttctcctacctgccccagaatgatgatgagctggagctgaaggtgggggacatcatcgaggtggtgggggaggtggaggagggctggtgggagggcgtgctgaatggcaagacaggcatgttccccagcaacttcatcaaggagctgagcggggagagtgatgagctgggcatcagccaggatgagcagctgagcaagagcagcctgcgggagaccactggaagtgaaagtgatggaggagacagcagcagcaccaagtctgagggcgccaatggaacagtggccacagctgccatccagcccaagaaggtgaagggcgtgggctttggagacatcttcaaggacaagcccatcaagctgcggcccaggagcattgaggtggagaatgacttcctgcctgtggagtag

SEQ ID NO: 169626 - DNA, 1998 bp, synthetic construct
  misc_feature 1..1998: note = Description of Artificial Sequence: Synthetic coding sequence
  source 1..1998: mol_type = other DNA
atggtggaggccatcgtggagtttgactaccaggcccagcatgatgatgagctgaccatctctgtgggggagatcatcaccaacatcaggaaggaggatggcggctggtgggagggccagatcaatggccggcggggcctcttcccagacaactttgtgcgggagatcaagaaggagatgaagaaggaccccctgaccaacaaggcccctgagaagcccctgcacgaggtgcccagcggcaacagcctgctgagcagcgagaccatcctgcggaccaacaagagaggagagaggagaagaagacgctgccaggtggccttctcctacctgccccagaatgatgatgagctggagctgaaggtgggggacatcatcgaggtggtgggggaggtggaggagggctggtgggagggcgtgctgaatggcaagacaggcatgttccccagcaacttcatcaaggagctgagcggggagagtgatgagctgggcatcagccaggatgagcagctgagcaagagcagcctgcgggagaccactggaagtgaaagtgatggaggagacagcagcagcaccaagtctgagggcgccaatggaacagtggccacagctgccatccagcccaagaaggtgaagggcgtgggctttggagacatcttcaaggacaagcccatcaagctgcggcccaggagcattgaggtggagaatgacttcctgcctgtggagaagaccatcggcaagaagctgcctgccaccacagccaccccagacagcagcaagacagagatggacagcaggaccaagagcaaggactactgcaaggtgatcttcccctatgaggcccagaatgatgatgagctgaccatcaaggagggggacatcgtgaccctcatcaacaaggactgcattgatgtgggctggtgggagggggagctgaatggccggcggggcgtcttcccagacaactttgtgaagctgctgcccccagactttgagaaggagggcaaccggcccaagaagcccccaccacccagcgcccctgtgatcaagcagggcgccggcaccacagagaggaagcatgagatcaagaagatccccccagagaggcctgagatgctgcccaacagaacagaggagaaggagaggcctgagcgggagcccaagctggacctgcagaagcccagcgtgcctgccatcccccccaagaagcccaggcctcccaagaccaacagcctgagcaggcctggggccctgcccccccggcggcctgagaggcctgtgggccccctgacccacaccaggggggacagccccaagattgacctggccggcagcagcctgagcggcatcctggacaaggacctgagtgacaggagcaatgacatcgacctggagggctttgacagcgtggtgagcagcacagagaagctgagccaccccaccaccagccggcccaaggccactggaagaagaccacccagccagagcctgaccagcagcagcctgagcagcccagacatctttgacagccccagccctgaggaggacaaggaggagcacatcagcctggcccaccggggcgtggatgccagcaagaagaccagcaagacagtgaccatcagccaggtgtctgacaacaaggccagcctgccccccaagccaggcaccatggccgccggcggcggcggccctgcccccctgagcagcgctgcccccagccccctgagcagcagcctgggcacagctggccaccgggccaacagccccagcctgtttggaacagagggcaagcccaagatggagcctgctgccagcagccaggccgctgtggaggagctgcggacccaggtgcgggagctgcggagcatcatcgagaccatgaaggaccagcagaagcgggagatcaagcagctgctgtctgagctggatgaggagaagaagatccggctgcggctgcagatggaggtgaatgacatcaagaaggccctgcagagcaagtag

SEQ ID NO: 169627 - DNA, 450 bp, synthetic construct
  misc_feature 1..450: note = Description of Artificial Sequence: Synthetic coding sequence
  source 1..450: mol_type = other DNA
atggagaggtctgagaggagaagaagacgctgccaggtggccttctcctacctgccccagaatgatgatgagctggagctgaaggtgggggacatcatcgaggtggtgggggaggtggaggagggctggtgggagggcgtgctgaatggcaagacaggcatgttccccagcaacttcatcaaggagctgagcggggagagtgatgagctgggcatcagccaggatgagcagctgagcaagagcagcctgcgggagaccactggaagtgaaagtgatggaggagacagcagcagcaccaagtctgagggcgccaatggaacagtggccacagctgccatccagcccaagaaggtgaagggcgtgggctttggagacatcttcaaggacaagcccatcaagctgcggcccaggagcattgaggtggagaatgacttcctgcctgtggagtag

SEQ ID NO: 169628 - DNA, 627 bp, synthetic construct
  misc_feature 1..627: note = Description of Artificial Sequence: Synthetic coding sequence
  source 1..627: mol_type = other DNA
atggagatcaagaaggagatgaagaaggaccccctgaccaacaaggcccctgagaagcccctgcacgaggtgcccagcggcaacagcctgctgagcagcgagaccatcctgcggaccaacaagagaggagagaggagaagaagacgctgccaggtggccttctcctacctgccccagaatgatgatgagctggagctgaaggtgggggacatcatcgaggtggtgggggaggtggaggagggctggtgggagggcgtgctgaatggcaagacaggcatgttccccagcaacttcatcaaggagctgtctggagagagtgatgagctgggcatcagccaggatgagcagctgagcaagagcagcctgcgggagaccaccggcagcgagagtgatggaggagacagcagcagcaccaagtctgagggcgccaacggcaccgtggccacagctgccatccagcccaagaaggtgaagggcgtgggctttggagacatcttcaaggacaagcccatcaagctgcggcccaggagcattgaggtggagaatgacttcctgcctgtggagaagaccatcggcaagaagctgcctgccaccacagccaccccagacagcagcaagacagaatag

SEQ ID NO: 169629 - DNA, 1215 bp, synthetic construct
  misc_feature 1..1215: note = Description of Artificial Sequence: Synthetic coding sequence
  source 1..1215: mol_type = other DNA
atggacagcaggaccaagagcaaggactactgcaaggtgatcttcccctatgaggcccagaatgatgatgagctgaccatcaaggagggggacatcgtgaccctcatcaacaaggactgcattgatgtgggctggtgggagggggagctgaatggaagaagaggagtcttcccagacaactttgtgaagctgctgcccccagactttgagaaggagggcaaccggcccaagaagcccccacctccttctgcccctgtgatcaagcagggcgccggcaccacagagaggaagcatgagatcaagaagatccccccagagaggcctgagatgctgcccaacagaacagaggagaaggagaggcctgagcgggagcccaagctggacctgcagaagcccagcgtgcctgccatcccccccaagaagccccggccccccaagaccaacagcctgagcaggcctggggccctgcccccaagaagacctgagaggcctgtgggccccctgacccacaccaggggggacagccccaagattgacctggccggcagcagcctgagcggcatcctggacaaggacctgagtgacaggagcaatgacatcgacctggagggctttgattctgtggtgagcagcacagagaagctgagccaccccaccaccagccggcccaaggccaccggccggcggccccccagccagagcctgaccagcagcagcctgagcagcccagacatctttgacagccccagccctgaggaggacaaggaggagcacatcagcctggcccacagaggagtggatgccagcaagaagaccagcaagacagtgaccatcagccaggtgtctgacaacaaggccagcctgccccccaagccaggcaccatggctgctgggggcggcggccctgcccccctgagcagcgctgcccccagccccctgagcagcagcctgggcacagctggccaccgggccaacagccccagcctgtttggaacagagggcaagcccaagatggagcctgctgccagcagccaggccgctgtggaggagctgcggacccaggtgcgggagctgcggagcatcatcgagaccatgaaggaccagcagaagcgggagatcaagcagctgctgtctgagctggatgaggagaagaagatccggctgcggctgcagatggaggtgaatgacatcaagaaggccctgcagagcaagtag

SEQ ID NO: 169630 - DNA, 456 bp, synthetic construct
  misc_feature 1..456: note = Description of Artificial Sequence: Synthetic coding sequence
  source 1..456: mol_type = other DNA
atgaactgggccccagccacctgctgggccctgctgctggccgccgccttcctgtgtgacagcggggccgccaagggcggccggggcggggcccggggcagcgcccggggcggcgtgcggggcggggcccggggggccagccgggtgcgggtgcggcctgcccagagatatggagcccctggcagcagcctgcgggtggccgctgctggagctgctgctggagctgctgctggagctgctgctggcctggccgccggcagcggctggaggagagctgctggccctggagagcggggcctggaggatgaggaggatggagtgcctggaggaaatggaactggacctggcatctacagctaccgggcctggaccagcggggccggccccacccggggcccccggctgtgcctggtgctgggcggggccctgggcgccctgggcctgctgcggccctag

SEQ ID NO: 169631 - DNA, 456 bp, synthetic construct; identical to SEQ ID NO: 169630
  misc_feature 1..456: note = Description of Artificial Sequence: Synthetic coding sequence
  source 1..456: mol_type = other DNA

SEQ ID NO: 169632 - DNA, 981 bp, synthetic construct
  misc_feature 1..981: note = Description of Artificial Sequence: Synthetic coding sequence
  source 1..981: mol_type = other DNA
atggcccctcctgctggaggagctgctgctgctgccagtgacctgggcagcgctgctgtgctgctggccgtgcacgccgctgtgcggcccctgggcgccggcccagatgctgaggcccagctgcggcggctgcagctgtctgctgaccctgagaggcctggccgcttccggctggagctgctgggcgccggccctggagctgtgaacctggagtggcccctggagagcgtgtcctacaccatccggggccccacccagcacgagctgcagcccccacctgggggccctggcaccctgagcctgcacttcctgaacccccaggaggcccagcgctgggccgtgctggtgcggggggccaccgtggagggccagaatggcagcaagagcaacagccccccagccctgggccctgaggcctgccctgtgtccctgcccagccccccagaggccagcaccctgaagggccccccacctgaggccgacctgcccaggagccctggcaacctgacagagcgggaggagctggccggcagcctggcccgggccatcgctggaggagatgagaagggagctgcccaggtggccgctgtgctggcccagcaccgggtggccctgtctgtgcagctgcaggaggcctgcttccccccaggccccatccggctgcaggtgaccctggaggatgctgccagcgctgccagcgctgccagcagcgcccacgtggccctgcaggtgcacccccactgcaccgtggccgccctgcaggagcaggtgttttctgagctgggcttccccccagctgtgcagcgctgggtgattggccgctgcctgtgtgtgcctgagaggagcctggccagctatggagtgcggcaggatggagaccctgccttcctgtacctgctgagcgccccccgggaggccccagcccagctggtgctgtccttcctgcacctgcaccagtgccccaggcctccctggctgtag

SEQ ID NO: 169633 - DNA, 1164 bp, synthetic construct
  misc_feature 1..1164: note = Description of Artificial Sequence: Synthetic coding sequence
  source 1..1164: mol_type = other DNA
atggcccctcctgctggaggagctgctgctgctgccagtgacctgggcagcgctgctgtgctgctggccgtgcacgccgctgtgcggcccctgggcgccggcccagatgctgaggcccagctgcggcggctgcagctgtctgctgaccctgagaggcctggccgcttccggctggagctgctgggcgccggccctggagctgtgaacctggagtggcccctggagagcgtgtcctacaccatccggggccccacccagcacgagctgcagcccccacctgggggccctggcaccctgagcctgcacttcctgaacccccaggaggcccagcgctgggccgtgctggtgcggggggccaccgtggagggccagaatggcagcaagagcaacagccccccagccctgggccctgaggcctgccctgtgtccctgcccagccccccagaggccagcaccctgaagggccccccacctgaggccgacctgcccaggagccctggcaacctgacagagcgggaggagctggccggcagcctggcccgggccatcgctggaggagatgagaagggagctgcccaggtggccgctgtgctggcccagcaccgggtggccctgtctgtgcagctgcaggaggcctgcttccccccaggccccatccggctgcaggtgaccctggaggatgctgccagcgctgccagcgctgccagcagcgcccacgtggccctgcaggtgcacccccactgcaccgtggccgccctgcaggagcaggtgttttctgagctgggcttccccccagctgtgcagcgctgggtgattggccgctgcctgtgtgtgcctgagaggagcctggccagctatggagtgcggcaggatggagaccctgccttcctgtacctgctgagcgccccccgggaggccccagccaccggccccagcccccagcacccccagaagatggatggagagctgggccgcctcttcccccccagcctgggcctgcccccaggcccccagcctgctgccagcagcctgcccagccccctgcagcccagctggagctgccccagctgcaccttcatcaatgccccagaccggcccggctgtgagatgtgcagcacccagaggccctgcacctgggaccccctggccgccgccagcacctag

SEQ ID NO: 169634 - DNA, 2019 bp, synthetic construct
  misc_feature 1..2019: note = Description of Artificial Sequence: Synthetic coding sequence
  source 1..2019: mol_type = other DNA
atggctgatggcagcctgactggaggcggcctggaggccgccgccatggcccctgagaggatgggctgggccgtggagcaggagctggccagcctggagaagggcctcttccaggatgaggacagctgcagcgactgcagctacagagacaagccaggcagcagcctgcagagcttcatgcctgagggcaagaccttcttccctgagatcttccagaccaaccagctgctcttctatgagcgcttccgggcctaccaggactacatcctggccgactgcaaggccagcgaggtgcaggagttcaccgctgagttcctggagaaggtgctggagcccagcggctggagggctgtgtggcacaccaacgtgttcaaggtgctggtggagatcacagatgtggactttgctgccctgaaggctgtggtgcggctggccgagccctacctgtgtgacagccaggtgtccaccttcaccatggagtgcatgaaggagctgctggacctgaaggagcaccggctgcccctgcaggagctgtgggtggtgtttgatgattctggagtgtttgaccagacagccctggccattgaacatgtgcgcttcttctaccagaacatctggaggtcctgggatgaggaggaggaggatgaatatgactactttgtgcgctgtgtggagccccggctgcggctgcactatgacatcctggaggacagagtgcccagcggcctcatcgtggactaccacaacctgctgagccagtgtgaggagagctacaggaagttcctgaacctgcggagcagcctgagcaactgcaacagcgacagcgagcaggagaacatctccatggtggagggcctgaagctgtacagcgagatggagcagctgaagcagaagctgaagctgattgagaaccccctgctgcgctacgtgtttggctaccagaagaacagcaacatccaggccaagggcgtgcgcagcagcggccagaagatcacccacgtggtgagcagcaccatgatggccggcctgctgcggagcctgctgacagaccggctgtgccaggagcccggggaggaggagcgggagatccagttccacagcgaccccctgagcgccatcaatgcctgctttgaaggagacacagtgattgtgtgccccggccactacgtggtgcacggcaccttcagcattgctgacagcattgagctggagggctacggcctgcctgatgacatcgtcatcgagaagagaggaaaaggagacacctttgtggactgcacaggagctgacatcaagatcagcggcatcaagtttgtgcagcatgatgctgtggagggcatcctgattgtgcaccggggcaagaccaccctggagaactgtgtgctgcagtgtgagaccactggagtgacagtgaggaccagcgctgagttcctgatgaagaacagcgacctgtatggagccaagggggccggcatcgagatctacccaggcagccagtgcaccctgagtgacaatggcatccaccactgcaaggagggcatcctgatcaaggacttcctggatgagcactatgacatccccaagatctccatggtgaacaacatcatccacaacaatgaaggctacggcgtggtgctggtgaagcccaccatcttcagtgacctgcaggagaatgcagaagatggaacagaggagaacaaggccctgaagatccagaccagcggggagccagatgtggccgagcgggtggacctggaggagctgattgaatgtgccaccgggaagatggagctgtgtgccaggacagaccccagcgagcaggtggagggcaactgtgagatcgtgaatgagctgattgctgccagcacccagaagggccagatcaagaagaagaggctgtctgagctgggcatcacccaggctgatgacaacctgatgagccaggagatgtttgtgggcatcgtgggcaaccagttcaagtggaatggcaagggcagctttggcaccttcctgttctag

SEQ ID NO: 169635 - DNA, 723 bp, synthetic construct
  misc_feature 1..723: note = Description of Artificial Sequence: Synthetic coding sequence
  source 1..723: mol_type = other DNA
atgacagcccctgtgcctgccccccgcatcctgctgcccctgctgctgctgctgctgctgaccccacctcctggggcccggggggaggtgtgcatggccagccggggcctgagcctcttccctgagagctgcccagacttctgctgcggcacctgtgatgaccagtactgctgcagtgatgtgctgaagaagtttgtgtggagcgaggagcgctgtgctgtgcctgaggcctctgtgcctgcctctgtggagcctgtggagcagctgggcagcgccctgcgcttccggcccggctacaatgaccccatgagcggctttggagccaccctggccgtgggcctgaccatctttgtgctgtctgtggtgaccatcatcatctgcttcacctgcagctgctgctgcctgtacaagacctgccggcggcccaggcctgtggtgaccaccaccaccagcaccaccgtggtgcacgccccctacccccagccccccagcgtgccccccagctacccaggccccagctaccagggctaccacaccatgccaccccagcccggcatgcctgctgccccctaccccatgcagtaccccccaccctacccagcccagcccatgggccccccagcctaccacgagaccctggccggcggggccgccgccccctacccagccagccagcccccctacaacccagcctacatggatgcccccaaggccgccctgtag

SEQ ID NO: 169636 - DNA, 339 bp, synthetic construct
  misc_feature 1..339: note = Description of Artificial Sequence: Synthetic coding sequence
  source 1..339: mol_type = other DNA
atggccagccggggcctgagcctcttccctgagagctgcccagacttctgctgcggcacctgtgatgaccagtactgctgcagtgatgtgctgaagaagtttgtgtggagcgaggagcgctgtgctgtgcctgaggcctctgtgcctgcctctgtggagcctgtggagcagctgggcagcgccctgcgcttccggcccggctacaatgaccccatgagcggctttggagccaccctggccgtgggcctgaccatctttgtgctgtctgtggtgaccatcatcatctgcttcacctgcagctgctgctgcctgtacaagacctgcagaagacccaggtag

SEQ ID NO: 169637 - DNA, 414 bp, synthetic construct
  misc_feature 1..414: note = Description of Artificial Sequence: Synthetic coding sequence
  source 1..414: mol_type = other DNA
atgggctttggagccaccctggccgtgggcctgaccatctttgtgctgtctgtggtgaccatcatcatctgcttcacctgcagctgctgctgcctgtacaagacctgcagaagacccaggcctgtggtgaccaccaccaccagcaccaccgtggtgcacgccccctacccccagcccccatctgtgcccccatcctacccaggccccagctaccagggctaccacaccatgccaccccagcccggcatgcctgctgccccctaccccatgcagtaccccccaccctacccagcccagcccatgggccccccagcctaccacgagaccctggccggcggcgctgctgccccctacccagccagccagcccccctacaacccagcctacatggatgcccccaaggccgccctgtag

SEQ ID NO: 169638 - DNA, 630 bp, synthetic construct
  misc_feature 1..630: note = Description of Artificial Sequence: Synthetic coding sequence
  source 1..630: mol_type = other DNA
atggccagccggggcctgagcctcttccctgagagctgcccagacttctgctgcggcacctgtgatgaccagtactgctgcagtgatgtgctgaagaagtttgtgtggagcgaggagcgctgtgctgtgcctgaggcctctgtgcctgcctctgtggagcctgtggagcagctgggcagcgccctgcgcttccggcccggctacaatgaccccatgagcggctttggagccaccctggccgtgggcctgaccatctttgtgctgtctgtggtgaccatcatcatctgcttcacctgcagctgctgctgcctgtacaagacctgcagaagacccaggcctgtggtgaccaccaccaccagcaccaccgtggtgcacgccccctacccccagcccccatctgtgcccccatcctacccaggccccagctaccagggctaccacaccatgccaccccagcccggcatgcctgctgccccctaccccatgcagtaccccccaccctacccagcccagcccatgggccccccagcctaccacgagaccctggccggcggcgctgctgccccctacccagccagccagcccccctacaacccagcctacatggatgcccccaaggccgccctgtag

SEQ ID NO: 169639 - DNA, 630 bp, synthetic construct; identical to SEQ ID NO: 169638
  misc_feature 1..630: note = Description of Artificial Sequence: Synthetic coding sequence
  source 1..630: mol_type = other DNA

SEQ ID NO: 169640 - DNA, 513 bp, synthetic construct
  misc_feature 1..513: note = Description of Artificial Sequence: Synthetic coding sequence
  source 1..513: mol_type = other DNA
atgccaccccagcccggctgccagcagcaccccacccagtgcagcacccaccacctgacccagcccagcccctgggcccaccggcccaccacccggccctggctggaggagcagccccggcccaccccaccagccagcctgctgaccacccggcccacctggatgccccggggcggccccctgagcatcccctggcccctgtggctgcccctgggctacgtggtgtgtgtgcgggagtggtgtgccggggctgtgccctatgccccctgtgtgctgtgtgtgtcctgcctgtacatgtggctgcccctgatgctgacccgctggggcaccatcctggcccgggtgggctgggaccagaccctcttcagcagcagccctgagatcatgctgcccaagatcagcagccagacccagaggatgggctggtggggcgccccctgtgaggtggcccctgagcgctggggccccctgcagggcaccagcggcgtgctgctgcagctgaccctgggctag

SEQ ID NO: 169641 - DNA, 666 bp, synthetic construct
  misc_feature 1..666: note = Description of Artificial Sequence: Synthetic coding sequence
  source 1..666: mol_type = other DNA
atgagaagagtgctgcggctgctgctgggctgcttcctgacagagctgtgtgcccgggtgtgccgggcccaggagagagctggccacggccagctggcccagctgggcggcgtgctgctgctggccggcggcaacagaagtggagctgccagcggggaggccagcgagggcgctgaggccagtgatgccccacccacccgggcccccaccccagacttctgccggggctactttgatgtgatgggccagtgggacccccccttcaactgcagcagcggggacttcatcttctgctgcggcacctgtggcttccgcttctgctgcaccttcaagaagaggcggctgaaccagagcacctgcaccaactatgacacccccctgtggctgaacacaggcaagcccccagccaggaaggatgaccccctgcatgaccccaccaaggacaagaccaacctgattgtgtacatcatctgtggggtggtggccgtgatggtgctggtgggcatcttcaccaagctgggcctggagaaggcccaccggccccagcgggagcacatgagccggctgtatgacaacctgctcttcatggaggcccagatctccttccaggaggatgagcccgcccctggagagtggagcgtgggcctgcagacctggacagtgtag

SEQ ID NO: 169642 - DNA, 1275 bp, synthetic construct
  misc_feature 1..1275: note = Description of Artificial Sequence: Synthetic coding sequence
  source 1..1275: mol_type = other DNA
atgagaagagtgctgcggctgctgctgggctgcttcctgacagagctgtgtgcccgggtgtgccgggcccaggagagagctggccacggccagctggcccagctgggcggcgtgctgctgctggccggcggcaacagaagtggagctgccagcggggaggccagcgagggcgctgaggccagtgatgccccacccacccgggcccccaccccagacttctgccggggctactttgatgtgatgggccagtgggacccccccttcaactgcagcagcggggacttcatcttctgctgcggcacctgtggcttccgcttctgctgcaccttcaagaagaggcggctgaaccagagcacctgcaccaactatgacacccccctgtggctgaacacaggcaagcccccagccaggaaggatgaccccctgcatgaccccaccaaggacaagaccaacctgattgtgtacatcatctgtggggtggtggccgtgatggtgctggtgggcatcttcaccaagctgggcctggagaaggcccaccggccccagcgggagcacatgagccgggccctggctgatgtgatgaggccccagggccactgcaacacagaccacatggagcgggacctgaacatcgtggtgcacgtgcagcactatgagaacatggacaccaggacccccatcaacaacctgcacgccacccagatgaacaatgctgtgcccaccagccccctgctgcagcagatgggccacccccacagctaccccaacctgggccagatcagcaacccctatgagcagcagcccccaggcaaggagctgaacaagtatgccagcctgaaggctgtgggcagcagtgatggagactgggccgtgtccaccctgaagagccccaaggctgacaaggtgaatgatgacttctacaccaagaggaggcacctggccgagctggccgccaagggcaacctgcccctgcaccctgtgcgggtggaggatgagccccgggccttcagccctgagcacggccctgccaagcagaatggccagaagagcaggaccaacaagatgccaccccaccccctggcctacaccagcaccaccaacttcaagggctgggaccccaatgagcagagcctgcggcggcaggcctacagcaacaagggcaagctgggcacagctgagaccggcagcagtgaccccctgggcacccggccccagcactaccccccaccccagccctacttcatcaccaacagcaagacagaggtgacagtgtag

SEQ ID NO: 169643 - DNA, 789 bp, synthetic construct
  misc_feature 1..789: note = Description of Artificial Sequence: Synthetic coding sequence
  source 1..789: mol_type = other DNA
atgtgtggcccccggcggctggccgcccctggcagcagcctgggcagctttggccgggccagcagaggaggaagaagaggcagcagcggcggccgggctgctgagcccggcctgggggacaccatgagaagagtgctgcggctgctgctgggctgcttcctgacagagctgtgtgcccgggtgtgccgggcccaggagcgggccggccacggccagctggcccagctgggcggcgtgctgctgctggccggcggcaacagaagtggggccgccagcggggaggccagcgagggcgctgaggccagtgatgccccacccacccgggcccccaccccagacttctgccggggctactttgatgtgatgggccagtgggacccccccttcaactgcagcagcggggacttcatcttctgctgcggcacctgtggcttccgcttctgctgcaccttcaagaagaggcggctgaaccagagcacctgcaccaactatgacacccccctgtggctgaacacaggcaagcccccagccaggaaggatgaccccctgcatgaccccaccaaggacaagaccaacctgattgtgtacatcatctgtggggtggtggccgtgatggtgctggtgggcatcttcaccaagctgggcctggagaaggcccaccggccccagcgggagcacatgagccggctgtatgacaacctgctcttcatggaggcccagatctccttccaggaggatgagcccgcccctggagagtggagcgtgggcctgcagacctggacagtgtag

SEQ ID NO: 169644 - DNA, 1398 bp, synthetic construct
  misc_feature 1..1398: note = Description of Artificial Sequence: Synthetic coding sequence
  source 1..1398: mol_type = other DNA
atgtgtggcccccggcggctggccgcccctggcagcagcctgggcagctttggccgggccagcagaggaggaagaagaggcagcagcggcggccgggctgctgagcccggcctgggggacaccatgagaagagtgctgcggctgctgctgggctgcttcctgacagagctgtgtgcccgggtgtgccgggcccaggagcgggccggccacggccagctggcccagctgggcggcgtgctgctgctggccggcggcaacagaagtggggccgccagcggggaggccagcgagggcgctgaggccagtgatgccccacccacccgggcccccaccccagacttctgccggggctactttgatgtgatgggccagtgggacccccccttcaactgcagcagcggggacttcatcttctgctgcggcacctgtggcttccgcttctgctgcaccttcaagaagaggcggctgaaccagagcacctgcaccaactatgacacccccctgtggctgaacacaggcaagcccccagccaggaaggatgaccccctgcatgaccccaccaaggacaagaccaacctgattgtgtacatcatctgtggggtggtggccgtgatggtgctggtgggcatcttcaccaagctgggcctggagaaggcccaccggccccagcgggagcacatgagccgggccctggctgatgtgatgaggccccagggccactgcaacacagaccacatggagcgggacctgaacatcgtggtgcacgtgcagcactatgagaacatggacaccaggacccccatcaacaacctgcacgccacccagatgaacaatgctgtgcccaccagccccctgctgcagcagatgggccacccccacagctaccccaacctgggccagatcagcaacccctatgagcagcagcccccaggcaaggagctgaacaagtatgccagcctgaaggctgtgggcagcagtgatggagactgggccgtgtccaccctgaagagccccaaggctgacaaggtgaatgatgacttctacaccaagagaagacacctggccgagctggccgccaagggcaacctgcccctgcaccctgtgcgggtggaggatgagccccgggccttcagccctgagcacggccctgccaagcagaatggccagaagagcaggaccaacaagatgccaccccaccccctggcctacaccagcaccaccaacttcaagggctgggaccccaatgagcagagcctgcggcggcaggcctacagcaacaagggcaagctgggcacagctgagaccggcagcagtgaccccctgggcacccggccccagcactaccccccaccccagccctacttcatcaccaacagcaagacagaggtgacagtgtag

SEQ ID NO: 169645 - DNA, 678 bp, synthetic construct
  misc_feature 1..678: note = Description of Artificial Sequence: Synthetic coding sequence
  source 1..678: mol_type = other DNA
atggaggagctgacagcctttgtgtccaagagctttgaccagaagagcaaggatggaaatggaggcggcggcggcggcggcggcaagaaggacagcatcacctaccgggaggtgctggagagcggcctggcccggagccgggagctgggcaccagtgacagcagcctgcaggacatcacagagggcggcggccactgccctgtgcacctgttcaaggaccacgtggacaatgacaaggagaagctgaaggagtttggaacagcccgggtggccgagggcatctatgagtgcaaggagaagcgggaggatgtgaagtcagaagatgaagatggccagaccaagctgaagcagaggaggagcaggaccaacttcaccctggagcagctgaatgagctggagcggctgtttgatgagacccactacccagatgccttcatgagggaggagctgagccagaggctgggcctgtctgaggcccgggtgcaggtgtggttccagaacagaagagccaagtgcaggaagcaggagaaccagatgcacaagggcgtcatcctgggcacagccaaccacctggatgcctgccgggtggccccctacgtgaacatgggcgccctgaggatgcccttccagcagatggagttctgcagctgcaggcctggctggagcatcatggcctag

SEQ ID NO: 169646 - DNA, 678 bp, synthetic construct; identical to SEQ ID NO: 169645
  misc_feature 1..678: note = Description of Artificial Sequence: Synthetic coding sequence
  source 1..678: mol_type = other DNA

SEQ ID NO: 169647 - DNA, 879 bp, synthetic construct
  misc_feature 1..879: note = Description of Artificial Sequence: Synthetic coding sequence
  source 1..879: mol_type = other DNA
atggaggagctgacagcctttgtgtccaagagctttgaccagaagagcaaggatggaaatggaggcggcggcggcggcggcggcaagaaggacagcatcacctaccgggaggtgctggagagcggcctggcccggagccgggagctgggcaccagtgacagcagcctgcaggacatcacagagggcggcggccactgccctgtgcacctgttcaaggaccacgtggacaatgacaaggagaagctgaaggagtttggaacagcccgggtggccgagggcatctatgagtgcaaggagaagcgggaggatgtgaagtcagaagatgaagatggccagaccaagctgaagcagaggaggagcaggaccaacttcaccctggagcagctgaatgagctggagcggctgtttgatgagacccactacccagatgccttcatgagggaggagctgagccagaggctgggcctgtctgaggcccgggtgcaggtgtggttccagaacagaagagccaagtgcaggaagcaggagaaccagatgcacaagggcgtcatcctgggcacagccaaccacctggatgcctgccgggtggccccctacgtgaacatgggcgccctgaggatgcccttccagcaggtgcaggcccagctgcagctggagggcgtggcccacgcccacccccacctgcacccccacctggccgcccacgccccctacctgatgttccccccaccacccttcggcctgcccatcgccagcctggccgagagcgccagcgctgctgctgtggtggccgccgccgccaagagcaacagcaagaacagcagcattgctgacctgcggctgaaggccaggaagcatgctgaggccctgggcctgtag

SEQ ID NO: 169648 - DNA, 879 bp, synthetic construct; identical to SEQ ID NO: 169647
  misc_feature 1..879: note = Description of Artificial Sequence: Synthetic coding sequence
  source 1..879: mol_type = other DNA

SEQ ID NO: 169649 - DNA, 573 bp, synthetic construct
  misc_feature 1..573: note = Description of Artificial Sequence: Synthetic coding sequence
  source 1..573: mol_type = other DNA
atggaggatgagggccagaccaagatcaagcagaggaggagcaggaccaacttcaccctggagcagctgaatgagctggagcggctgtttgatgagacccactacccagatgccttcatgagggaggagctgagccagaggctgggcctgtctgaggcccgggtgcaggtgtggttccagaacagaagagccaagtgcaggaagcaggagaaccagctgcacaagggcgtgctgattggagctgccagccagtttgaggcctgccgggtggccccctacgtgaatgtgggcgccctgaggatgcccttccagcaggtgcaggcccagctgcagctggacagcgctgtggcccacgcccaccaccacctgcacccccacctggccgcccacgccccctacatgatgtttcctgcccccccatttggcctgcccctggccaccctggccgctgacagcgccagcgctgcctctgtggtggccgctgctgctgctgccaagaccaccagcaagaacagcagcattgctgacctgcggctgaaggccaagaagcatgctgctgccctgggcctgtag

SEQ ID NO: 169650 - DNA, 996 bp, synthetic construct
  misc_feature 1..996: note = Description of Artificial Sequence: Synthetic coding sequence
  source 1..996: mol_type = other DNA
atggaggagctgacagcctttgtgtccaagagctttgaccagaaggtgaaggagaagaaggaggccatcacctaccgggaggtgctggagagcggccccctgcggggggccaaggagcccaccggctgcacagaggccggcagagatgacaggagcagccctgctgtgcgggctgctgggggcggcggcggcggcggcggcggcggcggcggcggcggcggcggcggcggcgtgggcggcggcggggccggcggcggggccggcggcggccgcagccctgtgcgggagctggacatgggcgctgctgagaggagccgggagcccggcagcccccggctgacagaggtgtccccagagctgaaggacagaaaagaagatgccaagggcatggaggatgagggccagaccaagatcaagcagaggaggagcaggaccaacttcaccctggagcagctgaatgagctggagcggctgtttgatgagacccactacccagatgccttcatgagggaggagctgagccagaggctgggcctgtctgaggcccgggtgcaggtgtggttccagaacagaagagccaagtgcaggaagcaggagaaccagctgcacaagggcgtgctgattggagctgccagccagtttgaggcctgccgggtggccccctacgtgaatgtgggcgccctgaggatgcccttccagcaggacagccactgcaatgtgacccccctgtccttccaggtgcaggcccagctgcagctggacagcgctgtggcccacgcccaccaccacctgcacccccacctggccgcccacgccccctacatgatgtttcctgccccacccttcggcctgcccctggccaccctggccgctgacagcgccagcgctgcctctgtggtggccgctgctgctgctgccaagaccaccagcaagaacagcagcattgctgacctgcggctgaaggccaagaagcacgccgccgccctgggcctgtag

SEQ ID NO: 169651 - DNA, 1068 bp, synthetic construct
  misc_feature 1..1068: note = Description of Artificial Sequence: Synthetic coding sequence
  source 1..1068: mol_type = other DNA
atggaggagctgacagcctttgtgtccaagagctttgaccagaaggtgaaggagaagaaggaggccatcacctaccgggaggtgctggagagcggccccctgcggggggccaaggagcccaccggctgcacagaggccggcagagatgacaggagcagccctgctgtgcgggctgctgggggcggcggcggcggcggcggcggcggcggcggcggcggcggcggcggcggcgtgggcggcggcggggccggcggcggggccggcggcggccgcagccctgtgcgggagctggacatgggcgctgctgagaggagccgggagcccggcagcccccggctgacagagggccgcaggaagcccaccaaggccgaggtgcaggccaccctgctgctgcccggggaggccttccgcttcctggtgtccccagagctgaaggacagaaaagaagatgccaagggcatggaggatgagggccagaccaagatcaagcagaggaggagcaggaccaacttcaccctggagcagctgaatgagctggagcggctgtttgatgagacccactacccagatgccttcatgagggaggagctgagccagaggctgggcctgtctgaggcccgggtgcaggtgtggttccagaacagaagagccaagtgcaggaagcaggagaaccagctgcacaagggcgtgctgattggagctgccagccagtttgaggcctgccgggtggccccctacgtgaatgtgggcgccctgaggatgcccttccagcaggacagccactgcaatgtgacccccctgtccttccaggtgcaggcccagctgcagctggacagcgctgtggcccacgcccaccaccacctgcacccccacctggccgcccacgccccctacatgatgtttcctgccccacccttcggcctgcccctggccaccctggccgctgacagcgccagcgctgcctctgtggtggccgctgctgctgctgccaagaccaccagcaagaacagcagcattgctgacctgcggctgaaggccaagaagcacgccgccgccctgggcctgtag

SEQ ID NO: 169652 - DNA, 573 bp, synthetic construct; identical to SEQ ID NO: 169649
  misc_feature 1..573: note = Description of Artificial Sequence: Synthetic coding sequence
  source 1..573: mol_type = other DNA

SEQ ID NO: 169653 - DNA, 573 bp, synthetic construct; identical to SEQ ID NO: 169649
  misc_feature 1..573: note = Description of Artificial Sequence: Synthetic coding sequence
  source 1..573: mol_type = other DNA

SEQ ID NO: 169654 - DNA, 1734 bp, synthetic construct
  misc_feature 1..1734: note = Description of Artificial Sequence: Synthetic coding sequence
  source 1..1734: mol_type = other DNA
atgctgaccccagcctttgacctgagccaggaccctgacttcctgaccatcgccatccgggtgccctatgcccgggtgtctgaatttgatgtgtactttgagggcagtgacttcaagttctacgccaagccctacttcctgcggctgaccctgcccggcagaattgtggagaatggcagcgagcagggcagctatgatgctgacaagggcatcttcaccatccggctgcccaaggagaccccaggccagcactttgagggcctgaacatgctgacagccctgctggcccccaggaagagcaggacagccaagcccctggtggaggagatcggggccagcgagatccctgaggaggtggtggatgatgaggagtttgactgggagattgagcagaccccctgtgaggaggtgtctgagagcgccctgaacccccagtgccactacggcttcggcaacctgcggtctggagtgctgcagaggctgcaggatgagctgagtgatgtgattgacatcaaggaccctgacttcaccccagctgctgagcggcggcagaagaggctggccgctgagctggccaagtttgatcctgaccactacctggccgacttctttgaagatgaggccatcgagcagatcctgaagtacaacccctggtggacagacaagtacagcaagatgatggccttcctggagaagagccaggagcaggagaaccacgccaccctggtgtccttcagcgaggaggagaagtaccagctgaggaagtttgtgaacaagagctacctgctggacaagagggcctgccggcaggtgtgctacagcctgattgacatcctgctggcctactgctatgagaccagggtgacagaaggagagaagaatgtggagagcgcctggaacatcaggaagctgagccccaccctgtgctggtttgagacctggaccaacgtgcatgacatcatggtgtcctttggccggcgggtgctgtgctaccccctgtaccgccacttcaagctggtgatgaaggcctacagagacaccatcaagatcctgcagctgggcaagtctgctgtgctgaagtgcctgctggacatccacaagatcttccaggagaatgaccctgcctacatcctgaatgacctgtacatcagtgactactgtgtgtggatccagaaggtgaagagcaagaagctggccgccctggccgaggccctgaaggaggtgtccctgaccaaggcccagctgggcctggagctggaggagctggaggccgccgccctgctggtgcaggaggaggagacagccctgaaggccgcccacagcgtgtctggccagcagaccctgtgcagcagcagcgaggccagtgacagcgaggacagcgacagctctgtgtcctctggaaatgaagattctggcagtgacagcgagcaggatgagctgaaggacagccccagcgagaccgtgagcagcctgcagggccccttcctggaggagagcagcgccttcctgattgtggatggcggcgtgagaagaaacacagccatccaggagagtgatgccagccagggcaagcccctggccagctcctggcccctgggcgtgtctggccccctgattgaggagctgggggagcagctgaagaccaccgtgcaggtgtctgagcccaagggcaccacagctgtgaacagaagcaacatccaggagagagatggctgccagacccccaacaactag

SEQ ID NO: 169655 - DNA, 4851 bp, synthetic construct
  misc_feature 1..4851: note = Description of Artificial Sequence: Synthetic coding sequence
  source 1..4851: mol_type = other DNA
atggagggcgctgagccccgggcccggcctgagcggctggccgaggccgagaccagggctgctgatggcggccgcctggtggaggtgcagctgagcggcggggccccctggggcttcaccctgaagggcggccgggagcacggggagcccctggtgatcaccaagattgaggagggcagcaaggctgctgctgtggacaagctgctggccggagatgagatcgtgggcatcaatgacatcggcctgagcggcttccggcaggaggccatctgcctggtgaagggcagccacaagaccctgaagctggtggtgaagagaagaagtgagctgggctggaggccccacagctggcacgccaccaagttcagtgacagccaccctgagctggccgccagccccttcaccagcaccagcggctgccccagctggagcggccgccaccacgccagcagcagcagccatgacctgagcagctcctgggagcagaccaacctgcagaggaccctggaccacttcagcagcctgggctctgtggacagcctggaccaccccagcagccggctgtctgtggccaagagcaacagcagcattgaccacctgggcagccacagcaagagggacagcgcctacggcagcttcagcaccagcagcagcaccccagaccacaccctgagcaaggctgacaccagcagcgctgagaacatcctgtacacagtgggcctgtgggaggccccccggcagggcggccggcaggcccaggccgccggggacccccagggcagcgaggagaagctgagctgcttccccccccgggtgcctggggacagcggcaagggccccaggcctgagtacaatgctgagcccaagctggccgcccctggccgcagcaactttggacctgtgtggtacgtgcctgacaagaagaaggcccccagcagccccccacctcctcctccacccctgcggagtgacagctttgctgccaccaagagccatgagaaggcccagggccctgtgttttctgaggccgctgctgcccagcacttcaccgccctggcccaggcccagcccaggggggacagaagacctgagctgacagaccggccctggaggtctgcccaccctggcagcctgggcaagggcagcggcggccctggctgcccccaggaggcccatgctgatggctcctggccacccagcaaggatggagccagcagccggctgcaggccagcctgagcagcagtgatgtgcgcttcccccagagcccccacagcggccgccacccccccctgtacagcgaccacagccccctgtgtgccgacagcctgggccaggagcctggagctgccagcttccagaatgacagccccccccaggtgcggggcctgagcagctgtgaccagaagctgggcagcggctggcagggcccccggccctgtgtgcagggcgacctgcaggccgcccagctgtgggccggctgctggcccagcgacacagccctgggcgccctggagagcctgcccccacccaccgtgggccagagccccaggcaccacctgccccagcctgagggccccccagatgcccgggagaccggccgctgctaccccctggacaagggagctgagggctgcagcgctggggcccaggagcccccccgggccagcagagctgagaaggccagccagaggctggccgccagcatcacctgggcagatggagagagcagccgcatctgcccccaggagacccccctgctgcacagcctgacccaggagggcaagaggaggcctgagagcagcccagaagattctgccacccggcccccaccatttgatgcccacgtgggcaagcccaccaggagaagtgacagatttgccaccaccctgagaaatgagatccagatgcaccgggccaagctgcagaagagccgcagcacagtggccctgacagctgctggggaggctgaagatggcaccggccgctggagggctggcctgggcggcggcacccaggagggccccctggccggcacctacaaggaccacctgaaggaggcccaggcccgggtgctgcgggccaccagcttcaagagaagagacctggaccccaaccctggggacctgtacccagagagcctggagcacaggatgggagaccctgacacagtgccccacttctgggaggccggcctggcccagccccccagcagcaccagcggcggcccccaccccccacgcatcggcggcagaagacgcttcaccgctgagcagaagctgaagagctacagcgagcctgagaagatgaatgaggtgggcctgacccggggctacagcccccaccagcaccccaggaccagcgaggacacagtgggcacctttgctgaccgctggaagttctttgaggagaccagcaagcctgtgccccagaggcctgcccagaagcaggccctgcacggcatcccccgggacaagccagagcggcccaggacagctggccgcacctgtgagggcacagagccctggagcaggaccaccagcctgggggacagcctgaatgcccacagcgctgctgagaaggccggcaccagtgacctgccccggcggctgggcacctttgctgagtaccaggcctcctggaaggagcagaggaagcccctggaggcccggagcagcggccgctgccacagcgcagatgacatcctggatgtgtccctggacccccaggagcggccccagcacgtgcacggccgcagccgcagcagccccagcacagaccactacaagcaggaggcctctgtggagctgcggcggcaggccggggaccctggagagccccgggaggagctgcccagcgctgtgcgggcagaggagggccagagcaccccccggcaggctgatgcccagtgccgggagggcagccctggcagccagcagcacccccccagccagaaggcccccaacccccccaccttcagcgagctgagccactgccgcggggcccctgagctgccccgggagggccggggccgggccggcaccctgccccgggactaccgctacagcgaggagagcaccccagctgacctgggcccccgggcccagagccctggcagccccctgcacgcccggggccaggacagctggcctgtgtcctctgccctgctgagcaagaggcctgccccccagaggcctcctccacccaagcgggagccccggcgctaccgggccacagatggagccccagcagatgcccctgtgggcgtgctgggccggcccttccccacccccagccctgccagcctggatgtgtatgtggcccggctgagcctgagccacagccccagcgtcttcagcagcgcccagccccaggacacccccaaggccaccgtgtgtgagcggggcagccagcacgtgtctggagatgccagccggcccctgcctgaggccctgctgccccccaagcagcagcacctgcggctgcagacagccaccatggagaccagccgcagccccagcccccagtttgccccccagaagctgacagacaagccacccctgctgatccaggatgaggacagcaccagaattgagcgggtgatggacaacaacaccaccgtgaagatggtgcccatcaagatcgtgcacagcgagagccagcctgagaaggagagccggcagagcctggcctgcccagctgagcccccagccctgccccacggcctggagaaggaccagatcaagaccctgagcaccagcgagcagttctacagccgcttctgcctgtacacccggcagggcgctgagcctgaggccccccaccgggcccagcctgctgagccccagcccctgggcacccaggtgcccccagagaaggaccgctgcaccagccccccaggcctgagctacatgaaggccaaggagaagacagtggaggacctgaagtctgaggagctggcccgggagatcgtgggcaaggacaagagcctggccgacatcctggaccccagcgtgaagatcaagaccaccatggacctgatggagggcatcttccccaaggatgagcacctgctggaggaggcccagcagaggaggaagctgctgcccaagatccccagccccaggagcacagaggagaggaaggaggagcccagcgtgcctgctgctgtgtccctggccaccaacagcacctactacagcaccagcgcccccaaggccgagctgctgatcaagatgaaggacctgcaggagcagcaggagcatgaagaagattctggcagtgacctggaccatgacctgtctgtgaagaagcaggagctgattgagagcatcagcaggaagctgcaggtgctgcgggaggcccgggagagcctgctggaggatgtgcaggccaacacagtgctgggcgctgaggtggaggccatcgtgaagggcgtgtgcaagcccagcgagtttgacaagttcaggatgttcatcggggacctggacaaggtggtgaacctgctgctgagcctgagcggccgcctggcccgggtggagaatgccctgaacaacctggatgatggagccagccctggggaccggcagagcctgctggagaagcagagggtgctgatccagcagcatgaagatgccaaggagctgaaggagaacctggaccggcgggagcgcatcgtgtttgacatcctggccaactacctgtctgaggagagcctggccgactatgagcactttgtgaagatgaagagcgccctgatcatcgagcagcgggagctggaggacaagatccacctgggggaggagcagctgaagtgcctgctggacagcctgcagcctgagcggggcaagtag

SEQ ID NO: 169656 - DNA, 1356 bp, synthetic construct
  misc_feature 1..1356: note = Description of Artificial Sequence: Synthetic coding sequence
  source 1..1356: mol_type = other DNA
atggagaccagccgcagccccagcccccagtttgccccccagaagctgacagacaagccacccctgctgatccaggatgaggacagcacccgcatcgagcgggtgatggacaacaacaccaccgtgaagatggtgcccatcaagatcgtgcacagcgagagccagcctgagaaggagagccggcagagcctggcctgcccagctgagcccccagccctgccccacggcctggagaaggaccagatcaagaccctgagcaccagcgagcagttctacagccgcttctgcctgtacacccggcagggcgctgagcctgaggccccccaccgggcccagcctgctgagccccagcccctgggcacccaggtgcccccagagaaggaccgctgcaccagccccccaggcctgagctacatgaaggccaaggagaagacagtggaggacctgaagtctgaggagctggcccgggagatcgtgggcaaggacaagagcctggccgacatcctggaccccagcgtgaagatcaagaccaccatggacctgatggagggcatcttccccaaggatgagcacctgctggaggaggcccagcagaggaggaagctgctgcccaagatccccagccccaggagcacagaggagaggaaggaggagcccagcgtgcctgctgctgtgtccctggccaccaacagcacctactacagcaccagcgcccccaaggccgagctgctgatcaagatgaaggacctgcaggagcagcaggagcacgaggaggacagcggcagtgacctggaccatgacctgtctgtgaagaagcaggagctgattgagagcatcagcaggaagctgcaggtgctgcgggaggcccgggagagcctgctggaggatgtgcaggccaacacagtgctgggcgctgaggtggaggccatcgtgaagggcgtgtgcaagcccagcgagtttgacaagttcaggatgtttattggagacctggacaaggtggtgaacctgctgctgagcctgagcggccgcctggcccgggtggagaatgccctgaacaacctggatgatggagccagccctggggaccggcagagcctgctggagaagcagagggtgctgatccagcagcatgaagatgccaaggagctgaaggagaacctggacagaagagaaagaattgtgtttgacatcctggccaactacctgtctgaggagagcctggccgactatgagcactttgtgaagatgaagagcgccctgatcatcgagcagcgggagctggaggacaagatccacctgggggaggagcagctgaagtgcctgctggacagcctgcagcctgagcggggcaagtag

SEQ ID NO: 169657 - DNA, 1128 bp, synthetic construct
  misc_feature 1..1128: note = Description of Artificial Sequence: Synthetic coding sequence
  source 1..1128: mol_type = other DNA
atggagaccagccgcagccccagcccccagtttgccccccagaagctgacagacaagccacccctgctgatccaggatgaggacagcacccgcatcgagcgggtgatggacaacaacaccaccgtgaagatggtgcccatcaagatcgtgcacagcgagagccagcctgagaaggagagccggcagagcctggcctgcccagctgagcccccagccctgccccacggcctggagaaggaccagatcaagaccctgagcaccagcgagcagttctacagccgcttctgcctgtacacccggcagggcgctgagcctgaggccccccaccgggcccagcctgctgagccccagcccctgggcacccaggtgcccccagagaaggaccgctgcaccagccccccaggcctgagctacatgaaggccaaggagaagacagtggaggacctgaagtctgaggagctggcccgggagatcgtgggcaaggacaagagcctggccgacatcctggaccccagcgtgaagatcaagaccaccatggacctgatggagggcatcttccccaaggatgagcacctgctggaggaggcccagcagaggaggaagctgctgcccaagatccccagccccaggagcacagaggagaggaaggaggagcccagcgtgcctgctgctgtgtccctggccaccaacagcacctactacagcaccagcgcccccaaggccgagctgctgatcaagatgaaggacctgcaggagcagcaggagcacgaggaggacagcggcagtgacctggaccatgacctgtctgtgaagaagcaggagctgattgagagcatcagcaggaagctgcaggtgctgcgggaggcccgggagagcctgctggaggatgtgcaggccaacacagtgctgggcgctgaggtggaggccatcgtgaagggcgtgtgcaagcccagcgagtttgacaagttcaggatgtttattggagacctggacaaggtggtgaacctgctgctgagcctgagcggccgcctggcccgggtggagaatgccctgaacaacctggatgatggagccagccctggggaccggcagagcctgctggagaagcagagggtgctgatccagtag

SEQ ID NO: 169658 - DNA, 1203 bp, synthetic construct
  misc_feature 1..1203: note = Description of Artificial Sequence: Synthetic coding sequence
  source 1..1203: mol_type = other DNA
atggagaccagccgcagccccagcccccagtttgccccccagaagctgacagacaagccacccctgctgatccaggatgaggacagcacccgcatcgagcgggtgatggacaacaacaccaccgtgaagatggtgcccatcaagatcgtgcacagcgagagccagcctgagaaggagagccggcagagcctggcctgcccagctgagcccccagccctgccccacggcctggagaaggaccagatcaagaccctgagcaccagcgagcagttctacagccgcttctgcctgtacacccggcagggcgctgagcctgaggccccccaccgggcccagcctgctgagccccagcccctgggcacccaggtgcccccagagaaggaccgctgcaccagccccccaggcctgagctacatgaaggccaaggagaagacagtggaggacctgaagtctgaggagctggcccgggagatcgtgggcaaggacaagagcctggccgacatcctggaccccagcgtgaagatcaagaccaccatggacctgatggagggcatcttccccaaggatgagcacctgctggaggaggcccagcagaggaggaagctgctgcccaagatccccagccccaggagcacagaggagaggaaggaggagcccagcgtgcctgctgctgtgtccctggccaccaacagcacctactacagcaccagcgcccccaaggccgagctgctgatcaagatgaaggacctgcaggagcagcaggagcacgaggaggacagcggcagtgacctggaccatgacctgtctgtgaagaagcaggagctgattgagagcatcagcaggaagctgcaggtgctgcgggaggcccgggagagcctgctggaggatgtgcaggccaacacagtgctgggcgctgaggtggaggccatcgtgaagggcgtgtgcaagcccagcgagtttgacaagttcaggatgtttattggagacctggacaaggtggtgaacctgctgctgagcctgagcggccgcctggcccgggtggagaatgccctgaacaacctggatgatggagccagccctggggaccggcagagcctgctggagaagcagagggtgctgatccagcagatgtgtgtggacttcatgctggacacctaccacagccccatcaacagaagcagctgcctgactgtgaccaagtag

SEQ ID NO: 169659 - DNA, 777 bp, synthetic construct
  misc_feature 1..777: note = Description of Artificial Sequence: Synthetic coding sequence
  source 1..777: mol_type = other DNA
atgagggagcgggcccctcctcctcctccacccagccaggagacccctgtgtacagcatggatgacttccccccacctccaccccacacagtgtgtgaggcccagctggacagtgaagatcctgagggcccccggcccagcttcaacaagctgagcaaggtgaccatcgcccgggagcggcacatgcctggagctgcccacgtggtgggcagccagaccctggccagccggctgcagaccagcatcaagggcagcgaggccgagagcaccccacccagcttcatgtctgtgcacgcccagctggccggcagcctgggcggccagcctgcccccatccagacccagagcctgagccatgaccctgtgtctggcacccagggcctggagaagaaggtgtccccagacccccagaagagcagcgaggacatcagaacagaggccctggccaaggagatcgtgcaccaggacaagagcctggccgacatcctggaccctgacagccggctgaagaccaccatggacctgatggagggcctcttccccagagatgtgaacctgctgaaggaaaattctgtgaagaggaaggccatccagaggacagtgagcagcagcggctgtgagggcaagagaaatgaagacaaggaggccgtgtccatgctggtgaactgcccccagatctccttcccccggctgggcccctggctgtgcccccagaccagccgggtgagccccttcctgctgggcgctgtgctgtctgtggtgttcagccagcactag

SEQ ID NO: 169660 - DNA, 5991 bp, synthetic construct
  misc_feature 1..5991: note = Description of Artificial Sequence: Synthetic coding sequence
  source 1..5991: mol_type = other DNA
atgatgaggaccacagaggacttccacaagcccagcgccaccctgaacagcaacacagccaccaagggccgctacatctacctggaggccttcctggagggcggggccccctggggcttcaccctgaagggcggcctggagcacggggagcccctcatcatcagcaaggtggaggagggcggcaaggctgacaccctgagcagcaagctgcaggccggagatgaggtggtgcacatcaatgaggtgaccctgagcagcagcaggaaggaggccgtgtccctggtgaagggcagctacaagaccctgcggctggtggtgagaagagatgtgtgcacagaccccggccatgctgacacaggagccagcaactttgtgtccccagagcacctgaccagcggcccccagcacaggaaggccgcctggagcggcggcgtgaagctgcggctgaagcaccggcgctctgagcctgctggccggccccacagctggcacaccaccaagagcggggagaagcagccagatgcctccatgatgcagatcagccagggcatgattggccccccctggcaccagagctaccacagcagcagcagcaccagtgacctgagcaactatgaccacgcctacctgcggcgcagcccagaccagtgcagcagccagggctccatggagagcctggagcccagcggggcctacccaccctgccacctgagccctgccaagagcacaggcagcattgaccagctgagccacttccacaacaagagggacagcgcctacagcagcttcagcaccagcagcagcatcctggagtacccccaccctggcatcagcggccgggagaggagcggctccatggacaacaccagcgcccggggcggcctgctggagggcatgaggcaggccgacatccgctacgtgaagacagtgtatgacacccggcggggcgtgtctgcagaatatgaggtgaacagcagcgccctgctgctgcagggccgggaggcccgggccagcgccaacggccagggctatgacaagtggagcaacatcccccggggcaagggcgtgcccccacccagctggagccagcagtgccccagcagcctggagacagccacagacaacctgccccccaaggtgggcgcccccctgcccccagcccggagtgacagctatgctgccttccgccaccgggagcggcccagctcctggagcagcctggaccagaagaggctgtgccggccccaggccaacagcctgggcagcctgaagagccccttcatcgaggagcagctgcacacagtgctggagaagagccctgagaacagcccccctgtgaagcccaagcacaactacacccagaaggcccagcccggccagcccctgctgcccaccagcatctaccctgtgcccagcctggagccccactttgcccaggtgccccagcccagcgtgagcagcaatggcatgctgtacccagccctggccaaggagagcggctacatcgccccccagggcgcctgcaacaagatggccaccattgatgaaaatggaaaccagaatggaagtggccggcccggctttgccttctgccagcccctggagcatgacctgctgagccctgtggagaagaagccagaggccacagccaagtatgtgcccagcaaggtgcacttctgcagcgtgcctgaaaatgaagaagatgccagcctgaagaggcacctgaccccaccccagggcaacagcccccacagcaatgaaaggaagagcacccacagcaacaagcccagcagccacccccacagcctgaagtgcccccaggcccaggcctggcaggccggggaggacaagaggagcagccggctgtctgagccctgggagggggacttccaggaggaccacaatgccaacctgtggaggcggctggagcgggagggcctgggccagagcctgagcggcaactttgggaagaccaagagcgccttcagcagcctgcagaacatccctgagagcctgcggcggcacagcagcctggagctgggccggggcacccaggagggctacccaggcggccggcccacctgtgctgtgaacaccaaggccgaggaccccggcaggaaggccgccccagacctgggcagccacctggaccggcaggtgtcctaccccaggcctgagggccgcactggagccagcgccagcttcaacagcacagaccccagccctgaggagcccccagcccccagccacccccacaccagcagcctgggccggcggggccctggccctggcagcgccagcgccctgcagggcttccagtatggcaagccccactgcagcgtgctggagaaggtgtccaagtttgagcagcgggagcagggcagccagaggccttctgtgggcggcagcggcttcggccacaactaccggccccacaggacagtgtccaccagcagcaccagcggaaatgactttgaggagaccaaggcccacatccgcttcagcgagagcgctgagcccctgggcaatggagagcagcacttcaagaatggagagctgaagctggaggaggccagccggcagccctgtggccagcagctgagcggcggggccagtgacagcggccggggcccccagaggccagatgcccggctgctgcggagccagagcaccttccagctgagcagcgagcctgagcgggagcctgagtggagggaccggcccggcagccctgagagccccctgctggatgcccccttcagccgggcctacagaaattccatcaaggatgcccagagccgggtgctgggcgccaccagcttcagaagaagagacctggagctgggcgcccctgtggccagccgctcctggaggccccggcccagcagcgcccacgtgggcctgcggagccctgaggccagcgccagcgccagcccccacaccccccgggagcggcacagcgtgaccccagctgagggggacctggcccggcctgtgcccccagctgcccggcggggggcccggcggcggctgaccccagagcagaagaagaggagctacagcgagcctgagaagatgaatgaggtgggcatcgtggaggaggccgagcccgcccccctgggcccccagagaaatggcatgagatttcctgagagctctgtggccgacagaagaaggctgtttgaaagagatggcaaggcctgcagcaccctgagcctgagcggccctgagctgaagcagttccagcagagcgccctggccgactacatccagaggaagacaggcaagaggcccaccagcgctgctggctgcagcctgcaggagcccggccccctgcgggagcgggcccagagcgcctacctgcagcccggccctgctgccctggagggcagcggcctggccagcgccagcagcctgagcagcctgcgggagcccagcctgcagccccggcgggaggccaccctgctgcctgccaccgtggccgagacccagcaggccccccgggacaggagcagcagctttgctgggggccggcggctgggggagcggcggcggggggacctgctgagcggggccaatggaggcacccggggcacccagagaggagatgagaccccccgggagcccagctcctggggcgcccgggccggcaagtccatgtctgctgaggacctgctggagaggagtgatgtgctggccggccctgtgcacgtgcgcagccgcagcagccctgccacagctgacaagaggcaggatgtgctgctgggccaggacagcggcttcggcctggtgaaggacccctgctacctggccggccctggcagccgcagcctgagctgcagcgagcggggccaggaggagatgctgcccctcttccaccacctgaccccccgctggggcggcagcggctgcaaggccatcggggacagctctgtgcccagtgaatgtcctggcaccctggaccaccagaggcaggccagcaggaccccctgcccccggccccccctggccggcacccagggcctggtgacagacacccgggccgcccccctgacccccatcggcacccccctgcccagcgccatccccagcggctactgcagccaggacggccagacaggccggcagcccctgcccccctacaccccagccatgatgcacaggagcaatggccacaccctgacccagcccccaggcccccggggctgtgaaggagatggccctgagcacggcgtggaggagggcaccaggaagagggtgtccctgccccagtggcccccacccagccgggccaagtgggcccacgccgcccgggaggacagcctgcctgaggagagcagcgccccagactttgccaacctgaagcactaccagaagcagcagagcctgcccagcctgtgcagcaccagtgaccctgacacccccctgggcgcccccagcaccccaggccgcatcagcctgcgcatcagcgagagcgtgctgcgggacagccccccacctcatgaggactatgaagatgaggtgtttgtgcgggacccccaccccaaggccaccagcagccccacctttgagcccctgcccccacctcctcctcctccacccagccaggagacccctgtgtacagcatggatgacttccccccacctccaccccacacagtgtgtgaggcccagctggacagcgaggaccctgagggcccccggcccagcttcaacaagctgagcaaggtgaccatcgcccgggagcggcacatgcctggggccgcccacgtggtgggcagccagaccctggccagccggctgcagaccagcatcaagggcagcgaggccgagagcaccccacccagcttcatgtctgtgcacgcccagctggccggcagcctgggcggccagcctgcccccatccagacccagagcctgagccatgaccctgtgtctggcacccagggcctggagaagaaggtgtccccagacccccagaagagcagcgaggacatcagaacagaggccctggccaaggagatcgtgcaccaggacaagagcctggccgacatcctggaccctgacagccggctgaagaccaccatggacctgatggagggcctcttccccagagatgtgaacctgctgaaggagaacagcgtgaagaggaaggccatccagaggacagtgagcagcagcggctgtgagggcaagagaaatgaagacaaggaggccgtgtccatgctggtgaactgcccagcctactacagcgtgtctgcccccaaggccgagctgctgaacaagatcaaggagatgcctgctgaggtgaatgaggaggaggagcaggctgatgtgaatgagaagaaggccgagctgattggcagcctgacccacaagctggagaccctgcaggaggccaagggcagcctgctgacagacatcaagctgaacaatgccctgggggaggaggtggaggccctgatcagcgagctgtgcaagcccaatgaatttgacaagtacaggatgttcatcggggacctggacaaggtggtgaacctgctgctgagcctgagcggccgcctggcccgggtggagaatgtgctgagcggcctgggagaagatgccagcaatgaggagaggagcagcctgtatgagaagaggaagatcctggccggccagcatgaagatgcccgggagctgaaggagaacctggaccggcgggagcgggtggtgctgggcatcctggccaactacctgtctgaggagcagctgcaggactaccagcactttgtgaagatgaagagcaccctgctgattgagcagaggaagctggatgacaagatcaagctgggccaggagcaggtgaagtgcctgctggagagcctgcccagcgacttcatccccaaggccggggccctggccctgccccccaacctgaccagcgagcccatcccagctgggggctgcaccttcagcggcatcttccccaccctgaccagccccctgtag

SEQ ID NO: 169661 - DNA, 561 bp, synthetic construct
  misc_feature 1..561: note = Description of Artificial Sequence: Synthetic coding sequence
  source 1..561: mol_type = other DNA
atggccttctacagcaccacagaatatgacatccagctggcccggggcctgctgagcggcatgttcctgtttgccaccaggagaagtgagcccgccggccggccccacagctggcacaccaccaagtctggagagaagcagccagatgcctccatgatgcagatcagccagggcatgattggccccccctggcaccagagctaccacagcagcagcagcaccagtgacctgagcaactatgaccacgcctacctgcggcgcagcccagaccagtgcagcagccagggctccatggagagcctggagcccagcggggcctacccaccctgccacctgagccctgccaagagcacaggcagcattgaccagctgagccacttccacaacaagagggacagcgcctacagcagcttcagcaccagcagcagcatcctggagtacccccaccctgggaagagggtgaagacccgggacctgcccggcagccagagccctggccgggccatcagcaggaagaccaccatgcccaccagcggcggcggctggagggagaaggcctag

SEQ ID NO: 169662 - DNA, 4482 bp, synthetic construct
  misc_feature 1..4482: note = Description of Artificial Sequence: Synthetic coding sequence
  source 1..4482: mol_type = other DNA
atggagaacagacctggcagcttccagtatgtgcctgtgcagctgcagggcggggccccctggggcttcaccctgaagggcggcctggagcactgtgagcccctgactgtgtccaagattgaagatggcggcaaggccgccctgagccagaagatgaggactggagatgagctggtgaacatcaatggcacccccctgtatggcagccggcaggaggccctgatcctgatcaagggcagcttccgcatcctgaagctgattgtgagaagaagaaatgcccctgtgtcccggccccacagctggcacgtggccaagctgctggagggctgcccagaggccgccaccaccatgcacttccccagcgaggccttcagcctgtcctggcacagcggctgcaacaccagtgatgtgtgtgtgcagtggtgccccctgagccgccactgcagcacagagaagagcagcagcatcggctccatggagagcctggagcagcccggccaggccacctatgagagccacctgctgcccatcgaccagaacatgtaccccaaccagagggacagcgcctacagcagcttcagcgccagcagcaatgccagtgactgtgccctgagcctgcggcctgaggagcccgccagcacagactgcatcatgcagggccctggccccaccaaggcccccagcggccggcccaacgtggccgagaccagcggcggcagcaggaggaccaacggcggccacctgacccccagcagccagatgagcagccggccccaggagggctaccagagcggccctgccaaggctgtgcggggccccccccagccccctgtgagaagagacagcctgcaggccagccgggcccagctgctgaatggagagcagaggcgggccagcgagcctgtggtgcccctgccccagaaggagaagctgagcctggagcctgtgctgcctgccaggaaccccaaccgcttctgctgcctgagcggccatgaccaggtgaccagcgagggccaccagaactgtgagttcagccagcccccagagagcagccagcagggcagcgagcacctgctgatgcaggccagcaccaaggctgtgggcagccccaaggcctgtgaccgggccagctctgtggacagcaaccccctgaatgaggccagcgctgagctggccaaggccagctttggccggcccccccacctgattggccccaccggccaccgccacagcgcccctgagcagctgctggccagccacctgcagcacgtgcacctggacacccggggcagcaagggcatggagctgccccctgtgcaggacggccaccagtggaccctgagccccctgcacagcagccacaagggcaagaagagcccctgcccccccaccggcggcacccatgaccagagcagcaaggagaggaagacccggcaggtggatgacaggagcctggtgctgggccaccagagccagagcagcccccctcatggagaggctgatggccaccccagcgagaagggcttcctggaccccaacagaaccagccgggccgccagcgagctggccaaccagcagcccagcgccagcggcagcctggtgcagcaggccacagactgcagcagcaccaccaaggccgccagcggcacagaggccggggaggagggggacagcgagcccaaggagtgcagcaggatgggcggcagaagaagtggcggcacccggggccgcagcatccagaacagaaggaagtcagaaagatttgccaccaacctgagaaatgagatccagaggaggaaggcccagctgcagaagagcaagggccccctgagccagctgtgtgacaccaaggagcctgtggaggagacccaggagcccccagagagcccccccctgacagccagcaacaccagcctgctgagcagctgcaagaagccacccagcccccgggacaagctgttcaacaagtccatgatgctgcgggcccggagcagcgagtgcctgagccaggcccctgagagccatgagagcaggacaggcctggagggccgcatcagccctggccagaggcctggccagagcagcctgggcctgaacacctggtggaaggccccagaccccagcagcagtgaccctgagaaggcccacgcccactgcggcgtgcggggcggccactggcgctggagccctgagcacaacagccagcccctggtggccgccgccatggagggccccagcaaccctggggacaacaaggagctgaaggccagcacagcccaggccggagaagatgccatcctgctgccctttgctgacaggaggaagttctttgaggagagcagcaagagcctgagcaccagccacctgcccggcctgaccacccacagcaacaagaccttcacccagaggcccaagcccatcgaccagaacttccagcccatgagcagcagctgccgggagctgcggcggcaccccatggaccagagctaccacagcgctgaccagccctaccacgccacagaccagagctaccacagcatgagccccctgcagagcgagacccccacctacagtgaatgttttgccagcaagggcctggagaacagcatgtgctgcaagcccctgcactgtggggactttgactaccacaggacctgcagctacagctgcagcgtgcagggcgccctggtgcatgacccctgcatctactgcagcggggagatctgcccagccctgctgaagaggaacatgatgcccaactgctacaactgccgctgccaccaccaccagtgcatccgctgcagcgtgtgctaccacaacccccagcacagcgccctggaggacagcagcctggcccctggcaacacctggaagcccaggaagctgactgtgcaggagttccctggggacaagtggaaccccatcaccggcaacaggaagaccagccagagcggccgggagatggcccacagcaagaccagcttctcctgggccacccccttccacccctgcctggagaacccagccctggacctgagcagctaccgggccatcagcagcctggacctgctgggggacttcaagcacgccctgaagaagtctgaggagacctctgtgtatgaggagggcagcagcctggcctccatgccccaccccctgcggagccgggccttcagcgagagccacatcagcctggccccccagagcacccgggcctggggccagcacagaagagagctgttcagcaaaggagatgagacccagagcgacctgctgggcgccaggaagaaggccttccccccaccccggcccccaccacccaactgggagaagtaccgcctcttccgggccgcccagcagcagaagcagcagcagcagcagcagaagcagcaggaggaggaggaggaggaggaggaggaggaggaggaggaggaggaggaggaggaggaggaggccgaggaggaggaggaggagctgcccccccagtacttcagcagcgagaccagcggcagctgtgccctgaaccctgaggaggtgctggagcagccccagcccctgagctttggccacctggagggcagccggcagggcagccagagcgtgcctgctgagcaggagagctttgccctgcacagcagtgacttcctgccccccatccggggccacctgggcagccagcctgagcaggcccagcccccctgctactacggcatcggcggcctgtggaggaccagcggccaggaggccacagagagcgccaagcaggagttccagcacttcagcccccccagcggggcccctggcatccccaccagctacagcgcctactacaacatctctgtggccaaggccgagctgctgaacaagctgaaggaccagcctgagatggccgagatcggcctgggggaggaggaggtggaccacgagctggcccagaagaagatccagctgattgagagcatcagcaggaagctgtctgtgctgcgggaggcccagaggggcctgctggaggacatcaatgccaacagcgccctgggggaggaggtggaggccaacctgaaggctgtgtgcaagagcaatgaatttgagaagtaccacctgtttgtgggggacctggacaaggtggtgaacctgctgctgagcctgagcggccgcctggcccgggtggagaatgccctgaacagcattgacagcgaggccaaccaggagaagctggtgctgattgagaagaagcagcagctgaccggccagctggctgatgccaaggagctgaaggagcacgtggaccggcgggagaagctggtgtttggcatggtgagccgctacctgccccaggaccagctgcaggactaccagcactttgtgaagatgaagagcgccctgatcatcgagcagcgggagctggaggagaagatcaagctgggggaggagcagctgaagtgcctgcgggagagcctgctgctgggccccagcaacttctag

SEQ ID NO: 169663 - DNA, 4482 bp, synthetic construct; identical to SEQ ID NO: 169662
  misc_feature 1..4482: note = Description of Artificial Sequence: Synthetic coding sequence
  source 1..4482: mol_type = other DNA

SEQ ID NO: 169664 - DNA, 4134 bp, synthetic construct
  misc_feature 1..4134: note = Description of Artificial Sequence: Synthetic coding sequence
  source 1..4134: mol_type = other DNA
atgcacttccccagcgaggccttcagcctgtcctggcacagcggctgcaacaccagtgatgtgtgtgtgcagtggtgccccctgagccgccactgcagcacagagaagagcagcagcatcggctccatggagagcctggagcagcccggccaggccacctatgagagccacctgctgcccatcgaccagaacatgtaccccaaccagagggacagcgcctacagcagcttcagcgccagcagcaatgccagtgactgtgccctgagcctgcggcctgaggagcccgccagcacagactgcatcatgcagggccctggccccaccaaggcccccagcggccggcccaacgtggccgagaccagcggcggcagcaggaggaccaacggcggccacctgacccccagcagccagatgagcagccggccccaggagggctaccagagcggccctgccaaggctgtgcggggccccccccagccccctgtgagaagagacagcctgcaggccagccgggcccagctgctgaatggagagcagaggcgggccagcgagcctgtggtgcccctgccccagaaggagaagctgagcctggagcctgtgctgcctgccaggaaccccaaccgcttctgctgcctgagcggccatgaccaggtgaccagcgagggccaccagaactgtgagttcagccagcccccagagagcagccagcagggcagcgagcacctgctgatgcaggccagcaccaaggctgtgggcagccccaaggcctgtgaccgggccagctctgtggacagcaaccccctgaatgaggccagcgctgagctggccaaggccagctttggccggcccccccacctgattggccccaccggccaccgccacagcgcccctgagcagctgctggccagccacctgcagcacgtgcacctggacacccggggcagcaagggcatggagctgccccctgtgcaggacggccaccagtggaccctgagccccctgcacagcagccacaagggcaagaagagcccctgcccccccaccggcggcacccatgaccagagcagcaaggagaggaagacccggcaggtggatgacaggagcctggtgctgggccaccagagccagagcagcccccctcatggagaggctgatggccaccccagcgagaagggcttcctggaccccaacagaaccagccgggccgccagcgagctggccaaccagcagcccagcgccagcggcagcctggtgcagcaggccacagactgcagcagcaccaccaaggccgccagcggcacagaggccggggaggagggggacagcgagcccaaggagtgcagcaggatgggcggcagaagaagtggcggcacccggggccgcagcatccagaacagaaggaagtcagaaagatttgccaccaacctgagaaatgagatccagaggaggaaggcccagctgcagaagagcaagggccccctgagccagctgtgtgacaccaaggagcctgtggaggagacccaggagcccccagagagcccccccctgacagccagcaacaccagcctgctgagcagctgcaagaagccacccagcccccgggacaagctgttcaacaagtccatgatgctgcgggcccggagcagcgagtgcctgagccaggcccctgagagccatgagagcaggacaggcctggagggccgcatcagccctggccagaggcctggccagagcagcctgggcctgaacacctggtggaaggccccagaccccagcagcagtgaccctgagaaggcccacgcccactgcggcgtgcggggcggccactggcgctggagccctgagcacaacagccagcccctggtggccgccgccatggagggccccagcaaccctggggacaacaaggagctgaaggccagcacagcccaggccggagaagatgccatcctgctgccctttgctgacaggaggaagttctttgaggagagcagcaagagcctgagcaccagccacctgcccggcctgaccacccacagcaacaagaccttcacccagaggcccaagcccatcgaccagaacttccagcccatgagcagcagctgccgggagctgcggcggcaccccatggaccagagctaccacagcgctgaccagccctaccacgccacagaccagagctaccacagcatgagccccctgcagagcgagacccccacctacagtgaatgttttgccagcaagggcctggagaacagcatgtgctgcaagcccctgcactgtggggactttgactaccacaggacctgcagctacagctgcagcgtgcagggcgccctggtgcatgacccctgcatctactgcagcggggagatctgcccagccctgctgaagaggaacatgatgcccaactgctacaactgccgctgccaccaccaccagtgcatccgctgcagcgtgtgctaccacaacccccagcacagcgccctggaggacagcagcctggcccctggcaacacctggaagcccaggaagctgactgtgcaggagttccctggggacaagtggaaccccatcaccggcaacaggaagaccagccagagcggccgggagatggcccacagcaagaccagcttctcctgggccacccccttccacccctgcctggagaacccagccctggacctgagcagctaccgggccatcagcagcctggacctgctgggggacttcaagcacgccctgaagaagtctgaggagacctctgtgtatgaggagggcagcagcctggcctccatgccccaccccctgcggagccgggccttcagcgagagccacatcagcctggccccccagagcacccgggcctggggccagcacagaagagagctgttcagcaaaggagatgagacccagagcgacctgctgggcgccaggaagaaggccttccccccaccccggcccccaccacccaactgggagaagtaccgcctcttccgggccgcccagcagcagaagcagcagcagcagcagcagaagcagcaggaggaggaggaggaggaggaggaggaggaggaggaggaggaggaggaggaggaggaggaggccgaggaggaggaggaggagctgcccccccagtacttcagcagcgagaccagcggcagctgtgccctgaaccctgaggaggtgctggagcagccccagcccctgagctttggccacctggagggcagccggcagggcagccagagcgtgcctgctgagcaggagagctttgccctgcacagcagtgacttcctgccccccatccggggccacctgggcagccagcctgagcaggcccagcccccctgctactacggcatcggcggcctgtggaggaccagcggccaggaggccacagagagcgccaagcaggagttccagcacttcagcccccccagcggggcccctggcatccccaccagctacagcgcctactacaacatctctgtggccaaggccgagctgctgaacaagctgaaggaccagcctgagatggccgagatcggcctgggggaggaggaggtggaccacgagctggcccagaagaagatccagctgattgagagcatcagcaggaagctgtctgtgctgcgggaggcccagaggggcctgctggaggacatcaatgccaacagcgccctgggggaggaggtggaggccaacctgaaggctgtgtgcaagagcaatgaatttgagaagtaccacctgtttgtgggggacctggacaaggtggtgaacctgctgctgagcctgagcggccgcctggcccgggtggagaatgccctgaacagcattgacagcgaggccaaccaggagaagctggtgctgattgagaagaagcagcagctgaccggccagctggctgatgccaaggagctgaaggagcacgtggaccggcgggagaagctggtgtttggcatggtgagccgctacctgccccaggaccagctgcaggactaccagcactttgtgaagatgaagagcgccctgatcatcgagcagcgggagctggaggagaagatcaagctgggggaggagcagctgaagtgcctgcgggagagcctgctgctgggccccagcaacttctag

SEQ ID NO: 169665 - DNA, 1686 bp, synthetic construct
  misc_feature 1..1686: note = Description of Artificial Sequence: Synthetic coding sequence
  source 1..1686: mol_type = other DNA
atggccaaggagcgctgcctgaagaagagcttccaggacagcctggaggacatcaagaagaggatgaaggagaagaggaacaagaacctggccgagatcggcaagaggaggagcttcatcgccgccccctgccagatcatcaccaacaccagcaccctgctgaagaactaccaggacaacaacaagatgctggtgctggccctggagaatgagaagagcaaggtgaaggaggcccaggacatcatcctgcagctgaggaaggagtgctactacctgacctgccagctgtatgccctgaagggcaagctgaccagccagcagacagtggagcccgcccagaaccaggagatctgcagcagcggcatggaccccaacagtgatgacagcagcaggaacctgtttgtgaaggacctgccccagatccccctggaggagacagagctgcccggccagggcgagagcttccagatcgaggaccagatccccaccatcccccaggacaccctgggcgtggactttgattctggagaggccaagagcacagacaacgtgctgcccaggacagtgtctgtgcgcagcagcctgaagaagcactgcaacagcatctgccagtttgacagcctggatgactttgagaccagccacctggccggcaagagctttgaatttgagcgggtgggcttcctggaccccctggtgaacatgcacatcccagaaaatgtgcagcacaatgcctgccagtggagcaaggaccaggtgaacctgagccccaagctgatccagcccggcaccttcaccaagaccaaggaggacatcctggagagcaagtctgagcagaccaagagcaagcagagggacacccaggagaggaagcgggaggagaagaggaaggccaacagaaggaagagcaagaggatgagcaagtacaaggagaacaagtctgagaacaagaagacagtgccccagaagaagatgcacaagtctgtgagcagcaatgatgcctacaacttcaacctggaggagggcgtgcacctgacccccttccggcagaaggtgtccaatgacagcaaccgggaggagaacaatgaaagtgaggtgtccctgtgtgagagcagcggcagcggagatgacagtgatgacctgtacctgcccacctgcaagtacatccagaaccccaccagcaacagcgacaggcctgtgacccggcccctggccaagagggccctgaagtacacagatgagaaggagacagagggcagcaagcccaccaagacccccaccaccaccccacctgagacccagcagagcccccacctgagcctgaaggacatcaccaacgtgtccctgtaccctgtggtgaagatccggcggctgagcctgagccccaagaagaacaaggccagccctgctgtggccctgcccaagaggcgctgcacagcctctgtgaactacaaggagcccaccctggccagcaagctgcggcggggggaccccttcacagacctgtgcttcctgaacagccccatcttcaagcagaagaaggacctgcggcgcagcaagaagagggccctggaggtgtccccagccaaggaggccatcttcatcctgtactacgtgcgggagtttgtgagccgcttcccagactgcaggaagtgcaagctggagacccacatctgcctgaggtag

SEQ ID NO: 169666 - DNA, 879 bp, synthetic construct
  misc_feature 1..879: note = Description of Artificial Sequence: Synthetic coding sequence
  source 1..879: mol_type = other DNA
atggccaaggagcgctgcctgaagaagagcttccaggacagcctggaggacatcaagaagaggatgaaggagaagaggaacaagaacctggccgagatcggcaagaggaggagcttcatcgccgccccctgccagatcatcaccaacaccagcaccctgctgaagaactaccaggacaacaacaagatgctggtgctggccctggagaatgagaagagcaaggtgaaggaggcccaggacatcatcctgcagctgaggaaggagtgctactacctgacctgccagctgtatgccctgaagggcaagctgaccagccagcagacagtggagcccgcccagaaccaggagatctgcagcagcggcatggaccccaacagtgatgacagcagcaggaacctgtttgtgaaggacctgccccagatccccctggaggagacagagctgcccggccagggcgagagcttccagatcgaggccaccccacctgagacccagcagagcccccacctgagcctgaaggacatcaccaacgtgtccctgtaccctgtggtgaagatccggcggctgagcctgagccccaagaagaacaaggccagccctgctgtggccctgcccaagaggcgctgcacagcctctgtgaactacaaggagcccaccctggccagcaagctgcggcggggggaccccttcacagacctgtgcttcctgaacagccccatcttcaagcagaagaaggacctgcggcgcagcaagaagagggccctggaggtgtccccagccaaggaggccatcttcatcctgtactacgtgcgggagtttgtgagccgcttcccagactgcaggaagtgcaagctggagacccacatctgcctgaggtag

SEQ ID NO: 169667 - DNA, 648 bp, synthetic construct
  misc_feature 1..648: note = Description of Artificial Sequence: Synthetic coding sequence
  source 1..648: mol_type = other DNA
atggccaaggagcgctgcctgaagaagagcttccaggacagcctggaggacatcaagaagaggatgaaggagaagaggaacaagaacctggccgagatcggcaagaggaggagcttcatcgccgccccctgccagatcatcaccaacaccagcaccctgctgaagaactaccaggacaacaacaagatgctggtgctggccctggagaatgagaagagcaaggtgaaggaggcccaggacatcatcctgcagctgaggaaggagtgctactacctgacctgccagctgtatgccctgaagggcaagctgaccagccagcagacagtggagcccgcccagaaccaggagatctgcagcagcggcatggaccccaacagtgatgacagcagcaggaacctgtttgtgaaggacctgccccagatccccctggaggagacagagctgcccggccagggcgagagcttccagatcgaggaccagatccccaccatcccccaggacaccctgggcgtggactttgattctggggccctggaggtgtccccagccaaggaggccatcttcatcctgtactacgtgcgggagtttgtgagccgcttcccagactgcaggaagtgcaagctggagacccacatctgcctgaggtag

SEQ ID NO: 169668 - DNA, 1584 bp, synthetic construct
  misc_feature 1..1584: note = Description of Artificial Sequence: Synthetic coding sequence
  source 1..1584: mol_type = other DNA
atggccaaggagcgctgcctgaagaagagcttccaggacagcctggaggacatcaagaagaggatgaaggagaagaggaacaagaacctggccgagatcggcaagaggaggagcttcatcgccgccccctgccagatcatcaccaacaccagcaccctgctgaagaactaccaggacaacaacaagatgctggtgctggccctggagaatgagaagagcaaggtgaaggaggcccaggacatcatcctgcagctgaggaaggagtgctactacctgacctgccagctgtatgccctgaagggcaagctgaccagccagcagacagtggagcccgcccagaaccaggagatctgcagcagcggcatggaccccaacagtgatgacagcagcaggaacctgtttgtgaaggacctgccccagatccccctggaggagacagagctgcccggccagggcgagagcttccagatcgaggaccagatccccaccatcccccaggacaccctgggcgtggactttgattctggagaggccaagagcacagacaacgtgctgcccaggacagtgtctgtgcgcagcagcctgaagaagcactgcaacagcatctgccagtttgacagcctggatgactttgagaccagccacctggccggcaagagctttgaatttgagcgggtgggcttcctggaccccctggtgaacatgcacatcccagaaaatgtgcagcacaatgcctgccagtggagcaaggaccaggtgaacctgagccccaagctgatccagcccggcaccttcaccaagaccaaggaggacatcctggagagcaagtctgagcagaccaagagcaagcagagggacacccaggagaggaagcgggaggagaagaggaaggccaacagaaggaagagcaagaggatgagcaagtacaaggagaacaagtctgagaacaagaagacagtgccccagaagaagatgcacaagtctgtgagcagcaatgatgcctacaacttcaacctggaggagggcgtgcacctgacccccttccggcagaaggtgtccaatgacagcaaccgggaggagaacaatgaaagtgaggtgtccctgtgtgagagcagcggcagcggagatgacagtgatgacctgtacctgcccacctgcaagtacatccagaaccccaccagcaacagcgacaggcctgtgacccggcccctggccaagagggccctgaagtacacagatgagaaggagacagagggcagcaagcccaccaagacccccaccaccaccccacctgagacccagcagagcccccacctgagcctgaaggacatcaccaacgtgtccctgtaccctgtggtgaagatccggcggctgagcctgagccccaagaagaacaaggccagccctgctgtggccctgcccaagaggcgctgcacagcctctgtgaactacaaggagcccaccctggccagcaagctgcggcggggggaccccttcacagacctgtgcttcctgaacagccccatcttcaagcagaagaaggacctgcggcgcagcaagaagtccatgaagcagatccagtag

SEQ ID NO: 169669 - DNA, 1584 bp, synthetic construct; identical to SEQ ID NO: 169668
  misc_feature 1..1584: note = Description of Artificial Sequence: Synthetic coding sequence
  source 1..1584: mol_type = other DNA

SEQ ID NO: 169670 - DNA, 828 bp, synthetic construct
  misc_feature 1..828: note = Description of Artificial Sequence: Synthetic coding sequence
  source 1..828: mol_type = other DNA
atggccaaggagcgctgcctgaagaagagcttccaggacagcctggaggacatcaagaagaggatgaaggagaagaggaacaagaacctggccgagatcggcaagaggaggagcttcatcgccgccccctgccagatcatcaccaacaccagcaccctgctgaagaactaccaggacaacaacaagatgctggtgctggccctggagaatgagaagagcaaggtgaaggaggcccaggacatcatcctgcagctgaggaaggagtgctactacctgacctgccagctgtatgccctgaagggcaagctgaccagccagcagacagtggagcccgcccagaaccaggagatctgcagcagcggcatggaccccaacagtgatgacagcagcaggaacctgtttgtgaaggacctgccccagatccccctggaggagacagagctgcccggccagggcgagagcttccagatcgaggaccagatccccaccatcccccaggacaccctgggcgtggactttgattctgccaccccacctgagacccagcagagcccccacctgagcctgaaggacatcaccaacgtgtccctgtaccctgtggtgaagatccggcggctgagcctgagccccaagaagaacaaggccagccctgctgtggccctgcccaagaggcgctgcacagcctctgtgaactacaaggagcccaccctggccagcaagctgcggcggggggaccccttcacagacctgtgcttcctgaacagccccatcttcaagcagaagaaggacctgcggcgcagcaagaagtccatgaagcagatccagtag

SEQ ID NO: 169671 - DNA, 930 bp, synthetic construct
  misc_feature 1..930: note = Description of Artificial Sequence: Synthetic coding sequence
  source 1..930: mol_type = other DNA
atggccaaggagcgctgcctgaagaagagcttccaggacagcctggaggacatcaagaagaggatgaaggagaagaggaacaagaacctggccgagatcggcaagaggaggagcttcatcgccgccccctgccagatcatcaccaacaccagcaccctgctgaagaactaccaggacaacaacaagatgctggtgctggccctggagaatgagaagagcaaggtgaaggaggcccaggacatcatcctgcagctgaggaaggagtgctactacctgacctgccagctgtatgccctgaagggcaagctgaccagccagcagacagtggagcccgcccagaaccaggagatctgcagcagcggcatggaccccaacagtgatgacagcagcaggaacctgtttgtgaaggacctgccccagatccccctggaggagacagagctgcccggccagggcgagagcttccagatcgaggaccagatccccaccatcccccaggacaccctgggcgtggactttgattctgccaccccacctgagacccagcagagcccccacctgagcctgaaggacatcaccaacgtgtccctgtaccctgtggtgaagatccggcggctgagcctgagccccaagaagaacaaggccagccctgctgtggccctgcccaagaggcgctgcacagcctctgtgaactacaaggagcccaccctggccagcaagctgcggcggggggaccccttcacagacctgtgcttcctgaacagccccatcttcaagcagaagaaggacctgcggcgcagcaagaagagggccctggaggtgtccccagccaaggaggccatcttcatcctgtactacgtgcgggagtttgtgagccgcttcccagactgcaggaagtgcaagctggagacccacatctgcctgaggtag

SEQ ID NO: 169672 - DNA, 1686 bp, synthetic construct; identical to SEQ ID NO: 169665
  misc_feature 1..1686: note = Description of Artificial Sequence: Synthetic coding sequence
  source 1..1686: mol_type = other DNA

SEQ ID NO: 169673 - DNA, 930 bp, synthetic construct; identical to SEQ ID NO: 169671
  misc_feature 1..930: note = Description of Artificial Sequence: Synthetic coding sequence
  source 1..930: mol_type = other DNA

SEQ ID NO: 169674 - DNA, 777 bp, synthetic construct
  misc_feature 1..777: note = Description of Artificial Sequence: Synthetic coding sequence
  source 1..777: mol_type = other DNA
atggccaaggagcgctgcctgaagaagagcttccaggacagcctggaggacatcaagaagaggatgaaggagaagaggaacaagaacctggccgagatcggcaagaggaggagcttcatcgccgccccctgccagatcatcaccaacaccagcaccctgctgaagaactaccaggacaacaacaagatgctggtgctggccctggagaatgagaagagcaaggtgaaggaggcccaggacatcatcctgcagctgaggaaggagtgctactacctgacctgccagctgtatgccctgaagggcaagctgaccagccagcagacagtggagcccgcccagaaccaggagatctgcagcagcggcatggaccccaacagtgatgacagcagcaggaacctgtttgtgaaggacctgccccagatccccctggaggagacagagctgcccggccagggcgagagcttccagatcgaggccaccccacctgagacccagcagagcccccacctgagcctgaaggacatcaccaacgtgtccctgtaccctgtggtgaagatccggcggctgagcctgagccccaagaagaacaaggccagccctgctgtggccctgcccaagaggcgctgcacagcctctgtgaactacaaggagcccaccctggccagcaagctgcggcggggggaccccttcacagacctgtgcttcctgaacagccccatcttcaagcagaagaaggacctgcggcgcagcaagaagtccatgaagcagatccagtag

SEQ ID NO: 169675 - DNA, 828 bp, synthetic construct; identical to SEQ ID NO: 169670
  misc_feature 1..828: note = Description of Artificial Sequence: Synthetic coding sequence
  source 1..828: mol_type = other DNA

SEQ ID NO: 169676 - DNA, 777 bp, synthetic construct; identical to SEQ ID NO: 169674
  misc_feature 1..777: note = Description of Artificial Sequence: Synthetic coding sequence
  source 1..777: mol_type = other DNA

SEQ ID NO: 169677 - DNA, 879 bp, synthetic construct; identical to SEQ ID NO: 169666
  misc_feature 1..879: note = Description of Artificial Sequence: Synthetic coding sequence
  source 1..879: mol_type = other DNA

SEQ ID NO: 169678 - DNA, 3798 bp, synthetic construct
  misc_feature 1..3798: note = Description of Artificial Sequence: Synthetic coding sequence
  source 1..3798: mol_type = other DNA
atggagtgccctgtgatggagaccggcagcctcttcaccagcggcatcaagaggcacctgaaggacaagaggatcagcaagaccaccaagctgaatgtgtccctggccagcaagatcaagaccaagatcctgaacaacagcagcatcttcaagatcagcctgaagcacaacaacagagccctggcccaggccctgagccgggagaaggagaacagccgccgcatcaccacagagaagatgctgctgcagaaggaggtggagaagctgaactttgagaacaccttcctgcggctgaagctgaacaacctgaacaagaagctgattgacatcgaggccctgatgaacaacaacctgatcacagccatcgagatgagcagcctgtctgagttccaccagagcagcttcctgctgagcgccagcaagaagaagaggatcagcaagcagtgcaagctgatgaggctgccctttgcccgggtgcccctgaccagcaatgatgatgaagatgaggacaaggagaagatgcagtgtgacaacaacatcaagagcaagaccctgcctgacatccccagcagcggcagcaccacccagcccctgagcacccaggacaacagcgaggtgctcttcctgaaggagaacaaccagaatgtgtatggcctggatgacagcgagcacatcagcagcatcgtggatgtgcccccccgggagagccacagccacagcgaccagagcagcaagaccagcctgatgtctgagatgagaaatgcccagagcatcggccgccgctgggagaagcccagccccagcaatgtgacagagaggaagaagaggggcagctcctgggagagcaacaacctgtctgctgacaccccctgtgccaccgtgctggacaagcagcacatcagcagccctgagctgaactgcaacaatgagatcaatggccacaccaatgagaccaacacagagatgcagaggaacaagcaggacctgcccggcctgagcagcgagagcgcccgggagcccaatgctgagtgcatgaaccagattgaagataatgatgacttccagctgcagaagacagtgtatgatgctgacatggacctgacagccagcgaggtgtccaagatcgtgacagtgtccacaggcatcaagaagaagagcaacaagaagaccaatgaacatggcatgaagaccttcaggaaggtgaaggacagcagcagcgagaagaagcgggagaggagcaagaggcagttcaagaacagcagtgatgtggacattggagagaagattgagaacagaacagagaggagtgatgtgctggatggcaagagaggagctgaggaccccggcttcatcttcaacaatgagcagctggcccagatgaatgagcagctggcccaggtgaatgagctgaagaagatgaccctgcagacaggctttgagcagggcgacagagaaaatgtgctgtgcaacaagaaggagaagaggatcaccaatgagcaggaggagacctacagcctgagccagagcagcggcaagttccaccaggagagcaagtttgataaaggccagaacagcctgacctgcaacaagagcaaggccagccggcagaccttcgtcatccacaagctggagaaggacaacctgctgcccaaccagaaggacaaggtgaccatctatgagaacctggatgtgaccaatgagttccacacagccaacctgagcaccaaggacaatggaaacctgtgtgactatggcacccacaacatcctggacctgaagaagtatgtgacagacatccagcccagcgagcagaatgaaagcaacatcaacaagctgaggaagaaggtgaacaggaagacagagatcatcagcggcatgaaccacatgtatgaagataatgacaaggatgtggtgcacggcctgaagaagggcaacttcttcttcaagacccaggaggacaaggagcccatcagtgaaaatattgaggtgtccaaggagctgcagatcccagccctgagcacccgggacaatgaaaaccagtgtgactaccgcacccagaatgtgctgggcctgcagaagcagatcaccaacatgtaccctgtgcagcagaatgaaagcaaggtgaacaagaagctgcggcagaaggtgaacaggaagacagagatcatcagcgaggtgaaccacctggacaatgacaagagcattgagtacacagtgaagagccacagcctcttcctgacccagaaggacaaggagatcatccctggcaacctggaggaccccagcgagtttgagaccccagccctgagcaccaaggacagcggcaacctgtatgacagcgagatccagaatgtgctgggcgtgaagcacggccatgacatgcagcctgcctgccagaatgacagcaagattggcaagaagccccggctgaatgtgtgccagaagtctgagatcatccctgagaccaaccagatctatgaaaatgacaacaagggcgtgcatgacctggagaaggacaacttcttcagcctgacccccaaggacaaggagaccatcagcgagaacctgcaggtgaccaatgagttccagacagtggacctgctgatcaaggacaatggaaacctgtgtgactatgacacccagaacatcctggagctgaagaagtatgtgacagacaggaagtctgctgagcagaatgaaagcaagatcaacaagctgaggaacaaggtgaactggaagacagagatcatcagcgagatgaaccagatctatgaagataatgacaaggatgcccacgtgcaggagagctacaccaaggacctggacttcaaggtgaacaagagcaagcagaagctggagtgccaggacatcatcaacaagcactacatggaggtgaacagcaatgagaaggagagctgtgaccagatcctggacagctacaaggtggtgaagaagaggaagaaggagagcagctgcaaggccaagaacatcctgaccaaggccaagaacaagctggccagccagctgacagagagcagccagaccagcatcagcctggagagtgacctgaagcacatcaccagcgaggccgacagcgaccccggcaaccctgtggagctgtgcaagacccagaagcagagcaccaccaccctgaacaagaaggacctgccctttgtggaggagatcaaggagggggagtgccaggtgaagaaggtgaacaagatgaccagcaagagcaagaagaggaagaccagcattgaccccagccctgagagccatgaggtgatggagcgcatcctggacagcgtgcagggcaagagcacagtgtctgagcaggccgacaaggagaacaacctggagaatgagaagatggtgaagaacaagccagacttctacaccaaggccttccgcagcctgtctgagatccacagccccaacatccaggacagcagctttgacagcgtgcgggagggcctggtgcccctgtctgtgagcagcggcaagaatgtcatcatcaaggagaactttgccctggagtgcagccctgccttccaggtgtctgatgatgaacatgagaagatgaacaagatgaagttcaaggtgaacagaaggacccagaagagcggcatcggggaccggcccctgcaggacctgagcaacaccagctttgtgagcaacaacacagctgagagcgagaacaagtctgaggacctgagcagcgagaggaccagcagaagaagacgctgcacccccttctacttcaaggagcccagcctgcgggacaagatgagaagatag

SEQ ID NO: 169679 - DNA, 744 bp, synthetic construct
  misc_feature 1..744: note = Description of Artificial Sequence: Synthetic coding sequence
  source 1..744: mol_type = other DNA
atggagtgccctgtgatggagaccggcagcctcttcaccagcggcatcaagaggcacctgaaggacaagaggatcagcaagaccaccaagctgaatgtgtccctggccagcaagatcaagaccaagatcctgaacaacagcagcatcttcaagatcagcctgaagcacaacaacagagccctggcccaggccctgagccgggagaaggagaacagccgccgcatcaccacagagaagatgctgctgcagaaggaggtggagaagctgaactttgagaacaccttcctgcggctgaagctgaacaacctgaacaagaagctgattgacatcgaggccctgatgaacaacaacctgatcacagccatcgagatgagcagcctgtctgagttccaccagagcagcttcctgctgagcgccagcaagaagaagaggatcagcaagcagtgcaagctgatgaggctgccctttgcccgggtgcccctgaccagcaatgatgatgaagatgaggacaaggagaagatgcagtgtgacaacaacatcaagagcaagaccctgcctgacatccccagcagcggcagcaccacccagcccctgagcacccaggacaacagcgaggtgctcttcctgaaggagaacaaccagaatgtgtatggcctggatgacagcgagcacatcagcagcatcgtggatgtgcccccaagaggagaaattgtgctgaagatccactttgagtacctgtactag

SEQ ID NO: 169680 - DNA, 264 bp, synthetic construct
  misc_feature 1..264: note = Description of Artificial Sequence: Synthetic coding sequence
  source 1..264: mol_type = other DNA
atggagtgccctgtgatggagaccggcagcctcttcaccagcggcatcaagaggcacctgaaggacaagaggatcagcaagaccaccaagctgaatgtgtccctggccagcaagatcaagaccaagatcctgaacaacagcagcatcttcaagatcagcctgaagcacaacaacagagccctggcccaggccctgagccgggagaaggagaacagccgccgcatcaccacagagaagatgctgctgcagaaggaggtggagtag

SEQ ID NO: 169681 - DNA, 753 bp, synthetic construct
  misc_feature 1..753: note = Description of Artificial Sequence: Synthetic coding sequence
  source 1..753: mol_type = other DNA
atgagcatcttcacccccaccaaccagatccggctgaccaacgtggccgtggtgaggatgaagagagctgggaagagatttgaaattgcctgctacaagaacaaggtggtgggctggaggtctggagtggagaaggacctggatgaggtgctgcagacccacagcgtgtttgtgaatgtgtccaagggccaggtggccaagaaggaggacctgatcagcgcctttggaacagatgaccagacagagatctgcaagcagatcctgaccaagggggaggtgcaggtgtctgacaaggagcggcacacccagctggagcagatgttccgggacatcgccaccatcgtggccgacaagtgtgtgaaccctgagaccaagaggccctacaccgtcatcctgattgagcgggccatgaaggacatccactacagcgtgaagaccaacaagagcaccaagcagcaggccctggaggtgatcaagcagctgaaggagaagatgaagattgagcgggcccacatgaggctgcgcttcatcctgcctgtgaatgaaggcaagaagctgaaggagaagctgaagcccctcatcaaggtgattgaaagtgaggactatggccagcagctggagatcgtgtgcctgattgaccccggctgcttccgggagattgatgagctgatcaagaaggagaccaagggcaagggcagcctggaggtgctgaacctgaaggatgtggaggagggagatgagaagtttgaatag

SEQ ID NO: 169682 - DNA, 1572 bp, synthetic construct
  misc_feature 1..1572: note = Description of Artificial Sequence: Synthetic coding sequence
  source 1..1572: mol_type = other DNA
atggtggcccctggcctggtgctgggcctggtgctgcccctcatcctgtgggccgacagatctgctggcatcggcttccgctttgccagctacatcaacaatgacatggtgctgcagaaggagcctgctggagctgtgatctggggcttcggcacccctggggccaccgtgacagtgaccctgcggcagggccaggagaccatcatgaagaaggtgacctctgtgaaggcccacagcgacacctggatggtggtgctggaccccatgaagccaggcggcccctttgaggtgatggcccagcagaccctggagaagatcaacttcaccctgcgggtgcatgatgtgctgtttggagatgtgtggctgtgcagcggccagagcaacatgcagatgacagtgctgcagatcttcaatgccacccgggagctgagcaacacagctgcctaccagagcgtgcgcatcctgtctgtgagccccatccaggccgagcaggagctggaggacctggtggccgtggacctgcagtggagcaagcccaccagcgagaacctgggccacggctacttcaagtacatgtctgctgtgtgctggctgtttggccgccacctgtatgacaccctgcagtaccccatcggcctcatcgccagctcctggggcggcacccccatcgaggcctggagcagcggccgcagcctgaaggcctgtggggtgcccaagcagggcagcatcccctatgattctgtgacaggccccagcaagcacagcgtgctgtggaatgccatgatccaccccctgtgcaacatgaccctgaagggcgtggtgtggtaccagggcgagagcaacatcaactacaacacagacctgtacaactgcaccttccctgccctgattgaggactggagggagaccttccaccggggcagccagggccagacagagcgcttcttccccttcggcctggtgcagctgagcagtgacctgagcaagaagagcagtgatgatggcttcccccagatccgctggcaccagacagctgactttggctacgtgcccaaccccaagatgcccaacaccttcatggctgtggccatggacctgtgtgaccgggacagccccttcggcagcatccacccccgggacaagcagacagtggcctaccgcctgcacctgggcgcccgggccctggcctatggagagaagaacctgacctttgagggccccctgcctgagaagattgagctgctggcccacaagggcctgctgaacctgacctactaccagcagatccaggtgcagaagaaggacaacaagatctttgagatcagctgctgcagcgaccaccgctgcaagtggctgcctgcctccatgaacacagtgtccacccagagcctgaccctggccatcgacagctgccacggcaccgtggtggccctgcgctatgcctggaccacctggccctgtgagtacaagcagtgccccctgtaccaccccagcagcgccctgcctgccccacccttcatcgccttcatcacagaccagggccctggccaccagagcaatgtggccaagtag

SEQ ID NO: 169683 - DNA, 1467 bp, synthetic construct
  misc_feature 1..1467: note = Description of Artificial Sequence: Synthetic coding sequence
  source 1..1467: mol_type = other DNA
atggtgctgcagaaggagcctgctggggccgtcatctggggcttcggcacccctggggccaccgtgacagtgaccctgcggcagggccaggagaccatcatgaagaaggtgacctctgtgaaggcccacagcgacacctggatggtggtgctggaccccatgaagccaggcggcccctttgaggtgatggcccagcagaccctggagaagatcaacttcaccctgcgggtgcatgatgtgctgtttggagatgtgtggctgtgcagcggccagagcaacatgcagatgacagtgctgcagatcttcaatgccacccgggagctgagcaacacagctgcctaccagagcgtgcgcatcctgtctgtgagccccatccaggccgagcaggagctggaggacctggtggccgtggacctgcagtggagcaagcccaccagcgagaacctgggccacggctacttcaagtacatgtctgctgtgtgctggctgtttggccgccacctgtatgacaccctgcagtaccccatcggcctgattgccagctcctggggcggcacccccatcgaggcctggagcagcggccgcagcctgaaggcctgtggggtgcccaagcagggcagcatcccctatgacagcgtgacaggccccagcaagcacagcgtgctgtggaatgccatgatccaccccctgtgcaacatgaccctgaagggcgtggtgtggtaccagggcgagagcaacatcaactacaacacagacctgtacaactgcaccttccctgccctgattgaggactggagggagaccttccaccggggcagccagggccagacagagcgcttcttccccttcggcctggtgcagctgagcagtgacctgagcaagaagagcagtgatgatggcttcccccagatccgctggcaccagacagctgactttggctacgtgcccaaccccaagatgcccaacaccttcatggctgtggccatggacctgtgtgaccgggacagccccttcggcagcatccacccccgggacaagcagacagtggcctaccgcctgcacctgggcgcccgggccctggcctacggggagaagaacctgacctttgagggccccctgcctgagaagattgagctgctggcccacaagggcctgctgaacctgacctactaccagcagatccaggtgcagaagaaggacaacaagatctttgagatcagctgctgcagcgaccaccgctgcaagtggctgcctgcctccatgaacacagtgtccacccagagcctgaccctggccatcgacagctgccacggcaccgtggtggccctgcgctatgcctggaccacctggccctgtgagtacaagcagtgccccctgtaccaccccagcagcgccctgcctgccccacccttcatcgccttcatcacagaccagggccctggccaccagagcaatgtggccaagtag

SEQ ID NO: 169684 - DNA, 2094 bp, synthetic construct
  misc_feature 1..2094: note = Description of Artificial Sequence: Synthetic coding sequence
  source 1..2094: mol_type = other DNA
atgctgctgcccctgctgctgagcagcctgctgggcggcagccaggccatggatggccgcttctggatccgggtgcaggagagcgtgatggtgcctgagggcctgtgcatctctgtgccctgcagcttctcctacccccggcaggactggacaggcagcaccccagcctacggctactggttcaaggctgtgacagagaccaccaagggggcccctgtggccaccaaccaccagagccgggaggtggagatgagcacccggggccgcttccagctgactggagaccctgccaagggcaactgcagcctggtgatcagagatgcccagatgcaggatgagagccagtacttcttccgggtggagcggggcagctatgtgcgctacaacttcatgaatgatggcttcttcctgaaggtgacagccctgacccagaagccagatgtgtacatccctgagaccctggagcccggccagcctgtgaccgtcatctgtgtgttcaactgggcctttgaggagtgccccccacccagcttctcctggacaggagctgccctgagcagccagggcaccaagcccaccaccagccacttctctgtgctgtccttcaccccccggccccaggaccacaacacagacctgacctgccacgtggacttcagcaggaagggcgtgtctgcccagaggacagtgcggctgcgggtggcctatgccccccgggacctggtgatcagcatcagccgggacaacaccccagccctggagccccagccccagggcaatgtgccctacctggaggcccagaagggccagttcctgcggctgctgtgtgccgctgacagccagcccccagccaccctgtcctgggtgctgcagaacagagtgctgagcagcagccacccctggggcccccggcccctgggcctggagctgcccggggtgaaggccggggacagcggccgctacacctgcagagctgagaaccggctgggcagccagcagagggccctggacctgtctgtgcagtaccccccagagaacctgcgggtgatggtgtcccaggccaacagaacagtgctggagaacctgggcaatggcaccagcctgcctgtgctggagggccagagcctgtgcctggtgtgtgtgacccacagcagccccccagcccggctgtcctggacccagaggggccaggtgctgagccccagccagcccagcgaccccggggtgctggagctgccccgggtgcaggtggagcatgaaggagagttcacctgccacgcccggcaccccctgggcagccagcacgtgtccctgagcctgtctgtgcactacagccccaagctgctgggccccagctgctcctgggaggccgagggcctgcactgcagctgcagcagccaggccagccctgcccccagcctgcgctggtggctgggggaggagctgctggagggcaacagcagccaggacagctttgaggtgacccccagcagcgctggcccctgggccaacagcagcctgagcctgcacggcggcctgagcagcggcctgcggctgcgctgtgaggcctggaatgtgcatggagcccagagcggcagcatcctgcagctgcctgacaagaagggcctcatcagcacagccttcagcaatggagccttcctgggcatcggcatcacagccctgctcttcctgtgcctggccctgatcatcatgaagatcctgcccaagaggaggacccagacagagaccccccggccccgcttcagccgccacagcaccatcctggactacatcaacgtggtgcccacagctggccccctggcccagaagaggaaccagaaggccacccccaacagccccaggacccccctgcccccaggggcccccagccctgagagcaagaagaaccagaagaagcagtaccagctgcccagcttccctgagcccaagagcagcacccaggcccctgagagccaggagagccaggaggagctgcactacgccaccctgaacttccctggggtgcggcccaggcctgaggccaggatgcccaagggcacccaggccgactatgcagaggtgaagttccagtag

SEQ ID NO: 169685 - DNA, 1809 bp, synthetic construct
  misc_feature 1..1809: note = Description of Artificial Sequence: Synthetic coding sequence
  source 1..1809: mol_type = other DNA
atgctgctgcccctgctgctgagcagcctgctgggcggcagccaggccatggatggccgcttctggatccgggtgcaggagagcgtgatggtgcctgagggcctgtgcatctctgtgccctgcagcttctcctacccccggcaggactggacaggcagcaccccagcctacggctactggttcaaggctgtgacagagaccaccaagggggcccctgtggccaccaaccaccagagccgggaggtggagatgagcacccggggccgcttccagctgactggagaccctgccaagggcaactgcagcctggtgatcagagatgcccagatgcaggatgagagccagtacttcttccgggtggagcggggcagctatgtgcgctacaacttcatgaatgatggcttcttcctgaaggtgacagccctgacccagaagccagatgtgtacatccctgagaccctggagcccggccagcctgtgaccgtcatctgtgtgttcaactgggcctttgaggagtgccccccacccagcttctcctggacaggagctgccctgagcagccagggcaccaagcccaccaccagccacttctctgtgctgtccttcaccccccggccccaggaccacaacacagacctgacctgccacgtggacttcagcaggaagggcgtgtctgcccagaggacagtgcggctgcgggtggcctatgccccccgggacctggtgatcagcatcagccgggacaacaccccagccctggagccccagccccagggcaatgtgccctacctggaggcccagaagggccagttcctgcggctgctgtgtgccgctgacagccagcccccagccaccctgtcctgggtgctgcagaacagagtgctgagcagcagccacccctggggcccccggcccctgggcctggagctgcccggggtgaaggccggggacagcggccgctacacctgcagagctgagaaccggctgggcagccagcagagggccctggacctgtctgtgcagtaccccccagagaacctgcgggtgatggtgtcccaggccaacagaacagtgctggagaacctgggcaatggcaccagcctgcctgtgctggagggccagagcctgtgcctggtgtgtgtgacccacagcagccccccagcccggctgtcctggacccagaggggccaggtgctgagccccagccagcccagcgaccccggggtgctggagctgccccgggtgcaggtggagcatgaaggagagttcacctgccacgcccggcaccccctgggcagccagcacgtgtccctgagcctgtctgtgcactacaagaagggcctcatcagcacagccttcagcaatggagccttcctgggcatcggcatcacagccctgctcttcctgtgcctggccctgatcatcatgaagatcctgcccaagaggaggacccagacagagaccccccggccccgcttcagccgccacagcaccatcctggactacatcaacgtggtgcccacagctggccccctggcccagaagaggaaccagaaggccacccccaacagccccaggacccccctgcccccaggggcccccagccctgagagcaagaagaaccagaagaagcagtaccagctgcccagcttccctgagcccaagagcagcacccaggcccctgagagccaggagagccaggaggagctgcactacgccaccctgaacttccctggggtgcggcccaggcctgaggccaggatgcccaagggcacccaggccgactatgcagaggtgaagttccagtag

SEQ ID NO: 169686 - DNA, 2094 bp, synthetic construct; identical to SEQ ID NO: 169684
  misc_feature 1..2094: note = Description of Artificial Sequence: Synthetic coding sequence
  source 1..2094: mol_type = other DNA

SEQ ID NO: 169687 - DNA, 1560 bp, synthetic construct
  misc_feature 1..1560: note = Description of Artificial Sequence: Synthetic coding sequence
  source 1..1560: mol_type = other DNA
atgctgctgcccctgctgctgagcagcctgctgggcggcagccaggccatggatggccgcttctggatccgggtgcaggagagcgtgatggtgcctgagggcctgtgcatctctgtgccctgcagcttctcctacccccggcaggactggacaggcagcaccccagcctacggctactggttcaaggctgtgacagagaccaccaagggggcccctgtggccaccaaccaccagagccgggaggtggagatgagcacccggggccgcttccagctgactggagaccctgccaagggcaactgcagcctggtgatcagagatgcccagatgcaggatgagagccagtacttcttccgggtggagcggggcagctatgtgcgctacaacttcatgaatgatggcttcttcctgaaggtgacagccctgacccagaagacagtgcggctgcgggtggcctatgccccccgggacctggtgatcagcatcagccgggacaacaccccagccctggagccccagccccagggcaatgtgccctacctggaggcccagaagggccagttcctgcggctgctgtgtgccgctgacagccagcccccagccaccctgtcctgggtgctgcagaacagagtgctgagcagcagccacccctggggcccccggcccctgggcctggagctgcccggggtgaaggccggggacagcggccgctacacctgcagagcagaaaatcggctgggcagccagcagagggccctggacctgtctgtgcagtacccacctgagaacctgcgggtgatggtgtcccaggccaacagaacagtgctggagaacctgggcaatggcaccagcctgcctgtgctggagggccagagcctgtgcctggtgtgtgtgacccacagcagccccccagcccggctgtcctggacccagaggggccaggtgctgagccccagccagcccagcgaccccggggtgctggagctgccccgggtgcaggtggagcacgagggggagttcacctgccacgcccggcaccccctgggcagccagcacgtgtccctgagcctgtctgtgcactacaagaagggcctcatcagcacagccttcagcaatggagccttcctgggcatcggcatcacagccctgctcttcctgtgcctggccctgatcatcatgaagatcctgcccaagaggaggacccagacagagaccccccggccccgcttcagccgccacagcaccatcctggactacatcaacgtggtgcccacagctggccccctggcccagaagaggaaccagaaggccacccccaacagccccaggacccccctgcccccaggggcccccagccctgagagcaagaagaaccagaagaagcagtaccagctgcccagcttccctgagcccaagagcagcacccaggcccctgagagccaggagagccaggaggagctgcactacgccaccctgaacttccctggggtgcggcccaggcctgaggccaggatgcccaagggcacccaggccgactatgcagaggtgaagttccagtag

SEQ ID NO: 169688 - DNA, 1920 bp, synthetic construct
  misc_feature 1..1920: note = Description of Artificial Sequence: Synthetic coding sequence
  source 1..1920: mol_type = other DNA
atgctgctgcccctgctgctgagcagcctgctgggcggcagccaggccatggatggccgcttctggatccgggtgcaggagagcgtgatggtgcctgagggcctgtgcatctctgtgccctgcagcttctcctacccccggcaggactggacaggcagcaccccagcctacggctactggttcaaggctgtgacagagaccaccaagggggcccctgtggccaccaaccaccagagccgggaggtggagatgagcacccggggccgcttccagctgactggagaccctgccaagggcaactgcagcctggtgatcagagatgcccagatgcaggatgagagccagtacttcttccgggtggagcggggcagctatgtgcgctacaacttcatgaatgatggcttcttcctgaaggtgacagtgctgtccttcaccccccggccccaggaccacaacacagacctgacctgccacgtggacttcagcaggaagggcgtgtctgcccagaggacagtgcggctgcgggtggcctatgccccccgggacctggtgatcagcatcagccgggacaacaccccagccctggagccccagccccagggcaatgtgccctacctggaggcccagaagggccagttcctgcggctgctgtgtgccgctgacagccagcccccagccaccctgtcctgggtgctgcagaacagagtgctgagcagcagccacccctggggcccccggcccctgggcctggagctgcccggggtgaaggccggggacagcggccgctacacctgcagagctgagaaccggctgggcagccagcagagggccctggacctgtctgtgcagtaccccccagagaacctgcgggtgatggtgtcccaggccaacagaacagtgctggagaacctgggcaatggcaccagcctgcctgtgctggagggccagagcctgtgcctggtgtgtgtgacccacagcagccccccagcccggctgtcctggacccagaggggccaggtgctgagccccagccagcccagcgaccccggggtgctggagctgccccgggtgcaggtggagcatgaaggagagttcacctgccacgcccggcaccccctgggcagccagcacgtgtccctgagcctgtctgtgcactacagccccaagctgctgggccccagctgctcctgggaggccgagggcctgcactgcagctgcagcagccaggccagccctgcccccagcctgcgctggtggctgggggaggagctgctggagggcaacagcagccaggacagctttgaggtgacccccagcagcgctggcccctgggccaacagcagcctgagcctgcacggcggcctgagcagcggcctgcggctgcgctgtgaggcctggaatgtgcatggagcccagagcggcagcatcctgcagctgcctgacaagaagggcctcatcagcacagccttcagcaatggagccttcctgggcatcggcatcacagccctgctcttcctgtgcctggccctgatcatcatgaagatcctgcccaagaggaggacccagacagagaccccccggccccgcttcagccgccacagcaccatcctggactacatcaacgtggtgcccacagctggccccctggcccagaagaggaaccagaaggccacccccaacagccccaggacccccctgcccccaggggcccccagccctgagagcaagaagaaccagaagaagcagtaccagctgcccagcttccctgagcccaagagcagcacccaggcccctgagagccaggagagccaggaggagctgcactacgccaccctgaacttccctggggtgcggcccaggcctgaggccaggatgcccaagggcacccaggccgactatgcagaggtgaagttccagtag

SEQ ID NO: 169689 - DNA, 1635 bp, synthetic construct
  misc_feature 1..1635: note = Description of Artificial Sequence: Synthetic coding sequence
  source 1..1635: mol_type = other DNA
atgctgctgcccctgctgctgagcagcctgctgggcggcagccaggccatggatggccgcttctggatccgggtgcaggagagcgtgatggtgcctgagggcctgtgcatctctgtgccctgcagcttctcctacccccggcaggactggacaggcagcaccccagcctacggctactggttcaaggctgtgacagagaccaccaagggggcccctgtggccaccaaccaccagagccgggaggtggagatgagcacccggggccgcttccagctgactggagaccctgccaagggcaactgcagcctggtgatcagagatgcccagatgcaggatgagagccagtacttcttccgggtggagcggggcagctatgtgcgctacaacttcatgaatgatggcttcttcctgaaggtgacagtgctgtccttcaccccccggccccaggaccacaacacagacctgacctgccacgtggacttcagcaggaagggcgtgtctgcccagaggacagtgcggctgcgggtggcctatgccccccgggacctggtgatcagcatcagccgggacaacaccccagccctggagccccagccccagggcaatgtgccctacctggaggcccagaagggccagttcctgcggctgctgtgtgccgctgacagccagcccccagccaccctgtcctgggtgctgcagaacagagtgctgagcagcagccacccctggggcccccggcccctgggcctggagctgcccggggtgaaggccggggacagcggccgctacacctgcagagctgagaaccggctgggcagccagcagagggccctggacctgtctgtgcagtaccccccagagaacctgcgggtgatggtgtcccaggccaacagaacagtgctggagaacctgggcaatggcaccagcctgcctgtgctggagggccagagcctgtgcctggtgtgtgtgacccacagcagccccccagcccggctgtcctggacccagaggggccaggtgctgagccccagccagcccagcgaccccggggtgctggagctgccccgggtgcaggtggagcatgaaggagagttcacctgccacgcccggcaccccctgggcagccagcacgtgtccctgagcctgtctgtgcactacaagaagggcctcatcagcacagccttcagcaatggagccttcctgggcatcggcatcacagccctgctcttcctgtgcctggccctgatcatcatgaagatcctgcccaagaggaggacccagacagagaccccccggccccgcttcagccgccacagcaccatcctggactacatcaacgtggtgcccacagctggccccctggcccagaagaggaaccagaaggccacccccaacagccccaggacccccctgcccccaggggcccccagccctgagagcaagaagaaccagaagaagcagtaccagctgcccagcttccctgagcccaagagcagcacccaggcccctgagagccaggagagccaggaggagctgcactacgccaccctgaacttccctggggtgcggcccaggcctgaggccaggatgcccaagggcacccaggccgactatgcagaggtgaagttccagtag

SEQ ID NO: 169690 - DNA, 1365 bp, synthetic construct
  misc_feature 1..1365: note = Description of Artificial Sequence: Synthetic coding sequence
  source 1..1365: mol_type = other DNA
atgctgctgcccctgctgctgagcagcctgctgggcggcagccaggccatggatggccgcttctggatccgggtgcaggagagcgtgatggtgcctgagggcctgtgcatctctgtgccctgcagcttctcctacccccggcaggactggacaggcagcaccccagcctacggctactggttcaaggctgtgacagagaccaccaagggggcccctgtggccaccaaccaccagagccgggaggtggagatgagcacccggggccgcttccagctgactggagaccctgccaagggcaactgcagcctggtgatcagagatgcccagatgcaggatgagagccagtacttcttccgggtggagcggggcagctatgtgcgctacaacttcatgaatgatggcttcttcctgaaggtgacagtgctgtccttcaccccccggccccaggaccacaacacagacctgacctgccacgtggacttcagcaggaagggcgtgtctgcccagaggacagtgcggctgcgggtggcctatgccccccgggacctggtgatcagcatcagccgggacaacaccccagaccccccagagaacctgcgggtgatggtgtcccaggccaacagaacagtgctggagaacctgggcaatggcaccagcctgcctgtgctggagggccagagcctgtgcctggtgtgtgtgacccacagcagccccccagcccggctgtcctggacccagaggggccaggtgctgagccccagccagcccagcgaccccggggtgctggagctgccccgggtgcaggtggagcatgaaggagagttcacctgccacgcccggcaccccctgggcagccagcacgtgtccctgagcctgtctgtgcactacaagaagggcctcatcagcacagccttcagcaatggagccttcctgggcatcggcatcacagccctgctcttcctgtgcctggccctgatcatcatgaagatcctgcccaagaggaggacccagacagagaccccccggccccgcttcagccgccacagcaccatcctggactacatcaacgtggtgcccacagctggccccctggcccagaagaggaaccagaaggccacccccaacagccccaggacccccctgcccccaggggcccccagccctgagagcaagaagaaccagaagaagcagtaccagctgcccagcttccctgagcccaagagcagcacccaggcccctgagagccaggagagccaggaggagctgcactacgccaccctgaacttccctggggtgcggcccaggcctgaggccaggatgcccaagggcacccaggccgactatgcagaggtgaagttccagtag

SEQ ID NO: 169691 - DNA, 1665 bp, synthetic construct
  misc_feature 1..1665: note = Description of Artificial Sequence: Synthetic coding sequence
  source 1..1665: mol_type = other DNA
atgctgctgcccctgctgctgagcagcctgctgggcggcagccaggccatggatggccgcttctggatccgggtgcaggagagcgtgatggtgcctgagggcctgtgcatctctgtgccctgcagcttctcctacccccggcaggactggacaggcagcaccccagcctacggctactggttcaaggctgtgacagagaccaccaagggggcccctgtggccaccaaccaccagagccgggaggtggagatgagcacccggggccgcttccagctgactggagaccctgccaagggcaactgcagcctggtgatcagagatgcccagatgcaggatgagagccagtacttcttccgggtggagcggggcagctatgtgcgctacaacttcatgaatgatggcttcttcctgaaggtgacaggcaccaagcccaccaccagccacttctctgtgctgtccttcaccccccggccccaggaccacaacacagacctgacctgccacgtggacttcagcaggaagggcgtgtctgcccagaggacagtgcggctgcgggtggcctatgccccccgggacctggtgatcagcatcagccgggacaacaccccagccctggagccccagccccagggcaatgtgccctacctggaggcccagaagggccagttcctgcggctgctgtgtgccgctgacagccagcccccagccaccctgtcctgggtgctgcagaacagagtgctgagcagcagccacccctggggcccccggcccctgggcctggagctgcccggggtgaaggccggggacagcggccgctacacctgcagagctgagaaccggctgggcagccagcagagggccctggacctgtctgtgcagtaccccccagagaacctgcgggtgatggtgtcccaggccaacagaacagtgctggagaacctgggcaatggcaccagcctgcctgtgctggagggccagagcctgtgcctggtgtgtgtgacccacagcagccccccagcccggctgtcctggacccagaggggccaggtgctgagccccagccagcccagcgaccccggggtgctggagctgccccgggtgcaggtggagcatgaaggagagttcacctgccacgcccggcaccccctgggcagccagcacgtgtccctgagcctgtctgtgcactacaagaagggcctcatcagcacagccttcagcaatggagccttcctgggcatcggcatcacagccctgctcttcctgtgcctggccctgatcatcatgaagatcctgcccaagaggaggacccagacagagaccccccggccccgcttcagccgccacagcaccatcctggactacatcaacgtggtgcccacagctggccccctggcccagaagaggaaccagaaggccacccccaacagccccaggacccccctgcccccaggggcccccagccctgagagcaagaagaaccagaagaagcagtaccagctgcccagcttccctgagcccaagagcagcacccaggcccctgagagccaggagagccaggaggagctgcactacgccaccctgaacttccctggggtgcggcccaggcctgaggccaggatgcccaagggcacccaggccgactatgcagaggtgaagttccagtag

SEQ ID NO: 169692 - DNA, 2097 bp, synthetic construct
  misc_feature 1..2097: note = Description of Artificial Sequence: Synthetic coding sequence
  source 1..2097: mol_type = other DNA
atggtgcccggccaggcccagccccagagccctgagatgctgctgctgcccctgctgctgcctgtgctgggcgccggcagcctgaacaaggaccccagctacagcctgcaggtgcagaggcaggtgcctgtgcctgagggcctgtgtgtgattgtgtcctgcaacctgagctaccccagagatggctgggatgagagcacagctgcctacggctactggttcaagggccgcaccagccccaagacaggagcccctgtggccaccaacaaccagagccgggaggtggagatgagcacccgggaccgcttccagctgaccggggaccccgggaagggcagctgcagcctggtgatcagagatgcccagcgggaggatgaggcctggtacttcttccgggtggagcggggcagccgggtgcgccacagcttcctgagcaatgccttcttcctgaaggtgacagccctgaccaagaagccagatgtgtacatccctgagaccctggagcccggccagcctgtgaccgtcatctgtgtgttcaactgggccttcaagaagtgcccagcccccagcttctcctggacaggagctgccctgagccccaggaggacccggcccagcaccagccacttctctgtgctgtccttcacccccagcccccaggaccatgacacagacctgacctgccacgtggacttcagcaggaaaggagtgtctgcccagaggacagtgcggctgcgggtggcctatgcccccaaggacctgatcatcagcatcagccatgacaacaccagcgccctggagctgcagggcaatgtcatctacctggaggtgcagaagggccagttcctgcggctgctgtgtgccgctgacagccagcccccagccaccctgtcctgggtgctgcaggacagagtgctgagcagcagccacccctggggccccaggaccctgggcctggagctgcggggcgtgcgggccggggacagcggccgctacacctgcagagcagaaaatcggctgggcagccagcagcaggccctggacctgtctgtgcagtacccacctgagaacctgcgggtgatggtgtcccaggccaacagaacagtgctggagaacctgggcaatggcaccagcctgcctgtgctggagggccagagcctgcggctggtgtgtgtgacccacagcagccccccagcccggctgtcctggacccgctggggccagacagtgggccccagccagcccagcgaccccggggtgctggagctgccccccatccagatggagcacgagggggagttcacctgccacgcccagcaccccctgggcagccagcacgtgtccctgagcctgtctgtgcactacccaccccagctgctgggccccagctgctcctgggaggccgagggcctgcactgcagctgcagcagccaggccagccctgcccccagcctgcgctggtggctgggggaggagctgctggagggcaacagcagccagggcagctttgaggtgacccccagcagcgctggcccctgggccaacagcagcctgagcctgcatggaggcctgagcagcggcctgcggctgcgctgcaaggcctggaatgtgcacggggcccagagcggcagcgtcttccagctgctgcccgggaagctggagcacggcggcggcctgggcctgggcgccgccctgggcgccggcgtggccgccctgctggccttctgcagctgcctggtggtgttccgggtgaagatctgcaggaaggaggccaggaagagagctgctgctgagcaggatgtgcccagcaccctgggccccatcagccagggccaccagcatgaatgttctgctggcagcagccaggaccaccccccacctggagctgccacctacacccctgggaagggggaggagcaggagctgcactacgccagcctgtccttccagggcctgcggctgtgggagcctgctgaccaggaggcccccagcaccacagagtacagcgagatcaagatccacacaggccagcccctgcggggccctggcttcggcctgcagctggagcgggagatgagcggcatggtgcccaagtag

SEQ ID NO: 169693 - DNA, 1809 bp, synthetic construct
  misc_feature 1..1809: note = Description of Artificial Sequence: Synthetic coding sequence
  source 1..1809: mol_type = other DNA
atggtgcccggccaggcccagccccagagccctgagatgctgctgctgcccctgctgctgcctgtgctgggcgccggcagcctgaacaaggaccccagctacagcctgcaggtgcagaggcaggtgcctgtgcctgagggcctgtgtgtgattgtgtcctgcaacctgagctaccccagagatggctgggatgagagcacagctgcctacggctactggttcaagggccgcaccagccccaagacaggagcccctgtggccaccaacaaccagagccgggaggtggagatgagcacccgggaccgcttccagctgaccggggaccccgggaagggcagctgcagcctggtgatcagagatgcccagcgggaggatgaggcctggtacttcttccgggtggagcggggcagccgggtgcgccacagcttcctgagcaatgccttcttcctgaaggtgacagccctgaccaagaagccagatgtgtacatccctgagaccctggagcccggccagcctgtgaccgtcatctgtgtgttcaactgggccttcaagaagtgcccagcccccagcttctcctggacaggagctgccctgagccccaggaggacccggcccagcaccagccacttctctgtgctgtccttcacccccagcccccaggaccatgacacagacctgacctgccacgtggacttcagcaggaaaggagtgtctgcccagaggacagtgcggctgcgggtggcctatgcccccaaggacctgatcatcagcatcagccatgacaacaccagcgccctggagctgcagggcaatgtcatctacctggaggtgcagaagggccagttcctgcggctgctgtgtgccgctgacagccagcccccagccaccctgtcctgggtgctgcaggacagagtgctgagcagcagccacccctggggccccaggaccctgggcctggagctgcggggcgtgcgggccggggacagcggccgctacacctgcagagcagaaaatcggctgggcagccagcagcaggccctggacctgtctgtgcagtacccacctgagaacctgcgggtgatggtgtcccaggccaacagaacagtgctggagaacctgggcaatggcaccagcctgcctgtgctggagggccagagcctgcggctggtgtgtgtgacccacagcagccccccagcccggctgtcctggacccgctggggccagacagtgggccccagccagcccagcgaccccggggtgctggagctgccccccatccagatggagcacgagggggagttcacctgccacgcccagcaccccctgggcagccagcacgtgtccctgagcctgtctgtgcactggaagctggagcacggcggcggcctgggcctgggcgccgccctgggcgccggcgtggccgccctgctggccttctgcagctgcctggtggtgttccgggtgaagatctgcaggaaggaggccaggaagagagctgctgctgagcaggatgtgcccagcaccctgggccccatcagccagggccaccagcatgaatgttctgctggcagcagccaggaccaccccccacctggagctgccacctacacccctgggaagggggaggagcaggagctgcactacgccagcctgtccttccagggcctgcggctgtgggagcctgctgaccaggaggcccccagcaccacagagtacagcgagatcaagatccacacaggccagcccctgcggggccctggcttcggcctgcagctggagcgggagatgagcggcatggtgcccaagtag

SEQ ID NO: 169694 - DNA, 1809 bp, synthetic construct; identical to SEQ ID NO: 169693
  misc_feature 1..1809: note = Description of Artificial Sequence: Synthetic coding sequence
  source 1..1809: mol_type = other DNA

SEQ ID NO: 169695 - DNA, 1788 bp, synthetic construct
  misc_feature 1..1788: note = Description of Artificial Sequence: Synthetic coding sequence
  source 1..1788: mol_type = other DNA
atgctgctgctgctgctgctgctgccccccctgctgtgtggccgggtgggcgccaaggagcagaaggactacctgctgaccatgcagaagtctgtgacagtgcaggagggcctgtgtgtgtctgtgctgtgcagcttctcctacccccagaatggctggacagccagtgaccctgtgcacggctactggttccgggccggggaccacgtgtccaggaacatccctgtggccaccaacaacccagcccgggctgtgcaggaggagacccgggaccgcttccacctgctgggggacccccagaacaaggactgcaccctgagcatccgggacacccgggagagtgatgctggcacctacgtgttctgtgtggagcggggcaacatgaagtggaactacaagtatgaccagctgtctgtgaatgtgacagccagccaggacctgctgagccgctaccgcctggaggtgcctgagagcgtgacagtgcaggagggcctgtgtgtgtctgtgccctgcagcgtgctgtacccccactacaactggacagccagcagccctgtgtatggctcctggttcaaggagggcgctgacatcccctgggacatccctgtggccaccaacaccccatctgggaaggtgcaggaggacacccacggccgcttcctgctgctgggggacccccagaccaacaactgcagcctgagcatcagagatgccaggaagggggacagcggcaagtactacttccaggtggagcggggcagcaggaagtggaactacatctatgacaagctgtctgtgcacgtgacagccctgacccacatgcccaccttcagcatccctggcaccctggagagcggccaccccaggaacctgacctgcagcgtgccctgggcctgtgagcagggcaccccacccaccatcacctggatgggcgcctctgtgagcagcctggaccccaccatcaccaggagctccatgctgagcctcatcccccagccccaggaccacggcaccagcctgacctgccaggtgaccctgcctggagctggggtgaccatgaccagggctgtgcggctgaacatctcctacccaccccagaacctgaccatgacagtgttccagggagatggaacagccagcaccaccctgagaaatggaagtgccctgtctgtgctggagggccagagcctgcacctggtgtgtgctgtggacagcaaccccccagcccggctgtcctggacctggggcagcctgaccctgagccccagccagagcagcaacctgggcgtgctggagctgccccgggtgcacgtgaaggatgaaggagagttcacctgccgggcccagaaccccctgggcagccagcacatcagcctgagcctgagcctgcagaatgagtacaccgggaagatgaggcccatctctggagtgaccctgggcgccttcggcggggccggggccacagccctggtgttcctgtacttctgcatcatctttgtggtggtgcgcagctgcaggaagaagagcgcccggcctgctgtgggcgtgggggacaccggcatggaggatgccaatgctgtgcggggcagcgccagccagggccccctgattgagagccctgcagatgacagccccccccaccacgcccccccagccctggccacccccagccctgaggagggggagatccagtatgccagcctgtccttccacaaggcccggccccagtacccccaggagcaggaggccatcggctatgagtacagcgagatcaacatccccaagtag

SEQ ID NO: 169696 - DNA, 1290 bp, synthetic construct
  misc_feature 1..1290: note = Description of Artificial Sequence: Synthetic coding sequence
  source 1..1290: mol_type = other DNA
atgcccctgtgcaggcctgagcacctgatgccccgggccagccgggtgcctgtggccgccagcctgcccctgagccatgctgtgatccccacccagctgcccagcaggcctggccacaggcctcctggccggccccggcgctgccccaaggccagctgcctgcccccacctgtgggccccagcagcacccagacagccaagagggtgaccatgggctggccccggcccggccgggccctggtggccgtgaaggccctgctggtgctgagcctgctgcaggtgcctgcccaggccgtggtgcgggctgtgctggaggacaacagcagctctgtggactttgctgacctgcctgccctgtttggagtgcccctggcccctgagggcatccggggctacctgatggaggtgaagccagccaatgcctgccaccccatcgaggccccccggctgggcaacagaagcctgggcgccatcgtgctgatccgccgctatgactgcacctttgacctgaaggtgctgaatgcccagagagctggctttgaggccgccatcgtgcacaacgtgcacagtgatgacctggtgtccatgacccacgtgtatgaggacctgcggggccagatcgccatccccagcgtgtttgtgtctgaggccgccagccaggacctgcgggtcatcctgggctgcaacaagagcgcccacgccctgctgctgcctgatgatcctccctgccacgacctgggctgccaccctgtgctgactgtgtcctgggtgctgggctgcaccctggccctggtggtgtctgccttctttgtgctgaaccacctgtggctgtgggcccaggcctgctgcagccaccggcggcctgtgaagaccagcacctgccagaaggcccaggtgaggaccttcacctggcacaatgacctgtgtgccatctgcctggatgaatatgaggagggggaccagctgaagatcctgccctgcagccacacctaccactgcaagtgcatcgacccctggttcagccaggcccccaggaggagctgccctgtgtgcaagcagagcgtggccgccacagaagattcttttgacagcaccacctacagcttcagagatgaggaccccagcctgcccggccacaggcctcccatctgggccatccaggtgcagctgcggagccggcggctggagctgctgggccgggccagcccccactgccactgcagcaccaccagcctggaggccgagtacaccaccgtgtcctctgcccctcctgaggcccctggccagtag

SEQ ID NO: 169697 - DNA, 1656 bp, synthetic construct; identical to SEQ ID NO: 155651
  misc_feature 1..1656: note = Description of Artificial Sequence: Synthetic coding sequence
  source 1..1656: mol_type = other DNA

SEQ ID NO: 169698 - DNA, 1062 bp, synthetic construct
  misc_feature 1..1062: note = Description of Artificial Sequence: Synthetic coding sequence
  source 1..1062: mol_type = other DNA
atgcagggcgcccaggaggccagcgccagcgagatgctgcccctgctgctgcccctgctgtgggccggggccctggcccaggagcggcgcttccagctggagggccctgagagcctgactgtgcaggagggcctgtgtgtgctggtgccctgccgcctgcccaccaccctgcctgccagctactacggctacggctactggttcctggagggcgcagatgtgcctgtggccaccaatgaccctgatgaggaggtgcaggaggagacccggggccgcttccacctgctgtgggaccccaggaggaagaactgcagcctgagcatcagagatgccaggagaagagacaatgctgcctacttcttccggctgaagagcaagtggatgaagtatggctacaccagcagcaagctgtctgtgcgggtgatggccctgacccaccggcccaacatcagcatccctggcaccctggagagcggccaccccagcaacctgacctgcagcgtgccctgggtgtgtgagcagggcaccccacccatcttctcctggatgtctgctgcccccaccagcctgggccccaggaccacccagagctctgtgctgaccatcaccccccggccccaggaccacagcaccaacctgacctgccaggtgaccttccctggggccggcgtgaccatggagaggaccatccagctgaatgtgtcctatgccccccagaaggtggccatcagcatcttccagggcaacagcgctgccttcaagatcctgcagaacaccagcagcctgcctgtgctggagggccaggccctgcggctgctgtgtgatgctgatggcaaccccccagcccacctgtcctggttccagggcttccctgccctgaatgccacccccatcagcaacacaggagtgctggagctgccccaggtgggcagcgctgaggagggggacttcacctgccgggcccagcaccccctgggcagcctgcagatcagcctgagcctgtttgtgcactggagcagcgcccctgtgcctgacagacacagcttccggcccccctgctag

SEQ ID NO: 169699 - DNA, 1281 bp, synthetic construct
  misc_feature 1..1281: note = Description of Artificial Sequence: Synthetic coding sequence
  source 1..1281: mol_type = other DNA
atgctgcccctgctgctgcccctgctgtgggccggggccctggcccaggagcggcgcttccagctggagggccctgagagcctgactgtgcaggagggcctgtgtgtgctggtgccctgccgcctgcccaccaccctgcctgccagctactacggctacggctactggttcctggagggcgcagatgtgcctgtggccaccaatgaccctgatgaggaggtgcaggaggagacccggggccgcttccacctgctgtgggaccccaggaggaagaactgcagcctgagcatcagagatgcccggcggcgggacaatgctgcctacttcttccggctgaagagcaagtggatgaagtatggctacaccagcagcaagctgtctgtgcgggtgatggccctgacccaccggcccaacatcagcatccctggcaccctggagagcggccaccccagcaacctgacctgcagcgtgccctgggtgtgtgagcagggcaccccacccatcttctcctggatgtctgctgcccccaccagcctgggccccaggaccacccagagctctgtgctgaccatcaccccccggccccaggaccacagcaccaacctgacctgccaggtgaccttccctggagctggggtgaccatggagaggaccatccagctgaatgtgtcctccttcaagatcctgcagaacaccagcagcctgcctgtgctggagggccaggccctgcggctgctgtgtgatgctgatggcaaccccccagcccacctgtcctggttccagggcttccctgccctgaatgccacccccatcagcaacacaggagtgctggagctgccccaggtgggcagcgctgaggagggggacttcacctgccgggcccagcaccccctgggcagcctgcagatcagcctgagcctgtttgtgcactggaagccagagggccgggccggcggcgtgctgggcgctgtgtggggcgccagcatcaccaccctggtgttcctgtgtgtgtgcttcatcttccgggtgaagaccaggaggaagaaggccgcccagcctgtgcagaacacagatgatgtgaaccctgtgatggtgtctggcagccggggccaccagcaccagttccagacaggaattgtgtctgaccaccctgctgaggccggccccatcagtgaagatgagcaggagctgcactatgctgtgctgcacttccacaaggtgcagccccaggagcccaaggtgacagacacagagtacagcgagatcaagatccacaagtag

SEQ ID NO: 169700 - DNA, 1314 bp, synthetic construct
  misc_feature 1..1314: note = Description of Artificial Sequence: Synthetic coding sequence
  source 1..1314: mol_type = other DNA
atgcagggcgcccaggaggccagcgccagcgagatgctgcccctgctgctgcccctgctgtgggccggggccctggcccaggagcggcgcttccagctggagggccctgagagcctgactgtgcaggagggcctgtgtgtgctggtgccctgccgcctgcccaccaccctgcctgccagctactacggctacggctactggttcctggagggcgcagatgtgcctgtggccaccaatgaccctgatgaggaggtgcaggaggagacccggggccgcttccacctgctgtgggaccccaggaggaagaactgcagcctgagcatcagagatgccaggagaagagacaatgctgcctacttcttccggctgaagagcaagtggatgaagtatggctacaccagcagcaagctgtctgtgcgggtgatggccctgacccaccggcccaacatcagcatccctggcaccctggagagcggccaccccagcaacctgacctgcagcgtgccctgggtgtgtgagcagggcaccccacccatcttctcctggatgtctgctgcccccaccagcctgggccccaggaccacccagagctctgtgctgaccatcaccccccggccccaggaccacagcaccaacctgacctgccaggtgaccttccctggggccggcgtgaccatggagaggaccatccagctgaatgtgagcagcttcaagatcctgcagaacaccagcagcctgcctgtgctggagggccaggccctgcggctgctgtgtgatgctgatggcaaccccccagcccacctgtcctggttccagggcttccctgccctgaatgccacccccatcagcaacacaggagtgctggagctgccccaggtgggcagcgctgaggagggggacttcacctgccgggcccagcaccccctgggcagcctgcagatcagcctgagcctgtttgtgcactggaagccagagggccgggccggcggcgtgctgggcgctgtgtggggcgccagcatcaccaccctggtgttcctgtgtgtgtgcttcatcttccgggtgaagaccaggaggaagaaggccgcccagcctgtgcagaacacagatgatgtgaaccctgtgatggtgtctggcagccggggccaccagcaccagttccagacaggcatcgtgtctgaccaccctgctgaggccggccccatcagtgaagatgagcaggagctgcactatgctgtgctgcacttccacaaggtgcagccccaggagcccaaggtgacagacacagagtacagcgagatcaagatccacaagtag

SEQ ID NO: 169701 - DNA, 1362 bp, synthetic construct
  misc_feature 1..1362: note = Description of Artificial Sequence: Synthetic coding sequence
  source 1..1362: mol_type = other DNA
atgcagggcgcccaggaggccagcgccagcgagatgctgcccctgctgctgcccctgctgtgggccggggccctggcccaggagcggcgcttccagctggagggccctgagagcctgactgtgcaggagggcctgtgtgtgctggtgccctgccgcctgcccaccaccctgcctgccagctactacggctacggctactggttcctggagggcgcagatgtgcctgtggccaccaatgaccctgatgaggaggtgcaggaggagacccggggccgcttccacctgctgtgggaccccaggaggaagaactgcagcctgagcatcagagatgccaggagaagagacaatgctgcctacttcttccggctgaagagcaagtggatgaagtatggctacaccagcagcaagctgtctgtgcgggtgatggccctgacccaccggcccaacatcagcatccctggcaccctggagagcggccaccccagcaacctgacctgcagcgtgccctgggtgtgtgagcagggcaccccacccatcttctcctggatgtctgctgcccccaccagcctgggccccaggaccacccagagctctgtgctgaccatcaccccccggccccaggaccacagcaccaacctgacctgccaggtgaccttccctggggccggcgtgaccatggagaggaccatccagctgaatgtgtcctatgccccccagaaggtggccatcagcatcttccagggcaacagcgctgccttcaagatcctgcagaacaccagcagcctgcctgtgctggagggccaggccctgcggctgctgtgtgatgctgatggcaaccccccagcccacctgtcctggttccagggcttccctgccctgaatgccacccccatcagcaacacaggagtgctggagctgccccaggtgggcagcgctgaggagggggacttcacctgccgggcccagcaccccctgggcagcctgcagatcagcctgagcctgtttgtgcactggaagccagagggccgggccggcggcgtgctgggcgctgtgtggggcgccagcatcaccaccctggtgttcctgtgtgtgtgcttcatcttccgggtgaagaccaggaggaagaaggccgcccagcctgtgcagaacacagatgatgtgaaccctgtgatggtgtctggcagccggggccaccagcaccagttccagacaggcatcgtgtctgaccaccctgctgaggccggccccatcagtgaagatgagcaggagctgcactatgctgtgctgcacttccacaaggtgcagccccaggagcccaaggtgacagacacagagtacagcgagatcaagatccacaagtag

SEQ ID NO: 169702 - DNA, 1170 bp, synthetic construct
  misc_feature 1..1170: note = Description of Artificial Sequence: Synthetic coding sequence
  source 1..1170: mol_type = other DNA
atgcagggcgcccaggaggccagcgccagcgagatgctgcccctgctgctgcccctgctgtgggccggggccctggcccaggagcggcgcttccagctggagggccctgagagcctgactgtgcaggagggcctgtgtgtgctggtgccctgccgcctgcccaccaccctgcctgccagctactacggctacggctactggttcctggagggcgcagatgtgcctgtggccaccaatgaccctgatgaggaggtgcaggaggagacccggggccgcttccacctgctgtgggaccccaggaggaagaactgcagcctgagcatcagagatgccaggagaagagacaatgctgcctacttcttccggctgaagagcaagtggatgaagtatggctacaccagcagcaagctgtctgtgcgggtgatggccctgacccaccggcccaacatcagcatccctggcaccctggagagcggccaccccagcaacctgacctgcagcgtgccctgggtgtgtgagcagggcaccccacccatcttctcctggatgtctgctgcccccaccagcctgggccccaggaccacccagagctctgtgctgaccatcaccccccggccccaggaccacagcaccaacctgacctgccaggtgaccttccctggggccggcgtgaccatggagaggaccatccagctgaatgtgtcctggatgctgcggcggccccccctgagcaccccagatgccccccagaaggtggccatcagcatcttccagggcaacagcgctgccttcaagatcctgcagaacaccagcagcctgcctgtgctggagggccaggccctgcggctgctgtgtgatgctgatggcaaccccccagcccacctgtcctggttccagggcttccctgccctgaatgccacccccatcagcaacacaggagtgctggagctgccccaggtgggcagcgctgaggagggggacttcacctgccgggcccagcaccccctgggcagcctgcagatcagcctgagcctgtttgtgcactggaagccagagggccgggccggcggcgtgctgggcgctgtgtggggcgccagcatcaccaccctggtgttcctgtgtgtgtgcttcatcttccgggtcatcagcaccagcagccggcaggcctag

SEQ ID NO: 169703 - DNA, 1206 bp, synthetic construct
  misc_feature 1..1206: note = Description of Artificial Sequence: Synthetic coding sequence
  source 1..1206: mol_type = other DNA
atgcagggcgcccaggaggccagcgccagcgagatgctgcccctgctgctgcccctgctgtgggccgccagctactacggctacggctactggttcctggagggcgcagatgtgcctgtggccaccaatgaccctgatgaggaggtgcaggaggagacccggggccgcttccacctgctgtgggaccccaggaggaagaactgcagcctgagcatcagagatgccaggagaagagacaatgctgcctacttcttccggctgaagagcaagtggatgaagtatggctacaccagcagcaagctgtctgtgcgggtgatggccctgacccaccggcccaacatcagcatccctggcaccctggagagcggccaccccagcaacctgacctgcagcgtgccctgggtgtgtgagcagggcaccccacccatcttctcctggatgtctgctgcccccaccagcctgggccccaggaccacccagagctctgtgctgaccatcaccccccggccccaggaccacagcaccaacctgacctgccaggtgaccttccctggggccggcgtgaccatggagaggaccatccagctgaatgtgagcagcttcaagatcctgcagaacaccagcagcctgcctgtgctggagggccaggccctgcggctgctgtgtgatgctgatggcaaccccccagcccacctgtcctggttccagggcttccctgccctgaatgccacccccatcagcaacacaggagtgctggagctgccccaggtgggcagcgctgaggagggggacttcacctgccgggcccagcaccccctgggcagcctgcagatcagcctgagcctgtttgtgcactggaagccagagggccgggccggcggcgtgctgggcgctgtgtggggcgccagcatcaccaccctggtgttcctgtgtgtgtgcttcatcttccgggtgaagaccaggaggaagaaggccgcccagcctgtgcagaacacagatgatgtgaaccctgtgatggtgtctggcagccggggccaccagcaccagttccagacaggcatcgtgtctgaccaccctgctgaggccggccccatcagtgaagatgagcaggagctgcactatgctgtgctgcacttccacaaggtgcagccccaggagcccaaggtgacagacacagagtacagcgagatcaagatccacaagtag

SEQ ID NO: 169704 - DNA, 1125 bp, synthetic construct
  misc_feature 1..1125: note = Description of Artificial Sequence: Synthetic coding sequence
  source 1..1125: mol_type = other DNA
atgctgctgctgctgctgctgcccctgctgtggggccgggagcgggtggagggccagaagagcaacaggaaggactacagcctgaccatgcagagctctgtgacagtgcaggagggcatgtgtgtgcacgtgcgctgcagcttctcctaccctgtggacagccagacagacagcgaccctgtgcacggctactggttccgggctggaaatgacatctcctggaaggcccctgtggccaccaacaacccagcctgggccgtgcaggaggagacccgggaccgcttccacctgctgggggacccccagaccaagaactgcaccctgagcatcagagatgccaggatgtctgatgctggccgctacttcttcaggatggagaagggcaacatcaagtggaactacaagtatgaccagctgtctgtgaatgtgacagaccccccccagaacctgactgtgacagtgttccagggcgagggcacagccagcacagccctgggcaacagcagcagcctgtctgtgctggagggccagagcctgcggctggtgtgtgctgtggacagcaaccccccagcccggctgtcctggacctggaggagcctgaccctgtaccccagccagcccagcaaccccctggtgctggagctgcaggtgcacctgggagatgaaggagagttcacctgccgggcccagaacagcctgggcagccagcacgtgtccctgaacctgagcctgcagcaggagtacacaggcaagatgaggcctgtgtctggagtgctgctgggcgctgtgggcggggccggggccacagccctggtgttcctgtccttctgtgtgatcttcatcgtggtgcgcagctgcaggaagaagagcgcccggcctgctgctgatgtgggggacatcggcatgaaggatgccaacaccatccggggcagcgccagccagggcaacctgacagagagctgggcagatgacaaccccaggcaccacggcctggccgcccacagcagcggggaggagcgggagatccagtatgcccccctgtccttccacaagggggagccccaggacctgagcggccaggaggccaccaacaatgagtacagcgagatcaagatccccaagtag

SEQ ID NO: 169705 - DNA, 1404 bp, synthetic construct
  misc_feature 1..1404: note = Description of Artificial Sequence: Synthetic coding sequence
  source 1..1404: mol_type = other DNA
atgctgctgctgctgctgctgcccctgctgtggggccgggagcgggtggagggccagaagagcaacaggaaggactacagcctgaccatgcagagctctgtgacagtgcaggagggcatgtgtgtgcacgtgcgctgcagcttctcctaccctgtggacagccagacagacagcgaccctgtgcacggctactggttccgggctggaaatgacatctcctggaaggcccctgtggccaccaacaacccagcctgggccgtgcaggaggagacccgggaccgcttccacctgctgggggacccccagaccaagaactgcaccctgagcatcagagatgccaggatgtctgatgctggccgctacttcttcaggatggagaagggcaacatcaagtggaactacaagtatgaccagctgtctgtgaatgtgacagccctgacccaccggcccaacatcctgatccctggcaccctggagagcggctgcttccagaacctgacctgcagcgtgccctgggcctgtgagcagggcaccccacccatgatctcctggatgggcacctctgtgagccccctgcaccccagcaccaccaggagctctgtgctgaccctcatcccccagccccagcaccacggcaccagcctgacctgccaggtgaccctgcccggggccggcgtgaccaccaacagaaccatccagctgaatgtgtcctacccaccccagaacctgactgtgaccgtcttccagggcgagggcacagccagcacagccctgggcaacagcagcagcctgtctgtgctggagggccagagcctgcggctggtgtgtgctgtggacagcaaccccccagcccggctgtcctggacctggaggagcctgaccctgtaccccagccagcccagcaaccccctggtgctggagctgcaggtgcacctgggagatgaaggagagttcacctgccgggcccagaacagcctgggcagccagcacgtgtccctgaacctgagcctgcagcaggagtacaccgggaagatgaggcctgtgtctggagtgctgctgggcgctgtgggcggggccggggccacagccctggtgttcctgtccttctgtgtgatcttcatcgtggtgcgcagctgcaggaagaagagcgcccggcctgctgctgatgtgggggacatcggcatgaaggatgccaacaccatccggggcagcgccagccagggcaacctgacagagagctgggcagatgacaaccccaggcaccacggcctggccgcccacagcagtggagaggagcgggagatccagtatgcccccctgtccttccacaagggggagccccaggacctgagcggccaggaggccaccaacaatgagtacagcgagatcaagatccccaagtag

SEQ ID NO: 169706 - DNA, 438 bp, synthetic construct
  misc_feature 1..438: note = Description of Artificial Sequence: Synthetic coding sequence
  source 1..438: mol_type = other DNA
atgctgctgctgctgctgctgcccctgctgtggggccgggagcgggtggagggccagaagagcaacaggaaggactacagcctgaccatgcagagctctgtgacagtgcaggagggcatgtgtgtgcacgtgcgctgcagcttctcctaccctgtggacagccagacagacagcgaccctgtgcacggctactggttccgggctggaaatgacatctcctggaaggcccctgtggccaccaacaacccagcctgggccgtgcaggaggagacccgggaccgcttccacctgctgggggacccccagaccaagaactgcaccctgagcatcagagatgccaggatgtctgatgctggccgctacttcttcaggatggagaagggcaacatcaagtggaactacaagtatgaccagctgtctgtgaatgtgacagaatag

SEQ ID NO: 169707 - DNA, 1500 bp, synthetic construct
  misc_feature 1..1500: note = Description of Artificial Sequence: Synthetic coding sequence
  source 1..1500: mol_type = other DNA
atgctgctgctgctgctgctgctgcccctgctgtggggcaccaagggcatggagggggaccggcagtatggagatggctacctgctgcaggtgcaggagctggtgacagtgcaggagggcctgtgtgtgcacgtgccctgcagcttctcctacccccaggacggctggacagacagcgaccctgtgcacggctactggttccgggccggggaccggccctaccaggatgcccctgtggccaccaacaacccagaccgggaggtgcaggccgagacccagggccgcttccagctgctgggggacatctggagcaatgactgcagcctgagcatcagagatgccaggaagagggacaagggcagctacttcttccggctggagcggggctccatgaagtggagctacaagagccagctgaactacaagaccaagcagctgtctgtgtttgtgacagccctgacccacaggccagacatcctgatcctgggcaccctggagagcggccacagcaggaacctgacctgcagcgtgccctgggcctgcaagcagggcaccccacccatgatctcctggattggagcctctgtgagcagccctggccccaccacagcccggagctctgtgctgaccctgacccccaagccccaggaccacggcaccagcctgacctgccaggtgaccctgcccggcactggagtgaccaccaccagcacagtgcggctggatgtgtcctacccaccctggaacctgaccatgacagtgttccagggagatgccacagccagcacagccctgggcaatggcagcagcctgtctgtgctggagggccagagcctgcggctggtgtgtgctgtgaacagcaaccccccagcccggctgtcctggacccggggcagcctgaccctgtgccccagccgcagcagcaaccctggcctgctggagctgccccgggtgcacgtgagagatgaaggagagttcacctgccgggcccagaatgcccagggcagccagcacatcagcctgagcctgagcctgcagaatgaaggcaccggcaccagcaggcctgtgtcccaggtgaccctggccgctgtgggcggggccggggccacagccctggccttcctgtccttctgcatcatcttcatcatcgtgcgcagctgcaggaagaagagcgcccggcctgctgctggggtgggggacaccggcatggaggatgccaaggccatccggggcagcgccagccagggccccctgacagagagctggaaggatggcaaccccctgaagaagcccccacctgctgtggcccccagcagtggagaggagggggagctgcactacgccaccctgtccttccacaaggtgaagccccaggacccccagggccaggaggccacagacagcgagtacagcgagatcaagatccacaagcgggagacagctgagacccaggcctgcctgaggaaccacaaccccagcagcaaggaggtgcggggctag

SEQ ID NO: 169708 - DNA, 1221 bp, synthetic construct
  misc_feature 1..1221: note = Description of Artificial Sequence: Synthetic coding sequence
  source 1..1221: mol_type = other DNA
atgctgctgctgctgctgctgctgcccctgctgtggggcaccaagggcatggagggggaccggcagtatggagatggctacctgctgcaggtgcaggagctggtgacagtgcaggagggcctgtgtgtgcacgtgccctgcagcttctcctacccccaggacggctggacagacagcgaccctgtgcacggctactggttccgggccggggaccggccctaccaggatgcccctgtggccaccaacaacccagaccgggaggtgcaggccgagacccagggccgcttccagctgctgggggacatctggagcaatgactgcagcctgagcatcagagatgccaggaagagggacaagggcagctacttcttccggctggagcggggctccatgaagtggagctacaagagccagctgaactacaagaccaagcagctgtctgtgtttgtgacagatcctccctggaacctgaccatgaccgtcttccagggagatgccacagccagcacagccctgggcaatggcagcagcctgtctgtgctggagggccagagcctgcggctggtgtgtgctgtgaacagcaaccccccagcccggctgtcctggacccggggcagcctgaccctgtgccccagccgcagcagcaaccctggcctgctggagctgccccgggtgcacgtgagagatgaaggagagttcacctgccgggcccagaatgcccagggcagccagcacatcagcctgagcctgagcctgcagaatgaaggaacaggcaccagcaggcctgtgtcccaggtgaccctggccgctgtgggcggggccggggccacagccctggccttcctgtccttctgcatcatcttcatcatcgtgcgcagctgcaggaagaagagcgcccggcctgctgctggggtgggggacaccggcatggaggatgccaaggccatccggggcagcgccagccagggccccctgacagagagctggaaggatggcaaccccctgaagaagcccccacctgctgtggcccccagcagcggggaggagggggagctgcactacgccaccctgtccttccacaaggtgaagccccaggacccccagggccaggaggccacagattctgagtacagcgagatcaagatccacaagcgggagacagctgagacccaggcctgcctgaggaaccacaaccccagcagcaaggaggtgcggggctag

SEQ ID NO: 169709 - DNA, 1173 bp, synthetic construct
  misc_feature 1..1173: note = Description of Artificial Sequence: Synthetic coding sequence
  source 1..1173: mol_type = other DNA
atgctgctgctgctgctgctgctgcccctgctgtggggcaccaagggcatggagggggaccggcagtatggagatggctacctgctgcaggtgcaggagctggtgacagtgcaggagggcctgtgtgtgcacgtgccctgcagcttctcctacccccaggacggctggacagacagcgaccctgtgcacggctactggttccgggccggggaccggccctaccaggatgcccctgtggccaccaacaacccagaccgggaggtgcaggccgagacccagggccgcttccagctgctgggggacatctggagcaatgactgcagcctgagcatcagagatgccaggaagagggacaagggcagctacttcttccggctggagcggggctccatgaagtggagctacaagagccagctgaactacaagaccaagcagctgtctgtgtttgtgacagccagcacagccctgggcaatggcagcagcctgtctgtgctggagggccagagcctgcggctggtgtgtgctgtgaacagcaaccccccagcccggctgtcctggacccggggcagcctgaccctgtgccccagccgcagcagcaaccctggcctgctggagctgccccgggtgcacgtgagagatgaaggagagttcacctgccgggcccagaatgcccagggcagccagcacatcagcctgagcctgagcctgcagaatgaaggaacaggcaccagcaggcctgtgtcccaggtgaccctggccgctgtgggcggggccggggccacagccctggccttcctgtccttctgcatcatcttcatcatcgtgcgcagctgcaggaagaagagcgcccggcctgctgctggggtgggggacaccggcatggaggatgccaaggccatccggggcagcgccagccagggccccctgacagagagctggaaggatggcaaccccctgaagaagcccccacctgctgtggcccccagcagcggggaggagggggagctgcactacgccaccctgtccttccacaaggtgaagccccaggacccccagggccaggaggccacagattctgagtacagcgagatcaagatccacaagcgggagacagctgagacccaggcctgcctgaggaaccacaaccccagcagcaaggaggtgcggggctag

SEQ ID NO: 169710 - DNA, 1392 bp, synthetic construct
  misc_feature 1..1392: note = Description of Artificial Sequence: Synthetic coding sequence
  source 1..1392: mol_type = other DNA
atgctgctgctgctgctgcccctgctgtggggccgggagagagctgagggccagaccagcaagctgctgaccatgcagagctctgtgacagtgcaggagggcctgtgtgtgcacgtgccctgcagcttctcctaccccagccacggctggatctacccaggccctgtggtgcacggctactggttccgggagggcgccaacacagaccaggatgcccctgtggccaccaacaacccagcccgggctgtgtgggaggagacccgggaccgcttccacctgctgggggacccccacaccaagaactgcaccctgagcatcagagatgcccggcggagtgatgctggccgctacttcttcaggatggagaagggcagcatcaagtggaactacaagcaccaccggctgtctgtgaatgtgacagccctgacccaccggcccaacatcctgatccctggcaccctggagagcggctgcccccagaacctgacctgcagcgtgccctgggcctgtgagcagggcaccccacccatgatctcctggattggcacctctgtgagccccctggaccccagcaccaccaggagctctgtgctgaccctcatcccccagccccaggaccacggcaccagcctgacctgccaggtgaccttccctggggcctctgtgaccaccaacaagacagtgcacctgaatgtgtcctacccaccccagaacctgaccatgaccgtcttccagggagatggcaccgtgtccacagtgctgggcaatggcagcagcctgagcctgcctgagggccagagcctgcggctggtgtgtgctgtggatgctgtggacagcaaccccccagcccggctgagcctgtcctggaggggcctgaccctgtgccccagccagcccagcaaccctggggtgctggagctgccctgggtgcacctgagagatgctgctgagttcacctgccgggcccagaaccccctgggcagccagcaggtgtacctgaatgtgtccctgcagagcaaggccaccagcggcgtgacccagggcgtggtgggcggggccggggccacagccctggtgttcctgtccttctgtgtgatctttgtggtggtgcgcagctgcaggaagaagagcgcccggcctgctgctggggtgggggacacaggaattgaagatgccaatgctgtgcggggcagcgccagccagggccccctgacagagccctgggccgaggacagccccccagaccagcccccaccagccagcgcccggagctctgtgggggagggggagctgcagtatgccagcctgtccttccagatggtgaagccctgggacagccggggccaggaggccacagacacagagtacagcgagatcaagatccacaggtag

SEQ ID NO: 169711 - DNA, 1440 bp, synthetic construct
  misc_feature 1..1440: note = Description of Artificial Sequence: Synthetic coding sequence
  source 1..1440: mol_type = other DNA
atgctgctgctgctgctgcccctgctgtggggccgggagagagctgagggccagaccagcaagctgctgaccatgcagagctctgtgacagtgcaggagggcctgtgtgtgcacgtgccctgcagcttctcctaccccagccacggctggatctacccaggccctgtggtgcacggctactggttccgggagggcgccaacacagaccaggatgcccctgtggccaccaacaacccagcccgggctgtgtgggaggagacccgggaccgcttccacctgctgggggacccccacaccaagaactgcaccctgagcatcagagatgcccggcggagtgatgctggccgctacttcttcaggatggagaagggcagcatcaagtggaactacaagcaccaccggctgtctgtgaatgtgacagccctgacccaccggcccaacatcctgatccctggcaccctggagagcggctgcccccagaacctgacctgcagcgtgccctgggcctgtgagcagggcaccccacccatgatctcctggattggcacctctgtgagccccctggaccccagcaccaccaggagctctgtgctgaccctcatcccccagccccaggaccacggcaccagcctgacctgccaggtgaccttccctggggcctctgtgaccaccaacaagacagtgcacctgaatgtgtcctacccaccccagaacctgaccatgaccgtcttccagggagatggcaccgtgtccacagtgctgggcaatggcagcagcctgagcctgcctgagggccagagcctgcggctggtgtgtgctgtggatgctgtggacagcaaccccccagcccggctgagcctgtcctggaggggcctgaccctgtgccccagccagcccagcaaccctggggtgctggagctgccctgggtgcacctgagagatgctgctgagttcacctgccgggcccagaaccccctgggcagccagcaggtgtacctgaatgtgtccctgcagagcaaggccaccagcggcgtgacccagggcgtggtgggcggggccggggccacagccctggtgttcctgtccttctgtgtgatctttgtggtggtgcgcagctgcaggaagaagagcgcccggcctgctgctggggtgggggacacaggaattgaagatgccaatgctgtgcggggcagcgccagccagatcctgaaccacttcatcggcttccccaccttcctgggcctgggctttgagttcctgctgaacctgcgggacctgtgctgccacccagacagcgagttctacgtgtaccacttcagccacttccgcctcatcaagaacattgctggggagatcgtgtggagcctggagggcaagatcctgtggctgctggatgtgtctgacttcttccactggttcttcctgatctgtgtgggctag

SEQ ID NO: 169712 - DNA, 735 bp, synthetic construct
  misc_feature 1..735: note = Description of Artificial Sequence: Synthetic coding sequence
  source 1..735: mol_type = other DNA
atggctgctgctgccagccctgccttcctgctgtgcctgcccctgctgcacctgctgagcggctggagcagagctggctgggtggacacccactgcctgtgctatgacttcatcatcacccccaagagcaggcctgagccccagtggtgtgaggtgcagggcctggtggatgagcggcccttcctgcactatgactgtgtgaaccacaaggccaaggcctttgccagcctgggcaagaaggtgaatgtgaccaagacctgggaggagcagacagagaccctgagagatgtggtggacttcctgaagggccagctgctggacatccaggtggagaacctgatccccatcgagcccctgaccctgcaggccaggatgagctgtgaacatgaggcccacggccacggccggggctcctggcagttcctgttcaacggccagaagttcctgctgtttgacagcaacaacaggaagtggacagccctgcaccctggggccaagaagatgacagagaagtgggagaagaacagagatgtgaccatgttcttccagaagatcagcctgggggactgcaagatgtggctggaggagttcctgatgtactgggagcagatgctggaccccaccaagccacccagcctggcccctggcaccacccagcccaaggccatggccaccaccctgagcccctggagcctgctgatcatcttcctgtgcttcatcctggccggccgctag

SEQ ID NO: 169713 - DNA, 1248 bp, synthetic construct
  misc_feature 1..1248: note = Description of Artificial Sequence: Synthetic coding sequence
  source 1..1248: mol_type = other DNA
atgaccggggagcggcccagcacagccctgcctgaccggcgctggggcccccgcatcctgggcttctggggcggctgccgggtgtgggtgtttgctgccatcttcctgctgctgagcctggccgcctcctggagcaaggccgagaatgactttggcctggtgcagcccctggtgaccatggagcagctgctgtgggtgtctggccggcagatcggctctgtggacaccttccgcatccccctcatcacagccaccccccggggcaccctgctggcctttgctgaggccaggaagatgagcagcagtgatgaaggagccaagttcatcgccctgcggcgctccatggaccagggcagcacctggagccccacagccttcatcgtgaatgatggagatgtgcctgatggcctgaacctgggcgctgtggtgtctgatgtggagaccggggtggtgttcctgttctacagcctgtgtgcccacaaggccggctgccaggtggccagcaccatgctggtgtggagcaaggatgatggagtgtcctggagcaccccaagaaacctgagcctggacattggaacagaggtgtttgcccctggccctggcagcggcatccagaagcagcgggagcccaggaagggccgcctcatcgtgtgtggccacggcaccctggagagagatggagtcttctgcctgctgagtgatgaccacggggcctcctggaggtatggcagcggcgtgtctggcatcccctacggccagcccaagcaggagaatgacttcaacccagatgagtgccagccctatgagctgcctgatggctctgtggtgatcaatgccaggaaccagaacaactaccactgccactgcagaattgtgctgcggagctatgatgcctgtgacaccctgcggcccagagatgtgacctttgatcctgagctggtggaccctgtggtggccgccggggctgtggtgaccagcagcggcatcgtgttcttcagcaacccagcccaccctgagttccgggtgaacctgaccctgcgctggagcttcagcaatggcacctcctggaggaaggagaccgtgcagctgtggccaggccccagcggctacagcagcctggccaccctggagggctccatggatggagaggagcaggccccccagctgtatgtgctgtatgaaaaaggaagaaaccactacacagagagcatctctgtggccaagatctctgtgtatggcaccctgtag

SEQ ID NO: 169714 - DNA, 1248 bp, synthetic construct; identical to SEQ ID NO: 169713
  misc_feature 1..1248: note = Description of Artificial Sequence: Synthetic coding sequence
  source 1..1248: mol_type = other DNA

SEQ ID NO: 169715 - DNA, 1248 bp, synthetic construct; identical to SEQ ID NO: 169713
  misc_feature 1..1248: note = Description of Artificial Sequence: Synthetic coding sequence
  source 1..1248: mol_type = other DNA

SEQ ID NO: 169716 - DNA, 1248 bp, synthetic construct; identical to SEQ ID NO: 169713
  misc_feature 1..1248: note = Description of Artificial Sequence: Synthetic coding sequence
  source 1..1248: mol_type = other DNA

SEQ ID NO: 169717 - DNA, 1248 bp, synthetic construct; identical to SEQ ID NO: 169713
  misc_feature 1..1248: note = Description of Artificial Sequence: Synthetic coding sequence
  source 1..1248: mol_type = other DNA

SEQ ID NO: 169718 - DNA, 1248 bp, synthetic construct; identical to SEQ ID NO: 169713
  misc_feature 1..1248: note = Description of Artificial Sequence: Synthetic coding sequence
  source 1..1248: mol_type = other DNA

SEQ ID NO: 169719 - DNA, 1248 bp, synthetic construct; identical to SEQ ID NO: 169713
  misc_feature 1..1248: note = Description of Artificial Sequence: Synthetic coding sequence
  source 1..1248: mol_type = other DNA

SEQ ID NO: 169720 - DNA, 2277 bp, synthetic construct
  misc_feature 1..2277: note = Description of Artificial Sequence: Synthetic coding sequence
  source 1..2277: mol_type = other DNA
atggctgtgtctgctggcagcgcccggaccagccccagcagtgacaaggtgcagaaggacaaggccgagctgatcagcggcccccggcaggacagccgcatcggcaagctgctgggctttgagtggacagacctgagctcctggaggcggctggtgaccctgctgaaccggcccacagatcctgccagcctggccgtgttccgcttcctgtttggcttcctgatggtgctggacatcccccaggagcggggcctgagcagcctggacaggaagtacctggatggcctggatgtgtgccgcttccccctgctggatgccctgcggcccctgcccctggactggatgtacctggtgtacaccatcatgttcctgggcgccctgggcatgatgctgggcctgtgctaccgcatcagctgtgtgctcttcctgctgccctactggtacgtgttcctgctggacaagacctcctggaacaaccacagctacctgtatggcctgctggccttccagctgaccttcatggatgccaaccactactggagcgtggatggcctgctgaatgcccacagaagaaatgcccacgtgcccctgtggaactatgctgtgctgcggggccagatcttcatcgtgtacttcatcgccggcgtgaagaagctggatgctgactgggtggagggctacagcatggagtacctgagccgccactggctgttcagccccttcaagctgctgctgtctgaggagctgaccagcctgctggtggtgcactggggcggcctgctgctggacctgtctgctggcttcctgctcttctttgatgtgagccgcagcatcggcctcttctttgtgtcctacttccactgcatgaacagccagctgttcagcatcggcatgttctcctatgtgatgctggccagcagccccctcttctgcagccctgagtggcccaggaagctggtgtcctactgcccccggcggctgcagcagctgctgcccctgaaggccgccccccagcccagcgtgtcctgtgtgtacaagaggagccggggcaagagcggccagaagccaggcctgcggcaccagctgggcgccgccttcaccctgctgtacctgctggagcagctgttcctgccctacagccacttcctgacccagggctacaacaactggaccaacggcctgtatggctacagctgggacatgatggtgcacagccgcagccaccagcacgtgaagatcacctacagagatggccgcactggagagctgggctacctgaaccctggggtcttcacccagagccgccgctggaaggaccatgctgacatgctgaagcagtatgccacctgcctgagccggctgctgcccaagtacaacgtgacagagccccagatctactttgacatctgggtgtccatcaatgaccgcttccagcagaggatctttgacccccgggtggacatcgtgcaggccgcctggagccccttccagaggacctcctgggtgcagcccctgctgatggacctgagcccctggagggccaagctgcaggagatcaagagcagcctggacaaccacacagaggtggtgttcatcgctgacttccctggcctgcacctggagaactttgtgtctgaggacctgggcaacaccagcatccagctgctgcagggcgaggtgacagtggagctggtggccgagcagaagaaccagaccctgcgggagggggagaagatgcagctgcctgctggggagtaccacaaggtgtacaccaccagccccagccccagctgctacatgtatgtgtatgtgaacaccacagagctggccctggagcaggacctggcctacctgcaggagctgaaggagaaggtggagaatggaagtgaaacaggccccctgcccccagagctgcagcccctgctggagggggaggtgaagggcggccctgagcccacccccctggtgcagaccttcctgcggcggcagcagaggctgcaggagattgaaagaagaagaaacacccccttccacgagcgcttcttccgcttcctgctgaggaagctgtatgtgttcagaagaagcttcctgatgacctgcatcagcctgaggaacctgatcctgggccggcccagcctggagcagctggcccaggaggtgacctacgccaacctgcggccctttgaggccgtgggggagctgaaccccagcaacacagacagcagccacagcaaccccccagagagcaacccagaccctgtgcacagcgagttctag

SEQ ID NO: 169721 - DNA, 1386 bp, synthetic construct
  misc_feature 1..1386: note = Description of Artificial Sequence: Synthetic coding sequence
  source 1..1386: mol_type = other DNA
atgaggcctgctgacctgcccccccggcccatggaggagagccctgccagcagcagcgcccccacagaaacagaggagcccggcagcagcgctgaggtgatggaggaggtgaccacctgcagcttcaacagccccctcttccggcaggaggatgaccggggcatcacctaccgcatcccagccctgctgtacatcccccccacccacaccttcctggcctttgctgagaagaggagcaccaggagagatgaagatgccctgcacctggtgctgcggcggggcctgagaattggccagctggtgcagtggggccccctgaagcccctgatggaggccaccctgcccggccacaggaccatgaacccctgccctgtgtgggagcagaagagcggctgtgtgttcctgttcttcatctgtgtgcggggccacgtgacagagcggcagcagatcgtgtctggaagaaatgctgcccggctgtgcttcatctacagccaggatgctggctgctcctggagcgaggtgcgggacctgacagaggaggtgattggcagcgagctgaagcactgggccacctttgctgtgggccctggccacggcatccagctgcagagcggccgcctggtgatcccagcctacacctactacatccccagctggttcttctgcttccagctgccctgcaagacccggccccacagcctgatgatctacagtgatgacctgggcgtgacctggcaccacggccgcctcatccggcccatggtgacagtggagtgtgaggtggccgaggtgacaggccgggccggccaccctgtgctgtactgcagcgcccggacccccaaccgctgcagagctgaggccctgagcacagaccacggggagggcttccagaggctggccctgagccggcagctgtgtgagcccccccacggctgccagggctctgtggtgtccttccggcccctggagatcccccaccgctgccaggacagcagcagcaaggatgcccccaccatccagcagagcagccctggcagcagcctgcggctggaggaggaggccggcacccccagcgagagctggctgctgtacagccaccccaccagcaggaagcagagggtggacctgggcatctacctgaaccagacccccctggaggccgcctgctggagccggccctggatcctgcactgcggcccctgtggctacagcgacctggccgccctggaggaggagggcctgtttggctgcctgtttgaatgtggcaccaagcaggagtgtgagcagatcgccttccgcctcttcacccaccgggagatcctgagccacctgcagggcgactgcaccagccctggaagaaaccccagccagttcaagagcaactag

SEQ ID NO: 169722 - DNA, 1386 bp, synthetic construct; identical to SEQ ID NO: 169721
  misc_feature 1..1386: note = Description of Artificial Sequence: Synthetic coding sequence
  source 1..1386: mol_type = other DNA

SEQ ID NO: 169723 - DNA, 1287 bp, synthetic construct
  misc_feature 1..1287: note = Description of Artificial Sequence: Synthetic coding sequence
  source 1..1287: mol_type = other DNA
atggaggaggtgaccacctgcagcttcaacagccccctcttccggcaggaggatgaccggggcatcacctaccgcatcccagccctgctgtacatcccccccacccacaccttcctggcctttgctgagaagaggagcaccaggagagatgaagatgccctgcacctggtgctgcggcggggcctgcgcatcggccagctggtgcagtggggccccctgaagcccctgatggaggccaccctgcccggccacaggaccatgaacccctgccctgtgtgggagcagaagagcggctgtgtgttcctgttcttcatctgtgtgcggggccacgtgacagagcggcagcagatcgtgtctggaagaaatgctgcccggctgtgcttcatctacagccaggatgctggctgctcctggagcgaggtgcgggacctgacagaggaggtgattggcagcgagctgaagcactgggccacctttgctgtgggccctggccacggcatccagctgcagagcggccgcctggtgatcccagcctacacctactacatccccagctggttcttctgcttccagctgccctgcaagacccggccccacagcctgatgatctacagtgatgacctgggcgtgacctggcaccacggccgcctcatccggcccatggtgacagtggagtgtgaggtggccgaggtgacaggccgggccggccaccctgtgctgtactgcagcgcccggacccccaaccgctgcagagctgaggccctgagcacagaccatggagagggcttccagaggctggccctgagccggcagctgtgtgagccccctcatggctgccagggctctgtggtgtccttccggcccctggagatcccccaccgctgccaggacagcagcagcaaggatgcccccaccatccagcagagcagccctggcagcagcctgcggctggaggaggaggccggcaccccatctgagagctggctgctgtacagccaccccaccagcaggaagcagagggtggacctgggcatctacctgaaccagacccccctggaggccgcctgctggagccggccctggatcctgcactgcggcccctgtggctacagcgacctggccgccctggaggaggagggcctgtttggctgcctgtttgaatgtggcaccaagcaggagtgtgagcagatcgccttccgcctcttcacccaccgggagatcctgagccacctgcagggcgactgcaccagccctggcaggaaccccagccagttcaagagcaactag

SEQ ID NO: 169724 - DNA, 1059 bp, synthetic construct
  misc_feature 1..1059: note = Description of Artificial Sequence: Synthetic coding sequence
  source 1..1059: mol_type = other DNA
atggaggccaccctgcccggccacaggaccatgaacccctgccctgtgtgggagcagaagagcggctgtgtgttcctgttcttcatctgtgtgcggggccacgtgacagagcggcagcagatcgtgtctggaagaaatgctgcccggctgtgcttcatctacagccaggatgctggctgctcctggagcgaggtgcgggacctgacagaggaggtgattggcagcgagctgaagcactgggccacctttgctgtgggccctggccacggcatccagctgcagagcggccgcctggtgatcccagcctacacctactacatccccagctggttcttctgcttccagctgccctgcaagacccggccccacagcctgatgatctacagtgatgacctgggcgtgacctggcaccacggccgcctcatccggcccatggtgacagtggagtgtgaggtggccgaggtgacaggccgggccggccaccctgtgctgtactgcagcgcccggacccccaaccgctgcagagctgaggccctgagcacagaccatggagagggcttccagaggctggccctgagccggcagctgtgtgagccccctcatggctgccagggctctgtggtgtccttccggcccctggagatcccccaccgctgccaggacagcagcagcaaggatgcccccaccatccagcagagcagccctggcagcagcctgcggctggaggaggaggccggcaccccatctgagagctggctgctgtacagccaccccaccagcaggaagcagagggtggacctgggcatctacctgaaccagacccccctggaggccgcctgctggagccggccctggatcctgcactgcggcccctgtggctacagcgacctggccgccctggaggaggagggcctgtttggctgcctgtttgaatgtggcaccaagcaggagtgtgagcagatcgccttccgcctcttcacccaccgggagatcctgagccacctgcagggcgactgcaccagccctggcaggaaccccagccagttcaagagcaactag

SEQ ID NO: 169725 - DNA, 1203 bp, synthetic construct
  misc_feature 1..1203: note = Description of Artificial Sequence: Synthetic coding sequence
  source 1..1203: mol_type = other DNA
atggccaccctgctgctgctgctgggcgtgctggtggtgtccccagatgccctgggcagcaccacagctgtgcagacccccaccagcggggagcccctggtgtccaccagcgagcccctgagcagcaagatgtacaccaccagcatcaccagtgaccccaaggctgacagcactggagaccagaccagcgccctgccccccagcaccagcatcaatgaaggcagccccctgtggaccagcattggagccagcacaggcagccccctgcctgagcccaccacctaccaggaggtgtccatcaagatgagctctgtgccccaggagacccctcatgccaccagccaccctgctgtgcccatcacagccaacagcctgggcagccacacagtgactggaggcaccatcaccaccaacagccctgagaccagcagcaggaccagcggggcccctgtgaccacagctgccagcagcctggagaccagccggggcaccagcggcccccccctgaccatggccaccgtgtccctggagaccagcaagggcaccagcggcccccctgtgaccatggccacagacagcctggagaccagcacaggcaccactggacctcctgtgaccatgaccaccggcagcctggagcccagcagcggggccagcggcccccaggtgtcctctgtgaagctgagcaccatgatgagccccaccaccagcaccaatgccagcacagtgcccttcaggaacccagatgagaacagccggggcatgctgcctgtggccgtgctggtggccctgctggccgtcatcgtgctggtggccctgctgctgctgtggaggcggcggcagaagagaagaactggagccctggtgctgagcagaggaggcaagagaaatggagtggtggatgcctgggccggccctgcccaggtgcctgaggagggcgctgtgacagtgacagtgggcggcagcggcggggacaagggcagcggcttcccagatggagagggcagcagccggcggcccaccctgaccaccttcttcggccgcaggaagagccggcagggcagcctggccatggaggagctgaagagcggcagcggccccagcctgaagggggaggaggagcccctggtggcctctgaagatggagctgtggatgccccagccccagatgagcctgagggcggagatggagctgccccctag

SEQ ID NO: 169726 - DNA, 1203 bp, synthetic construct; identical to SEQ ID NO: 169725
  misc_feature 1..1203: note = Description of Artificial Sequence: Synthetic coding sequence
  source 1..1203: mol_type = other DNA

SEQ ID NO: 169727 - DNA, 1068 bp, synthetic construct
  misc_feature 1..1068: note = Description of Artificial Sequence: Synthetic coding sequence
  source 1..1068: mol_type = other DNA
atggccaccctgctgctgctgctgggcgtgctggtggtgtccccagatgccctgggcagcaccacagctgtgcagacccccaccagcggggagcccctggtgtccaccagcgagcccctgagcagcaagatgtacaccaccagcatcaccagtgaccccaaggctgacagcactggagaccagaccagcgccctgccccccagcaccagcatcaatgaaggcagccccctgtggaccagcattggagccagcacaggcagccccctgcctgagcccaccacctaccaggaggtgtccatcaagatgagctctgtgccccaggagacccctcatgccaccagccaccctgctgtgcccatcacagccaacagcctgggcagccacacagtgactggaggcaccatcaccaccaacagccctgagaccagcagcaggaccagcggggcccctgtgaccacagctgccagcagcctggagaccagccggggcaccagcggcccccccctgaccatggccaccgtgtccctggagaccagcaagggcaccagcggcccccctgtgaccatggccacagacagcctggagaccagcacaggcaccactggacctcctgtgaccatgaccaccggcagcctggagcccagcagcggggccagcggcccccaggtgtcctctgtgaagctgagcaccatgatgagccccaccaccagcaccaatgccagcacagtgcccttcaggaacccagatgagaacagccggggcatgctgcctgtggccgtgctggtggccctgctggccgtcatcgtgctggtggccctgctgctgctgtggaggcggcggcagaagagaagaactggagccctggtgctgagcagaggaggcaagagaaatggagtggtggatgcctgggccggccctgcccaggtgcctgaggagggcgctgtgacagtgacagtgggcggcagcggcggggacaagggcagcggcttcccagatggagagggcagcagccggcggcccaccctgaccaccttcttcggccgcaggaagagccggcagggcagctag

SEQ ID NO: 169728 - DNA, 672 bp, synthetic construct
  misc_feature 1..672: note = Description of Artificial Sequence: Synthetic coding sequence
  source 1..672: mol_type = other DNA
atgcagtgggccgtgggccgccgctgggcctgggccgccctgctgctggccgtggccgctgtgctgacccaggtggtgtggctgtggctgggcacccagagctttgtgttccagcgggaggagatcgcccagctggcccggcagtatgccggcctggaccacgagctggccttcagccgcctcatcgtggagctgcggcggctgcaccctggccacgtgctgcctgatgaggagctgcagtgggtgtttgtgaatgctgggggctggatgggcgccatgtgcctgctgcacgccagcctgtctgaatatgtgctgctgtttggaacagccctgggcagccggggccacagcggccgctactgggccgagatcagtgacaccatcatcagcggcaccttccaccagtggagggagggcaccaccaagtctgaggtgttctacccaggagaaacagtggtgcacggccctggagaggccacagctgtggagtggggccccaacacctggatggtggagtatggccggggcgtcatccccagcaccctggcctttgccctggccgacacagtgttcagcacccaggacttcctgaccctcttctacaccctgcggagctatgcccggggcctgcggctggagctgaccacctacctgtttggccaggacccctag

SEQ ID NO: 169729 - DNA, 570 bp, synthetic construct
  misc_feature 1..570: note = Description of Artificial Sequence: Synthetic coding sequence
  source 1..570: mol_type = other DNA
atgcagtgggccgtgggccgccgctgggcctgggccgccctgctgctggccgtggccgctgtgctgacccaggtggtgtggctgtggctgggcctggaccacgagctggccttcagccgcctcatcgaggagctgcagtgggtgtttgtgaatgctgggggctggatgggcgccatgtgcctgctgcacgccagcctgtctgaatatgtgctgctgtttggaacagccctgggcagccggggccacagcggccgctactgggccgagatcagtgacaccatcatcagcggcaccttccaccagtggagggagggcaccaccaagtctgaggtgttctacccaggagaaacagtggtgcacggccctggagaggccacagctgtggagtggggccccaacacctggatggtggagtatggccggggcgtcatccccagcaccctggcctttgccctggccgacacagtgttcagcacccaggacttcctgaccctcttctacaccctgcggagctatgcccggggcctgcggctggagctgaccacctacctgtttggccaggacccctag

SEQ ID NO: 169730 - DNA, 405 bp, synthetic construct
  misc_feature 1..405: note = Description of Artificial Sequence: Synthetic coding sequence
  source 1..405: mol_type = other DNA
atgggcgccatgtgcctgctgcacgccagcctgtctgaatatgtgctgctgtttggaacagccctgggcagccggggccacagcggccgctactgggccgagatcagtgacaccatcatcagcggcaccttccaccagtggagggagggcaccaccaagtctgaggtgttctacccaggagagaccgtggtgcacggccctggagaggccacagctgtggagtggggccccaacacctggatggtggagtatggccggggcgtcatccccagcaccctggcctttgccctggccgacaccgtcttcagcacccaggacttcctgaccctcttctacaccctgcggagctatgcccggggcctgcggctggagctgaccacctacctgtttggccaggacccctag

SEQ ID NO: 169731 - DNA, 579 bp, synthetic construct
  misc_feature 1..579: note = Description of Artificial Sequence: Synthetic coding sequence
  source 1..579: mol_type = other DNA
atgcagtgggccgtgggccgccgctgggcctgggccgccctgctgctggccgtggccgctgtgctgacccaggtggtgtggctgtggctgggcacccagagctttgtgttccagcgggaggagatcgcccagctggcccggcagtatgccggcctggaccacgagctggccttcagccgcctcatcgtggagctgcggcggctgcaccctggccacgtgctgcctgatgaggagctgcagtgggtgtttgtgaatgctgggggctggatgggcgccatgtgcctgctgcacgccagcctgtctgaatatgtgctgctgtttggaacagccctgggcagccggggccacagcggggagaccgtggtgcacggccctggagaggccacagctgtggagtggggccccaacacctggatggtggagtatggccggggcgtcatccccagcaccctggcctttgccctggccgacaccgtcttcagcacccaggacttcctgaccctcttctacaccctgcggagctatgcccggggcctgcggctggagctgaccacctacctgtttggccaggacccctag

SEQ ID NO: 169732 - DNA, 2916 bp, synthetic construct
  misc_feature 1..2916: note = Description of Artificial Sequence: Synthetic coding sequence
  source 1..2916: mol_type = other DNA
atgggcgtggccggcaggaacagacctggagctgcctgggccgtgctgctgctgctgctgctgctgccccccctgctgctgctggccggggctgtgcccccaggccggggccgggccgccggcccccaggaggatgtggatgaatgtgcccagggcctggatgactgccacgcagatgccctgtgccagaacacccccaccagctacaagtgcagctgcaagccaggctaccagggcgagggccggcagtgtgaagatattgatgaatgtggaaatgagctgaatggaggctgtgtgcatgactgcctgaacatccctggcaactaccgctgcacctgctttgatggcttcatgctggcccatgatggccacaactgcctggatgtggatgaatgtctggagaacaacggcggctgccagcacacctgtgtgaatgtgatgggcagctatgagtgctgctgcaaggagggcttcttcctgagtgacaaccagcacacctgcatccacaggtctgaggagggcctgagctgcatgaacaaggaccacggctgcagccacatctgcaaggaggccccccggggctctgtggcctgtgaatgtcggcccggctttgagctggccaagaaccagagggactgcatcctgacctgcaaccacggcaatggaggctgccagcacagctgtgatgacacagcagatggccctgagtgcagctgccacccccagtacaagatgcacacagatggccgcagctgcctggagcgggaggacacagtgctggaggtgacagagagcaacaccacctctgtggtggatggagacaagagggtgaagaggcggctgctgatggagacctgtgctgtgaacaacggcggctgtgacaggacctgcaaggacaccagcactggagtgcactgcagctgccctgtgggcttcaccctgcagctggatggcaagacctgcaaggacattgatgagtgccagaccagaaatggaggctgtgaccacttctgcaagaacatcgtgggcagctttgactgtggctgcaagaagggcttcaagctgctgacagatgagaagagctgccaggatgtggatgaatgttccctggacaggacctgtgaccacagctgcatcaaccaccctggcacctttgcctgtgcctgcaacagaggctacaccctgtatggcttcacccactgtggggacaccaatgaatgttccatcaacaatggaggctgccagcaggtgtgtgtgaacacagtgggcagctatgagtgccagtgccaccctggctacaagctgcactggaacaagaaggactgtgtggaggtgaagggcctgctgcccacctctgtgagcccccgggtgtccctgcactgcggcaagagcggcggcggagatggctgcttcctgcgctgccacagcggcatccacctgagcagcggcctgcagggcgcctacagcgtgacctgtggcagcagcagccccctgaggaacaagcagcagaagagcaatgacagcgcctttggagatgtgaccaccatccgcacctctgtgaccttcaagctgaatgaaggcaagtgcagcctgaagaatgctgagctgtttcctgagggcctgcggcctgccctgcctgagaagcacagctctgtgaaggagagcttccgctacgtgaacctgacctgcagcagcggcaagcaggtgcctggggcccctggccggcccagcacccccaaggagatgttcatcaccgtggagtttgagctggagaccaaccagaaggaggtgacagccagctgtgacctgagctgcatcgtgaagaggacagagaagaggctgaggaaggccatccgcaccctgaggaaggctgtgcaccgggagcagttccacctgcagctgagcggcatgaacctggatgtggccaagaagccacccaggaccagcgagcggcaggccgagagctgtggggtgggccagggccatgctgagaaccagtgtggcctgtgccagcccggggagtacagcgcagatggctttgccccctgccacctgtgtgccctgggcaccttccagcctgaggccggccgcaccagctgcttcccctgtggcggcggcctggccaccaagcaccagggcgccaccagcttccaggactgtgagaccagggtgcagtgcagccctggccacttctacaacaccaccacccaccgctgcatccgctgccctgtgggcacctaccagcctgagtttgggaagaacaactgtgtgtcctgccccggcaacaccaccacagactttgatggcagcaccaacatcacccagtgcaagaacagaagatgtggcggggagctgggggacttcaccggctacatcgagagccccaactacccaggcaactacccagccaacacagagtgcacctggaccatcaaccccccacccaagaggcgcatcctgattgtggtgcctgagatcttcctgcccattgaagatgactgtggggactacctggtgatgaggaagaccagcagcagcaacagcgtgaccacctatgagacctgccagacctatgaaagacccatcgccttcaccagccgcagcaagaagctgtggatccagttcaagagcaatgaaggcaacagcgcccggggcttccaggtgccctacgtgacctatgatgaggactaccaggagctgattgaggacatcgtgagagatggccgcctgtatgccagcgagaaccaccaggagatcctgaaggacaagaagctgatcaaggccctgtttgatgtgctggcccacccccagaactacttcaagtacacagcccaggagagccgggagatgttccccaggagcttcatccggctgctgcggagcaaggtgagccgcttcctgcggccctacaagtag

SEQ ID NO: 169733 - DNA, 1044 bp, synthetic construct
  misc_feature 1..1044: note = Description of Artificial Sequence: Synthetic coding sequence
  source 1..1044: mol_type = other DNA
atgggcgctgctgctgtgcgctggcacctgtgtgtgctgctggccctgggcacccggggccgcctggccggcggcagcggcctgcccggctctgtggatgtggatgagtgcagcgagggcacagatgactgccacattgatgccatctgccagaacacccccaagagctacaagtgcctgtgcaagccaggctacaagggggagggcaagcagtgtgaagatattgatgaatgtgaaaatgactactacaacggcggctgtgtgcatgagtgcatcaacatccctggcaactaccgctgcacctgctttgatggcttcatgctggcccatgatggccacaactgcctggatgtggatgagtgccaggacaacaatggaggctgccagcagatctgtgtgaatgccatgggcagctatgagtgccagtgccacagcggcttcttcctgagtgacaaccagcacacctgcatccacaggagcaatgaaggcatgaactgcatgaacaaggaccacggctgtgcccacatctgccgggagacccccaagggcggcgtggcctgtgactgcaggcctggctttgacctggcccagaaccagaaggactgcaccctgacctgcaactatggaaatggaggctgccagcacagctgtgaggacacagacaccggccccacctgtggctgccaccagaagtatgccctgcacagtgatggccgcacctgcatcgagaaggatgaagctgccatcgagaggagccagttcaatgccacctctgtggctgatgtggacaagagggtgaagaggcggctgctgatggagacctgtgctgtgaacaatggaggctgtgacaggacctgcaaggacacagccactggagtgcgctgcagctgccctgtgggcttcaccctgcagccagatggcaagacctgcaagggccagcacgtggagctgtgtggctgcccctgcctgtactggccaggccaggagcccccctgtgcctgcatcgccggcccccgggccggcctgaatggaggccacgtgtag

SEQ ID NO: 169734 - DNA, 2967 bp, synthetic construct
  misc_feature 1..2967: note = Description of Artificial Sequence: Synthetic coding sequence
  source 1..2967: mol_type = other DNA
atgggcgctgctgctgtgcgctggcacctgtgtgtgctgctggccctgggcacccggggccgcctggccggcggcagcggcctgcccggctctgtggatgtggatgagtgcagcgagggcacagatgactgccacattgatgccatctgccagaacacccccaagagctacaagtgcctgtgcaagccaggctacaagggggagggcaagcagtgtgaagatattgatgaatgtgaaaatgactactacaacggcggctgtgtgcatgagtgcatcaacatccctggcaactaccgctgcacctgctttgatggcttcatgctggcccatgatggccacaactgcctggatgtggatgagtgccaggacaacaatggaggctgccagcagatctgtgtgaatgccatgggcagctatgagtgccagtgccacagcggcttcttcctgagtgacaaccagcacacctgcatccacaggagcaatgaaggcatgaactgcatgaacaaggaccacggctgtgcccacatctgccgggagacccccaagggcggcgtggcctgtgactgcaggcctggctttgacctggcccagaaccagaaggactgcaccctgacctgcaactatggaaatggaggctgccagcacagctgtgaggacacagacaccggccccacctgtggctgccaccagaagtatgccctgcacagtgatggccgcacctgcatcgagacctgtgctgtgaacaatggaggctgtgacaggacctgcaaggacacagccactggagtgcgctgcagctgccctgtgggcttcaccctgcagccagatggcaagacctgcaaggacatcaatgaatgtctggtgaacaacggcggctgtgaccacttctgcaggaacacagtgggcagctttgaatgtggctgcaggaagggctacaagctgctgacagatgagaggacctgccaggacattgatgagtgcagctttgagaggacctgtgaccacatctgcatcaacagccctggcagcttccagtgcctgtgccaccggggctacatcctgtatggcaccacccactgtggagatgtggatgaatgttccatgagcaatggcagctgtgaccagggctgtgtgaacaccaagggcagctatgaatgtgtgtgccccccaggccggcggctgcactggaatggcaaggactgtgtggagaccgggaagtgcctgagccgggccaagaccagcccccgggcccagctgagctgcagcaaggccggcggcgtggagagctgcttcctgagctgcccagcccacaccctgtttgtgcctgacagtgaaaattcctatgtgctgagctgtggggtgcccggcccccagggcaaggccctgcagaagagaaatggcaccagcagcggcctgggccccagctgcagtgatgcccccaccacccccatcaagcagaaggcccgcttcaagatcagagatgccaagtgccacctgcggccccacagccaggcccgggccaaggagacagcccggcagcccctgctggaccactgccacgtgacctttgtgaccctgaagtgtgacagcagcaagaagagaagaagaggaaggaagagccccagcaaggaggtgagccacatcacagctgagtttgaaattgagaccaagatggaggaggccagtgacacctgtgaggccgactgcctgaggaagagagctgagcagagcctgcaggccgccatcaagaccctgaggaagagcatcggccggcagcagttctacgtgcaggtgtctggaacagaatatgaggtggcccagaggcctgccaaggccctggagggccagggcgcctgtggggccggccaggtgctgcaggacagcaaatgtgtggcctgtggccctggcacccactttggaggagagctgggccagtgtgtgtcctgcatgcctggcacctaccaggacatggagggccagctgagctgcaccccctgccccagcagtgatggcctgggcctgcccggggccagaaatgtgtctgaatgtggcggccagtgcagccctggcttcttcagcgcagatggcttcaagccctgccaggcctgccctgtgggcacctaccagcctgagcccggccgcacaggctgcttcccctgtggcggcggcctgctgaccaagcatgagggcaccaccagcttccaggactgtgaggccaaggtgcactgcagccctggccaccactacaacaccaccacccaccgctgcatccgctgccctgtgggcacctaccagcctgagtttggccagaaccactgcatcacctgccccggcaacaccagcacagactttgatggcagcaccaacgtgacccactgcaagaaccagcactgcggcggggagctgggggactacacaggctacatcgagagccccaactacccaggggactacccagccaatgcagaatgtgtgtggcacatcgcccccccacccaagaggcgcatcctgattgtggtgcctgagatcttcctgcccattgaagatgaatgtggagatgtgctggtgatgaggaagagcgccagccccaccagcatcaccacctatgagacctgccagacctatgagcggcccatcgccttcaccagccgcagcaggaagctgtggatccagttcaagagcaatgaaggcaacagcggcaagggcttccaggtgccctacgtgacctatgatgaggactaccagcagctgattgaagatattgtgagagatggccgcctgtatgccagcgagaaccaccaggagatcctgaaggacaagaagctgatcaaggccctgtttgatgtgctggcccacccccagaactacttcaagtacacagcccaggagagcaaggagatgttccccaggagcttcatcaagctgctgcggagcaaggtgagccgcttcctgcggccctacaagtag

SEQ ID NO: 169735 - DNA, 1857 bp, synthetic construct
  misc_feature 1..1857: note = Description of Artificial Sequence: Synthetic coding sequence
  source 1..1857: mol_type = other DNA
atggagacagaagctgccagcacagctgtgaggacccagacccaggccccccgggtggtggccaccaggagcacccccagcacccagacagtggcccgggccagccggcgggcccagagcatcacagaggccgccaccggccacgcccggacccagcccctggcctgtgatgctgctgcccccctggacagccactgcagcaggactggaagacatgccaagaccagcaccagcgcctggagcaccacagaagctgccaccaccagcgctgccaccccctgggccgccagcagcgctgctgctggccgggccaccagctgcagccccaccagcgccccagcccggaccagcaccagcgcccccagcagcggccctgtgaccaccagcgccagcaccccccaggcccgggccaaggagacagcccggcagcccctgctggaccactgccacgtgacctttgtgaccctgaagtgtgacagcagcaagaagagaagaagaggaaggaagagccccagcaaggaggtgagccacatcacagctgagtttgaaattgagaccaagatggaggaggccagtgacacctgtgaggccgactgcctgaggaagagagctgagcagagcctgcaggccgccatcaagaccctgaggaagagcatcggccggcagcagttctacgtgcaggtgtctggaacagaatatgaggtggcccagaggcctgccaaggccctggagggccagggcgcctgtggggccggccaggtgctgcaggacagcaaatgtgtggcctgtggccctggcacccactttggaggagagctgggccagtgtgtgtcctgcatgcctggcacctaccaggacatggagggccagctgagctgcaccccctgccccagcagtgatggcctgggcctgcccggggccagaaatgtgtctgaatgtggcggccagtgcagccctggcttcttcagcgcagatggcttcaagccctgccaggcctgccctgtgggcacctaccagcctgagcccggccgcacaggctgcttcccctgtggcggcggcctgctgaccaagcatgagggcaccaccagcttccaggactgtgaggccaaggtgcactgcagccctggccaccactacaacaccaccacccaccgctgcatccgctgccctgtgggcacctaccagcctgagtttggccagaaccactgcatcacctgccccggcaacaccagcacagactttgatggcagcaccaacgtgacccactgcaagaaccagcactgcggcggggagctgggggactacacaggctacatcgagagccccaactacccaggggactacccagccaatgcagaatgtgtgtggcacatcgcccccccacccaagaggcgcatcctgattgtggtgcctgagatcttcctgcccattgaagatgaatgtggagatgtgctggtgatgaggaagagcgccagccccaccagcatcaccacctatgagacctgccagacctatgagcggcccatcgccttcaccagccgcagcaggaagctgtggatccagttcaagagcaatgaaggcaacagcggcaagggcttccaggtgccctacgtgacctatgatgaggactaccagcagctgattgaagatattgtgagagatggccgcctgtatgccagcgagaaccaccaggagatcctgaaggacaagaagctgatcaaggccctgtttgatgtgctggcccacccccagaactacttcaagtacacagcccaggagagcaaggagatgttccccaggagcttcatcaagctgctgcggagcaaggtgagccgcttcctgcggccctacaagtag

SEQ ID NO: 169736 - DNA, 1092 bp, synthetic construct
  misc_feature 1..1092: note = Description of Artificial Sequence: Synthetic coding sequence
  source 1..1092: mol_type = other DNA
atgggcgctgctgctgtgcgctggcacctgtgtgtgctgctggccctgggcacccggggccgcctggccggcggcagcggcctgcccggctctgtggatgtggatgagtgcagcgagggcacagatgactgccacattgatgccatctgccagaacacccccaagagctacaagtgcctgtgcaagccaggctacaagggggagggcaagcagtgtgaagatattgatgaatgtgaaaatgactactacaacggcggctgtgtgcatgagtgcatcaacatccctggcaactaccgctgcacctgctttgatggcttcatgctggcccatgatggccacaactgcctggatgtggatgagtgccaggacaacaatggaggctgccagcagatctgtgtgaatgccatgggcagctatgagtgccagtgccacagcggcttcttcctgagtgacaaccagcacacctgcatccacaggagcaatgaaggcatgaactgcatgaacaaggaccacggctgtgcccacatctgccgggagacccccaagggcggcgtggcctgtgactgcaggcctggctttgacctggcccagaaccagaaggactgcaccctgacctgcaactatggaaatggaggctgccagcacagctgtgaggacacagacaccggccccacctgtggctgccaccagaagtatgccctgcacagtgatggccgcacctgcatcgagacctgtgctgtgaacaatggaggctgtgacaggacctgcaaggacacagccactggagtgcgctgcagctgccctgtgggcttcaccctgcagccagatggcaagacctgcaaggacatcaatgaatgtctggtgaacaacggcggctgtgaccacttctgcaggaacacagtgggcagctttgaatgtggctgcaggaagggctacaagctgctgacagatgagaggacctgccaggacattgatgagtgcagctttgagaggacctgtgaccacatctgcatcaacagccctggcagcttccagtgcctgatcaagctgctgcggagcaaggtgagccgcttcctgcggccctacaagtag

SEQ ID NO: 169737 - DNA, 528 bp, synthetic construct
  misc_feature 1..528: note = Description of Artificial Sequence: Synthetic coding sequence
  source 1..528: mol_type = other DNA
tgaagagagacccccaagggcggcgtggcctgtgactgcaggcctggctttgacctggcccagaaccagaaggactgcaccctgacctgcaactatggaaatggaggctgccagcacagctgtgaggacacagacaccggccccacctgtggctgccaccagaagtatgccctgcacagtgatggccgcacctgcatcgagaaggatgaagctgccatcgagaggagccagttcaatgccacctctgtggctgatgtggacaagagggtgaagaggcggctgctgatggagacctgtgctgtgaacaatggaggctgtgacaggacctgcaaggacacagccactggagtgcgctgcagctgccctgtgggcttcaccctgcagccagatggcaagacctgcaaggacatcaatgaatgtctggtgaacaacggcggctgtgaccacttctgcaggaacacagtgggcagctttgaatgtggctgcaggaagggctacaagctgctgacagatgagaggacctgctag

SEQ ID NO: 169738 - DNA, 3000 bp, synthetic construct
  misc_feature 1..3000: note = Description of Artificial Sequence: Synthetic coding sequence
  source 1..3000: mol_type = other DNA
atgggcgtggccggcaggaacagacctggagctgcctgggccgtgctgctgctgctgctgctgctgccccccctgctgctgctggccggggctgtgcccccaggccggggccgggccgccggcccccaggaggatgtggatgaatgtgcccagggcctggatgactgccacgcagatgccctgtgccagaacacccccaccagctacaagtgcagctgcaagccaggctaccagggcgagggccggcagtgtgaagatattgatgaatgtggaaatgagctgaatggaggctgtgtgcatgactgcctgaacatccctggcaactaccgctgcacctgctttgatggcttcatgctggcccatgatggccacaactgcctggatgtggatgaatgtctggagaacaacggcggctgccagcacacctgtgtgaatgtgatgggcagctatgagtgctgctgcaaggagggcttcttcctgagtgacaaccagcacacctgcatccacaggtctgaggagggcctgagctgcatgaacaaggaccacggctgcagccacatctgcaaggaggccccccggggctctgtggcctgtgaatgtcggcccggctttgagctggccaagaaccagagggactgcatcctgacctgcaaccacggcaatggaggctgccagcacagctgtgatgacacagcagatggccctgagtgcagctgccacccccagtacaagatgcacacagatggccgcagctgcctggagcgggaggacacagtgctggaggtgacagagagcaacaccacctctgtggtggatggagacaagagggtgaagaggcggctgctgatggagacctgtgctgtgaacaacggcggctgtgacaggacctgcaaggacaccagcactggagtgcactgcagctgccctgtgggcttcaccctgcagctggatggcaagacctgcaaggacattgatgagtgccagaccagaaatggaggctgtgaccacttctgcaagaacatcgtgggcagctttgactgtggctgcaagaagggcttcaagctgctgacagatgagaagagctgccaggatgtggatgaatgttccctggacaggacctgtgaccacagctgcatcaaccaccctggcacctttgcctgtgcctgcaacagaggctacaccctgtatggcttcacccactgtggggacaccaatgaatgttccatcaacaatggaggctgccagcaggtgtgtgtgaacacagtgggcagctatgagtgccagtgccaccctggctacaagctgcactggaacaagaaggactgtgtggaggtgaagggcctgctgcccacctctgtgagcccccgggtgtccctgcactgcggcaagagcggcggcggagatggctgcttcctgcgctgccacagcggcatccacctgagcagtgatgtgaccaccatccgcacctctgtgaccttcaagctgaatgaaggcaagtgcagcctgaagaatgctgagctgtttcctgagggcctgcggcctgccctgcctgagaagcacagctctgtgaaggagagcttccgctacgtgaacctgacctgcagcagcggcaagcaggtgcctggggcccctggccggcccagcacccccaaggagatgttcatcaccgtggagtttgagctggagaccaaccagaaggaggtgacagccagctgtgacctgagctgcatcgtgaagaggacagagaagaggctgaggaaggccatccgcaccctgaggaaggctgtgcaccgggagcagttccacctgcagctgagcggcatgaacctggatgtggccaagaagccacccaggaccagcgagcggcaggccgagagctgtggggtgggccagggccacgccgagaaccagtgtgtgtcctgcagagctggcacctactatgatggagcccgggagcgctgcatcctgtgccccaacggcaccttccagaatgaggagggccagatgacctgtgagccctgccccaggcctggcaacagcggggccctgaagaccccagaggcctggaacatgtctgaatgtggcggcctgtgccagcccggggagtacagcgcagatggctttgccccctgccacctgtgtgccctgggcaccttccagcctgaggccggccgcaccagctgcttcccctgtggcggcggcctggccaccaagcaccagggcgccaccagcttccaggactgtgagaccagggtgcagtgcagccctggccacttctacaacaccaccacccaccgctgcatccgctgccctgtgggcacctaccagcctgagtttgggaagaacaactgtgtgtcctgccccggcaacaccaccacagactttgatggcagcaccaacatcacccagtgcaagaacagaagatgtggcggggagctgggggacttcaccggctacatcgagagccccaactacccaggcaactacccagccaacacagagtgcacctggaccatcaaccccccacccaagaggcgcatcctgattgtggtgcctgagatcttcctgcccattgaagatgactgtggggactacctggtgatgaggaagaccagcagcagcaacagcgtgaccacctatgagacctgccagacctatgaaagacccatcgccttcaccagccgcagcaagaagctgtggatccagttcaagagcaatgaaggcaacagcgcccggggcttccaggtgccctacgtgacctatgatgaggactaccaggagctgattgaggacatcgtgagagatggccgcctgtatgccagcgagaaccaccaggagatcctgaaggacaagaagctgatcaaggccctgtttgatgtgctggcccacccccagaactacttcaagtacacagcccaggagagccgggagatgttccccaggagcttcatccggctgctgcggagcaaggtgagccgcttcctgcggccctacaagtag

SEQ ID NO: 169739 - DNA, 2424 bp, synthetic construct
  misc_feature 1..2424: note = Description of Artificial Sequence: Synthetic coding sequence
  source 1..2424: mol_type = other DNA
atgggcgtggccggcaggaacagacctggagctgcctgggccgtgctgctgctgctgctgctgctgccccccctgctgctgctggccggggctgtgcccccaggccggggccgggccgccggcccccaggaggatgtggatgaatgtgcccagggcctggatgactgccacgcagatgccctgtgccagaacacccccaccagctacaagtgcagctgcaagccaggctaccagggcgagggccggcagtgtgaagatattgatgaatgtggaaatgagctgaatggaggctgtgtgcatgactgcctgaacatccctggcaactaccgctgcacctgctttgatggcttcatgctggcccatgatggccacaactgcctggatgtggatgaatgtctggagaacaacggcggctgccagcacacctgtgtgaatgtgatgggcagctatgagtgctgctgcaaggagggcttcttcctgagtgacaaccagcacacctgcatccacaggtctgaggagggcctgagctgcatgaacaaggaccacggctgcagccacatctgcaaggaggccccccggggctctgtggcctgtgaatgtcggcccggctttgagctggccaagaaccagagggactgcatcctgacctgcaaccacggcaatggaggctgccagcacagctgtgatgacacagcagatggccctgagtgcagctgccacccccagtacaagatgcacacagatggccgcagctgcctggagcgggaggacacagtgctggaggtgacagagagcaacaccacctctgtggtggatggagacaagagggtgaagaggcggctgctgatggagacctgtgctgtgaacaacggcggctgtgacaggacctgcaaggacaccagcactggagtgcactgcagctgccctgtgggcttcaccctgcagctggatggcaagacctgcaaggacattgatgagtgccagaccagaaatggaggctgtgaccacttctgcaagaacatcgtgggcagctttgactgtggctgcaagaagggcttcaagctgctgacagatgagaagagctgccaggatgtggatgaatgttccctggacaggacctgtgaccacagctgcatcaaccaccctggcacctttgcctgtgcctgcaacagaggctacaccctgtatggcttcacccactgtggggacaccaatgaatgttccatcaacaatggaggctgccagcaggtgtgtgtgaacacagtgggcagctatgagtgccagtgccaccctggctacaagctgcactggaacaagaaggactgtgtggccagctgtgacctgagctgcatcgtgaagaggacagagaagaggctgaggaaggccatccgcaccctgaggaaggctgtgcaccgggagcagttccacctgcagctgagcggcatgaacctggatgtggccaagaagccacccaggaccagcgagcggcaggccgagagctgtggggtgggccagggccacgccgagaaccagtgtgtgtcctgcagagctggcacctactatgatggagcccgggagcgctgcatcctgtgccccaacggcaccttccagaatgaggagggccagatgacctgtgagccctgccccaggcctggcaacagcggggccctgaagaccccagaggcctggaacatgtctgaatgtggcggcctgtgccagcccggggagtacagcgcagatggctttgccccctgccacctgtgtgccctgggcaccttccagcctgaggccggccgcaccagctgcttcccctgtggcggcggcctggccaccaagcaccagggcgccaccagcttccaggactgtgagaccagggtgcagtgcagccctggccacttctacaacaccaccacccaccgctgcatccgctgccctgtgggcacctaccagcctgagtttgggaagaacaactgtgtgtcctgccccggcaacaccaccacagactttgatggcagcaccaacatcacccagtgcaagaccagcagcaacagcgtgaccacctatgagacctgccagacctatgaaagacccatcgccttcaccagccgcagcaagaagctgtggatccagttcaagagcaatgaaggcaacagcgcccggggcttccaggtgccctacgtgacctatgatgaggactaccaggagctgattgaggacatcgtgagagatggccgcctgtatgccagcgagaaccaccaggagatcctgaaggacaagaagctgatcaaggccctgtttgatgtgctggcccacccccagaactacttcaagtacacagcccaggagagccgggagatgttccccaggagcttcatccggctgctgcggagcaaggtgagccgcttcctgcggccctacaagtag

SEQ ID NO: 169740 - DNA, 3087 bp, synthetic construct
  misc_feature 1..3087: note = Description of Artificial Sequence: Synthetic coding sequence
  source 1..3087: mol_type = other DNA
atgggcgtggccggcaggaacagacctggagctgcctgggccgtgctgctgctgctgctgctgctgccccccctgctgctgctggccggggctgtgcccccaggccggggccgggccgccggcccccaggaggatgtggatgaatgtgcccagggcctggatgactgccacgcagatgccctgtgccagaacacccccaccagctacaagtgcagctgcaagccaggctaccagggcgagggccggcagtgtgaagatattgatgaatgtggaaatgagctgaatggaggctgtgtgcatgactgcctgaacatccctggcaactaccgctgcacctgctttgatggcttcatgctggcccatgatggccacaactgcctggatgtggatgaatgtctggagaacaacggcggctgccagcacacctgtgtgaatgtgatgggcagctatgagtgctgctgcaaggagggcttcttcctgagtgacaaccagcacacctgcatccacaggtctgaggagggcctgagctgcatgaacaaggaccacggctgcagccacatctgcaaggaggccccccggggctctgtggcctgtgaatgtcggcccggctttgagctggccaagaaccagagggactgcatcctgacctgcaaccacggcaatggaggctgccagcacagctgtgatgacacagcagatggccctgagtgcagctgccacccccagtacaagatgcacacagatggccgcagctgcctggagcgggaggacacagtgctggaggtgacagagagcaacaccacctctgtggtggatggagacaagagggtgaagaggcggctgctgatggagacctgtgctgtgaacaacggcggctgtgacaggacctgcaaggacaccagcactggagtgcactgcagctgccctgtgggcttcaccctgcagctggatggcaagacctgcaaggacattgatgagtgccagaccagaaatggaggctgtgaccacttctgcaagaacatcgtgggcagctttgactgtggctgcaagaagggcttcaagctgctgacagatgagaagagctgccaggatgtggatgaatgttccctggacaggacctgtgaccacagctgcatcaaccaccctggcacctttgcctgtgcctgcaacagaggctacaccctgtatggcttcacccactgtggggacaccaatgaatgttccatcaacaatggaggctgccagcaggtgtgtgtgaacacagtgggcagctatgagtgccagtgccaccctggctacaagctgcactggaacaagaaggactgtgtggaggtgaagggcctgctgcccacctctgtgagcccccgggtgtccctgcactgcggcaagagcggcggcggagatggctgcttcctgcgctgccacagcggcatccacctgagcagcggcctgcagggcgcctacagcgtgacctgtggcagcagcagccccctgaggaacaagcagcagaagagcaatgacagcgcctttggagatgtgaccaccatccgcacctctgtgaccttcaagctgaatgaaggcaagtgcagcctgaagaatgctgagctgtttcctgagggcctgcggcctgccctgcctgagaagcacagctctgtgaaggagagcttccgctacgtgaacctgacctgcagcagcggcaagcaggtgcctggggcccctggccggcccagcacccccaaggagatgttcatcaccgtggagtttgagctggagaccaaccagaaggaggtgacagccagctgtgacctgagctgcatcgtgaagaggacagagaagaggctgaggaaggccatccgcaccctgaggaaggctgtgcaccgggagcagttccacctgcagctgagcggcatgaacctggatgtggccaagaagccacccaggaccagcgagcggcaggccgagagctgtggggtgggccagggccatgctgagaaccagtgtgtgtcctgccgggccggcacctactatgatggagcccgggagcgctgcatcctgtgccccaacggcaccttccagaatgaggagggccagatgacctgtgagccctgcccccggcccggcaacagcggggccctgaagaccccagaggcctggaacatgtctgaatgtggcggcctgtgccagcctggagagtacagcgcagatggctttgccccctgccacctgtgtgccctgggcaccttccagcctgaggccggccgcaccagctgcttcccctgtggcggcggcctggccaccaagcaccagggcgccaccagcttccaggactgtgagaccagggtgcagtgcagccctggccacttctacaacaccaccacccaccgctgcatccgctgccctgtgggcacctaccagcctgagtttgggaagaacaactgtgtgtcctgccccggcaacaccaccacagactttgatggcagcaccaacatcacccagtgcaagaacagaagatgtggcggggagctgggggacttcaccggctacatcgagagccccaactacccaggcaactacccagccaacacagaatgtacctggaccatcaaccccccacccaagaggcgcatcctgattgtggtgcctgagatcttcctgcccattgaagatgactgtggggactacctggtgatgaggaagaccagcagcagcaacagcgtgaccacctatgagacctgccagacctatgagcggcccatcgccttcaccagccgcagcaagaagctgtggatccagttcaagagcaatgaaggcaacagcgcccggggcttccaggtgccctacgtgacctatgatgaggactaccaggagctgattgaagatattgtgagagatggccgcctgtatgccagcgagaaccaccaggagatcctgaaggacaagaagctgatcaaggccctgtttgatgtgctggcccacccccagaactacttcaagtacacagcccaggagagccgggagatgttccccaggagcttcatccggctgctgcggagcaaggtgagccgcttcctgcggccctacaagtag

SEQ ID NO: 169741 - DNA, 411 bp, synthetic construct
  misc_feature 1..411: note = Description of Artificial Sequence: Synthetic coding sequence
  source 1..411: mol_type = other DNA
atggtgctgctggagagcgagcagttcctgacagagctgaccaggctcttccagaagtgcaggaccagcggctctgtgtacatcaccctgaagaagtatgatggccgcaccaagcccatccccaagaagggcaccgtggagggctttgagcctgctgacaacaagtgcctgctgcgggccacagatggcaagaagaagatcagcacagtggtgagcagcaaggaggtgaacaagttccagatggcctacagcaacctgctgcgggccaacatggatggcctgaagaagagggacaagaagaacaagaccaagaagaccaaggctgctgctgctgctgctgctgctgccccagctgctgctgccacagcccccaccacagctgccaccacagctgccacagctgcccagtag

SEQ ID NO: 169742 - DNA, 333 bp, synthetic construct
  misc_feature 1..333: note = Description of Artificial Sequence: Synthetic coding sequence
  source 1..333: mol_type = other DNA
atggcctgtgccgccgcccggagccctgctgaccaggaccgcttcatctgcatctacccagcctacctgaacaacaagaagaccatcgccgagggccgccgcatccccatcagcaaggctgtggagaaccccacagccacagagatccaggatgtgtgcagcgctgtgggcctgaatgtgttcctggagaagaacaagatgtacagccgggagtggaacagagatgtgcagtaccggggccgggtgcgggtgcagctgaagcaggaggatggcagcctgtgcctggtgcagttccccagccactacaccctgagcctgaccagcggcagctag

SEQ ID NO: 169743 - DNA, 435 bp, synthetic construct
  misc_feature 1..435: note = Description of Artificial Sequence: Synthetic coding sequence
  source 1..435: mol_type = other DNA
atggcctgtgccgccgcccggagccctgctgaccaggaccgcttcatctgcatctacccagcctacctgaacaacaagaagaccatcgccgagggccgccgcatccccatcagcaaggctgtggagaaccccacagccacagagatccaggatgtgtgcagcgctgtgggcctgaatgtgttcctggagaagaacaagatgtacagccgggagtggaacagagatgtgcagtaccggggccgggtgcgggtgcagctgaagcaggaggatggcagcctgtgcctggtgcagttccccagcaggaagtctgtgatgctgtatgctgctgagatgatccccaagctgaagaccaggacccagaagacaggaggagctgaccagagcctgcagcagggcgagggcagcaagaagggcaagggcaagaagaagaagtag

SEQ ID NO: 169744 - DNA, 237 bp, synthetic construct
  misc_feature 1..237: note = Description of Artificial Sequence: Synthetic coding sequence
  source 1..237: mol_type = other DNA
atggcctgtgccgccgcccggagccctgctgaccaggaccggctgctgaagatcctgcagctgcagcgcttcaagatgtatgtgcagcagctggacctgacctacttcctgaggaagatcaagtgcaccctggagaatggcatcgtgatgagcaacacagaagctgagagcggcagcagcagcaacaggaagatgggcgccagcgccctgtacagcagccaccacgtgtcccagtag

SEQ ID NO: 169745 - DNA, 639 bp, synthetic construct; identical to SEQ ID NO: 148856
  misc_feature 1..639: note = Description of Artificial Sequence: Synthetic coding sequence
  source 1..639: mol_type = other DNA

SEQ ID NO: 169746 - DNA, 1368 bp, synthetic construct
  misc_feature 1..1368: note = Description of Artificial Sequence: Synthetic coding sequence
  source 1..1368: mol_type = other DNA
atgccacccctgtccatgaagaggtctgccatcgacctggaggagatggccagcggcctgaacaagaggaagatgatccagcacgctgtgttcaaggagctggtgaagctggtggaccccggggtgaaggcctggacccccaccaagggcaagcagaatgtcatcatgtttgtgggcctgcagggcagcggcaagaccaccacctgcagcaagctggcctactactaccagaggaagggctggaagacctgcctgatctgtgccgacaccttccgggccggggcctttgaccagctgaagcagaatgccaccaaggcccgcatccccttctacggcagctacacagagatggaccctgtgatcatcgccagcgagggcgtggagaagttcaagaatgaaaattttgagatcatcatcgtggacaccagcggccgccacaagcaggaggacagcctgtttgaggagatgctgcaggtggccaatgccatccagcctgacaacatcgtgtatgtgatggatgccagcatcggccaggcctgtgaggcccaggccaaggccttcaaggacaaggtggatgtggcctctgtgattgtgaccaagctggatggccacgccaagggcggcggggccctgtctgctgtggccgccaccaagagccccatcatcttcatcggcaccggggagcacattgatgactttgagcccttcaagacccagcccttcatcagcaagctgctgggcatgggagacatcgagggcctgattgacaaggtgaatgagctgaagctggatgacaatgaggccctgattgagaagctgaagcacggccagttcaccctgcgggacatgtatgagcagttccagaacatcatgaagatgggccccttcagccagatcctgggcatgatccctggcttcggcacagacttcatgagcaaaggaaatgagcaggagagcatggcccggctgaagaagctgatgaccatcatggacagcatgaatgaccaggagctggacagcacagatggagccaaggtgttcagcaagcagcccggccgcatccagagggtggcccggggcagcggcgtgtccaccagagatgtgcaggagctgctgacccagtacaccaagtttgcccagatggtgaagaagatgggcggcatcaagggcctcttcaagggcggggacatgagcaagaatgtgtcccagagccagatggccaagctgaaccagcagatggccaagatgatggacccccgggtgctgcaccacatgggcggcatggccggcctgcagagcatgatgaggcagttccagcagggcgctgctggcaacatgaagggcatgatgggcttcaacaacatgtag

SEQ ID NO: 169747 - DNA, 135 bp, synthetic construct
  misc_feature 1..135: note = Description of Artificial Sequence: Synthetic coding sequence
  source 1..135: mol_type = other DNA
atggtgctggccgacctgggcaggaagatcaccagcgccctgcggagcctgagcaatgccaccatcatcaatgaggaggtgctgaatgccatgctgaaggaggtgtgcacagccctgctggaggctgatgtgtag

SEQ ID NO: 169748 - DNA, 225 bp, synthetic construct
  misc_feature 1..225: note = Description of Artificial Sequence: Synthetic coding sequence
  source 1..225: mol_type = other DNA
atggtgctggccgacctgggcaggaagatcaccagcgccctgcggagcctgagcaatgccaccatcatcaatgaggaggtgctgaatgccatgctgaaggaggtgtgcacagccctgctggaggctgatgtgaacatcaagctggtgaagcagctgcgggagaatgtgaagagcgccatcgacctggaggagatggccagcggcctgaacaagaggaagatgtag

SEQ ID NO: 169749 - DNA, 1515 bp, synthetic construct; identical to SEQ ID NO: 148424
  misc_feature 1..1515: note = Description of Artificial Sequence: Synthetic coding sequence
  source 1..1515: mol_type = other DNA

SEQ ID NO: 169750 - DNA, 1791 bp, synthetic construct
  misc_feature 1..1791: note = Description of Artificial Sequence: Synthetic coding sequence
  source 1..1791: mol_type = other DNA
atggctgctgagaagcaggtgcctgggggcggcggcggcggcggcagcggcggcggcggcggcagcggcggcggcggcagcggcggcggcagaggagctggaggagaggagaacaaggaaaatgaaagaccttctgctggcagcaaggccaacaaggagtttggagacagcctgagcctggagatcctgcagatcatcaaggagagccagcagcagcacggcctgcggcatggagacttccagcgctaccggggctactgcagccggcggcagaggcggctgaggaagaccctgaacttcaagatgggcaacagacacaagttcaccgggaagaaggtgacagaggagctgctgacagacaaccgctacctgctgctggtgctgatggatgctgagcgggcctggagctatgccatgcagctgaagcaggaggccaacacagagcccaggaagcgcttccacctgctgagccggctgaggaaggctgtgaagcacgccgaggagctggagcggctgtgtgagagcaacagagtggatgccaagaccaagctggaggcccaggcctacacagcctacctgagcggcatgctgcgctttgagcaccaggagtggaaggccgccatcgaggccttcaacaagtgcaagaccatctatgagaagctggccagcgccttcacagaggagcaggccgtgctgtacaaccagagggtggaggagatcagccccaacatccgctactgtgcctacaacattggagagacccgggccaagcaggccgccaccatgtctgaggtggagtggaggggccgcacagtgcctgtgaagattgacaaggtgcgcatcttcctgctgggcctggccgacaatgaagctgccatcgtgcaggccgagagcgaggagaccaaggagcggctgtttgagagcatgctgtctgagtgcagagatgccatccaggtggtgcgggaggagctgaagccagaccagaagcagagggactacatcctggagggggagcccgggaaggtgagcaacctgcagtacctgcacagctacctgacctacatcaagctgagcacagccatcaagagaaatgaaaacatggccaagggcctgcagagggccctgctgcagcagcagccagaagatgacagcaagaggagcccccggccccaggacctgatccggctgtatgacatcatcctgcagaacctggtggagctgctgcagctgcccggcctggaggaggacaaggccttccagaaggagatcggcctgaagaccctggtgttcaaggcctaccgctgcttcttcatcgcccagagctatgtgctggtgaagaagtggagcgaggccctggtgctgtatgacagagtgctgaagtatgccaatgaggtgaacagtgatgctggggccttcaagaacagcctgaaggacctgcctgatgtgcaggagctgatcacccaggtgcgctctgagaagtgcagcctgcaggccgccgccatcctggatgccaatgatgcccaccagacagagaccagcagcagccaggtgaaggacaacaagcccctggtggagagatttgagaccttctgcctggaccccagcctggtgaccaagcaggccaacctggtgcacttccccccaggcttccagcccatcccctgcaagcccctcttctttgacctggccctgaaccacgtggccttcccccccctggaggacaagctggagcagaagaccaagagcggcctgaccggctacatcaagggcatcttcggcttccgctcctag

SEQ ID NO: 169751 - DNA, 1884 bp, synthetic construct
  misc_feature 1..1884: note = Description of Artificial Sequence: Synthetic coding sequence
  source 1..1884: mol_type = other DNA
atggctgctgagaagcaggtgcctgggggcggcggcggcggcggcagcggcggcggcggcggcagcggcggcggcggcagcggcggcggcagaggagctggaggagaggagaacaaggaaaatgaaagaccttctgctggcagcaaggccaacaaggagtttggagacagcctgagcctggagatcctgcagatcatcaaggagagccagcagcagcacggcctgcggcatggagacttccagcgctaccggggctactgcagccggcggcagaggcggctgaggaagaccctgaacttcaagatgggcaacagacacaagttcaccgggaagaaggtgacagaggagctgctgacagacaaccgctacctgctgctggtgctgatggatgctgagcgggcctggagctatgccatgcagctgaagcaggaggccaacacagagcccaggaagcgcttccacctgctgagccggctgaggaaggctgtgaagcacgccgaggagctggagcggctgtgtgagagcaacagagtggatgccaagaccaagctggaggcccaggcctacacagcctacctgagcggcatgctgcgctttgagcaccaggagtggaaggccgccatcgaggccttcaacaagtgcaagaccatctatgagaagctggccagcgccttcacagaggagcaggccgtgctgtacaaccagagggtggaggagatcagccccaacatccgctactgtgcctacaacattggagaccagagcgccatcaatgagctgatgcagatgaggctgcggagcggcggcacagagggcctgctggccgagaagctggaggccctgatcacccagacccgggccaagcaggccgccaccatgtctgaggtggagtggaggggccgcacagtgcctgtgaagattgacaaggtgcgcatcttcctgctgggcctggccgacaatgaggccgccatcgtgcaggccgagagcgaggagaccaaggagcggctgtttgagagcatgctgtctgaatgtagagatgccatccaggtggtgcgggaggagctgaagccagaccagaagcagagggactacatcctggagggggagcccgggaaggtgagcaacctgcagtacctgcacagctacctgacctacatcaagctgagcacagccatcaagagaaatgaaaacatggccaagggcctgcagagggccctgctgcagcagcagccagaagatgacagcaagaggagcccccggccccaggacctgatccggctgtatgacatcatcctgcagaacctggtggagctgctgcagctgcccggcctggaggaggacaaggccttccagaaggagatcggcctgaagaccctggtgttcaaggcctaccgctgcttcttcatcgcccagagctatgtgctggtgaagaagtggagcgaggccctggtgctgtatgacagagtgctgaagtatgccaatgaggtgaacagtgatgctggggccttcaagaacagcctgaaggacctgcctgatgtgcaggagctgatcacccaggtgcgctctgagaagtgcagcctgcaggccgccgccatcctggatgccaatgatgcccaccagacagagaccagcagcagccaggtgaaggacaacaagcccctggtggagagatttgagaccttctgcctggaccccagcctggtgaccaagcaggccaacctggtgcacttccccccaggcttccagcccatcccctgcaagcccctcttctttgacctggccctgaaccacgtggccttcccccccctggaggacaagctggagcagaagaccaagagcggcctgaccggctacatcaagggcatcttcggcttccgctcctag

SEQ ID NO: 169752 - DNA, 1581 bp, synthetic construct
  misc_feature 1..1581: note = Description of Artificial Sequence: Synthetic coding sequence
  source 1..1581: mol_type = other DNA
atgggcaacagacacaagttcaccgggaagaaggtgacagaggagctgctgacagacaaccgctacctgctgctggtgctgatggatgctgagcgggcctggagctatgccatgcagctgaagcaggaggccaacacagagcccaggaagcgcttccacctgctgagccggctgaggaaggctgtgaagcatgctgaggagctggagcggctgtgtgagagcaacagagtggatgccaagaccaagctggaggcccaggcctacacagcctacctgagcggcatgctgcgctttgagcaccaggagtggaaggccgccatcgaggccttcaacaagtgcaagaccatctatgagaagctggccagcgccttcacagaggagcaggccgtgctgtacaaccagagggtggaggagatcagccccaacatccgctactgtgcctacaacatcggggaccagagcgccatcaatgagctgatgcagatgaggctgcggagcggcggcacagagggcctgctggccgagaagctggaggccctgatcacccagacccgggccaagcaggccgccaccatgtctgaggtggagtggaggggccgcacagtgcctgtgaagattgacaaggtgcgcatcttcctgctgggcctggccgacaatgaagctgccatcgtgcaggccgagagcgaggagaccaaggagcggctgtttgagagcatgctgtctgagtgcagagatgccatccaggtggtgcgggaggagctgaagccagaccagaagcagagggactacatcctggagggggagcccgggaaggtgagcaacctgcagtacctgcacagctacctgacctacatcaagctgagcacagccatcaagagaaatgaaaacatggccaagggcctgcagagggccctgctgcagcagcagccagaagatgacagcaagaggagcccccggccccaggacctgatccggctgtatgacatcatcctgcagaacctggtggagctgctgcagctgcccggcctggaggaggacaaggccttccagaaggagatcggcctgaagaccctggtgttcaaggcctaccgctgcttcttcatcgcccagagctatgtgctggtgaagaagtggagcgaggccctggtgctgtatgacagagtgctgaagtatgccaatgaggtgaacagtgatgctggggccttcaagaacagcctgaaggacctgcctgatgtgcaggagctgatcacccaggtgcgctctgagaagtgcagcctgcaggccgccgccatcctggatgccaatgatgcccaccagacagagaccagcagcagccaggtgaaggacaacaagcccctggtggagagatttgagaccttctgcctggaccccagcctggtgaccaagcaggccaacctggtgcacttccccccaggcttccagcccatcccctgcaagcccctcttctttgacctggccctgaaccacgtggccttcccccccctggaggacaagctggagcagaagaccaagagcggcctgaccggctacatcaagggcatcttcggcttccgctcctag

SEQ ID NO: 169753 - DNA, 984 bp, synthetic construct
  misc_feature 1..984: note = Description of Artificial Sequence: Synthetic coding sequence
  source 1..984: mol_type = other DNA
atgcagatgaggctgcggagcggcggcacagagggcctgctggccgagaagctggaggccctgatcacccagacccgggccaagcaggccgccaccatgtctgaggtggagtggaggggccgcacagtgcctgtgaagattgacaaggtgcgcatcttcctgctgggcctggccgacaatgaggccgccatcgtgcaggccgagagcgaggagaccaaggagcggctgtttgagagcatgctgtctgaatgtagagatgccatccaggtggtgcgggaggagctgaagccagaccagaagcagagggactacatcctggagggggagcccgggaaggtgagcaacctgcagtacctgcacagctacctgacctacatcaagctgagcacagccatcaagagaaatgaaaacatggccaagggcctgcagagggccctgctgcagcagcagccagaagatgacagcaagaggagcccccggccccaggacctgatccggctgtatgacatcatcctgcagaacctggtggagctgctgcagctgcccggcctggaggaggacaaggccttccagaaggagatcggcctgaagaccctggtgttcaaggcctaccgctgcttcttcatcgcccagagctatgtgctggtgaagaagtggagcgaggccctggtgctgtatgacagagtgctgaagtatgccaatgaggtgaacagtgatgctggggccttcaagaacagcctgaaggacctgcctgatgtgcaggagctgatcacccaggtgcgctctgagaagtgcagcctgcaggccgccgccatcctggatgccaatgatgcccaccagacagagaccagcagcagccaggtgaaggacaacaagcccctggtggagagatttgagagcaccccaggcacagatggagccctgaagagatttgtgatgctgctgcagtaccacggctttgagatgaacagcagcctgctgtag

SEQ ID NO: 169754 - DNA, 1770 bp, synthetic construct
  misc_feature 1..1770: note = Description of Artificial Sequence: Synthetic coding sequence
  source 1..1770: mol_type = other DNA
atggctgctgagaagcaggtgcctgggggcggcggcggcggcggcagcggcggcggcggcggcagcggcggcggcggcagcggcggcggcagaggagctggaggagaggagaacaaggaaaatgaaagaccttctgctggcagcaaggccaacaaggagtttggagacagcctgagcctggagatcctgcagatcatcaaggagagccagcagcagcacggcctgcggcatggagacttccagcgctaccgctacctgctgctggtgctgatggatgctgagcgggcctggagctatgccatgcagctgaagcaggaggccaacacagagcccaggaagcgcttccacctgctgagccggctgaggaaggctgtgaagcacgccgaggagctggagcggctgtgtgagagcaacagagtggatgccaagaccaagctggaggcccaggcctacacagcctacctgagcggcatgctgcgctttgagcaccaggagtggaaggccgccatcgaggccttcaacaagtgcaagaccatctatgagaagctggccagcgccttcacagaggagcaggccgtgctgtacaaccagagggtggaggagatcagccccaacatccgctactgtgcctacaacattggagaccagagcgccatcaatgagctgatgcagatgaggctgcggagcggcggcacagagggcctgctggccgagaagctggaggccctgatcacccagacccgggccaagcaggccgccaccatgtctgaggtggagtggaggggccgcacagtgcctgtgaagattgacaaggtgcgcatcttcctgctgggcctggccgacaatgaggccgccatcgtgcaggccgagagcgaggagaccaaggagcggctgtttgagagcatgctgtctgaatgtagagatgccatccaggtggtgcgggaggagctgaagccagaccagaagcagagggactacatcctggagggggagcccgggaaggtgagcaacctgcagtacctgcacagctacctgacctacatcaagctgagcacagccatcaagagaaatgaaaacatggccaagggcctgcagagggccctgctgcagcagcagccagaagatgacagcaagaggagcccccggccccaggacctgatccggctgtatgacatcatcctgcagaacctggtggagctgctgcagctgcccggcctggaggaggacaaggccttccagaaggagatcggcctgaagaccctggtgttcaaggcctaccgctgcttcttcatcgcccagagctatgtgctggtgaagaagtggagcgaggccctggtgctgtatgacagagtgctgaagtatgccaatgaggtgaacagtgatgctggggccttcaagaacagcctgaaggacctgcctgatgtgcaggagctgatcacccaggtgcgctctgagaagtgcagcctgcaggccgccgccatcctggatgccaatgatgcccaccagacagagaccagcagcagccaggtgaaggacaacaagcccctggtggagagatttgagaccttctgcctggaccccagcctggtgaccaagcaggccaacctggtgcacttccccccaggcttccagcccatcccctgcaagcccctcttctttgacctggccctgaaccacgtggccttcccccccctggaggacaagctggagcagaagaccaagagcggcctgaccggctacatcaagggcatcttcggcttccgctcctag

SEQ ID NO: 169755 - DNA, 1110 bp, synthetic construct
  misc_feature 1..1110: note = Description of Artificial Sequence: Synthetic coding sequence
  source 1..1110: mol_type = other DNA
atggctgctgagaagcaggtgcctgggggcggcggcggcggcggcagcggcggcggcggcggcagcggcggcggcggcagcggcggcggcagaggagctggaggagaggagaacaaggaaaatgaaagaccttctgctggcagcaaggccaacaaggagtttggagacagcctgagcctggagatcctgcagatcatcaaggagagccagcagcagcacggcctgcggcatggagacttccagcgctaccggggctactgcagccggcggcagaggcggctgaggaagaccctgaacttcaagatgggcaacagacacaagttcaccgggaagaaggtgacagaggagctgctgacagacaaccgctacctgctgctggtgctgatggatgctgagcgggcctggagctatgccatgcagctgaagcaggaggccaacacagagcccaggaagcgcttccacctgctgagccggctgaggaaggctgtgaagcacgccgaggagctggagcggctgtgtgagagcaacagagtggatgccaagaccaagctggaggcccaggcctacacagcctacctgagcggcatgctgcgctttgagcaccaggagtggaaggccgccatcgaggccttcaacaagtgcaagaccatctatgagaagctggccagcgccttcacagaggagcaggccgtgctgtacaaccagagggtggaggagatcagccccaacatccgctactgtgcctacaacattggagaccagagcgccatcaatgagctgatgcagatgaggctgcggagcggcggcacagagggcctgctggccgagaagctggaggccctgatcacccagacccgggccaagcaggccgccaccatgtctgaggtggagtggaggggccgcacagtgcctgtgaagattgacaaggtgcgcatcttcctgctgggcctggccgacaatgaggccgccatcgtgcaggccgagagcgaggagaccaaggagcggctgtttgagagcatgctgtctgaatgtagagatgccatccaggtggtgcgggaggagctgaagccagaccagagggacctgctgctgcccagccagggccagtag

SEQ ID NO: 169756 - DNA, 867 bp, synthetic construct
  misc_feature 1..867: note = Description of Artificial Sequence: Synthetic coding sequence
  source 1..867: mol_type = other DNA
atgctgtctgagtgcagagatgccatccaggtggtgcgggaggagctgaagccagaccagaagcagagggactacatcctggagggggagcccgggaaggtgagcaacctgcagtacctgcacagctacctgacctacatcaagctgagcacagccatcaagagaaatgaaaacatggccaagggcctgcagagggccctgctgcagcagcagccagaagatgacagcaagaggagcccccggccccaggacctgatccggctgtatgacatcatcctgcagaacctggtggagctgctgcagctgcccggcctggaggaggacaaggccttccagaaggagatcggcctgaagaccctggtgttcaaggcctaccgctgcttcttcatcgcccagagctatgtgctggtgaagaagtggagcgaggccctggtgctgtatgacagagtgctgaagtatgccaatgaggtgaacagtgatgctggggccttcaagaacagcctgaaggacctgcctgatgtgcaggagctgatcacccaggtgcgctctgagaagtgcagcctgcaggccgccgccatcctggatgccaatgatgcccaccagacagagaccagcagcagccaggtgaaggacaacaagcccctggtggagagatttgagaccttctgcctggaccccagcctggtgaccaagcaggccaacctggtgcacttccccccaggcttccagcccatcccctgcaagcccctcttctttgacctggccctgaaccacgtggccttcccccccctggaggacaagctggagcagaagaccaagagcggcctgaccggctacatcaagggcatcttcggcttccgctcctag

SEQ ID NO: 169757 - DNA, 2016 bp, synthetic construct
  misc_feature 1..2016: note = Description of Artificial Sequence: Synthetic coding sequence
  source 1..2016: mol_type = other DNA
atggccagcggcggcagcggcggcgtgtctgtgcctgccctgtggagcgaggtgaacagatatggccagaatggagacttcacccgggccctgaagacagtgaacaagatcctgcagatcaacaaggatgatgtgacagccctgcactgcaaggtggtgtgcctgatccagaatggcagcttcaaggaggccctgaatgtcatcaacacccacaccaaggtgctggccaacaacagcctgagctttgagaaggcctactgtgagtaccgcctgaacagaattgaaaatgccctgaagaccattgaaagtgccaaccagcagacagacaagctgaaggagctgtatggccaggtgctgtaccgcctggagagatatgatgaatgtctggccgtgtacagagacctggtgaggaacagccaggatgattatgatgaggagaggaagaccaacctgtctgctgtggtggccgcccagagcaactgggagaaggtggtgcctgagaacctgggcctgcaggagggcacccatgagctgtgctacaacacagcctgtgccctgattggccagggccagctgaaccaggccatgaagatcctgcagaaggccgaggacctgtgcagaagaagcctgtctgaggacacagatggaacagaggaggacccccaggccgagctggccatcatccacggccagatggcctacatcctgcagctgcagggccgcacagaggaggccctgcagctgtacaaccagatcatcaagctgaagcccacagatgtgggcctgctggccgtcatcgccaacaacatcatcaccatcaacaaggaccagaatgtgtttgacagcaagaagaaggtgaagctgaccaatgctgagggcgtggagttcaagctgagcaagaagcagctgcaggccatcgagttcaacaaggccctgctggccatgtacaccaaccaggccgagcagtgcaggaagatcagcgccagcctgcagagccagagccctgagcacctgctgcctgtgctgatccaggccgcccagctgtgccgggagaagcagcacaccaaggccatcgagctgctgcaggagttcagtgaccagcacccagaaaatgctgctgagatcaagctgaccatggcccagctgaagatcagccagggcaacatcagcaaggcctgcctgatcctgcggagcattgaggagctgaagcacaagccaggcatggtgtctgccctggtgaccatgtacagccatgaggaggacatcgacagcgccatcgaggtgttcacccaggccatccagtggtaccagaaccaccagcccaagagccctgcccacctgagcctcatccgggaggccgccaacttcaagctgaagtatggcaggaagaaggaggccatcagtgacctgcagcagctgtggaagcagaaccccaaggacatccacaccctggcccagctgatcagcgcctacagcctggtggaccctgagaaggccaaggccctgagcaagcacctgcccagcagtgacagcatgagcctgaaggtggatgtggaggccctggagaacagcgctggggccacctacatcaggaagaagggcggcaaggtgactggagacagccagcccaaggagcagggccagggcgacctgaagaagaagaagaagaagaagaagggcaagctgcccaagaactatgaccccaaggtgaccccagaccctgagcgctggctgcccatgagggagaggagctactaccggggcaggaagaagggcaagaagaaggaccagatcggcaagggcacccagggcgccacagctggggccagcagcgagctggatgccagcaagacagtgagcagcccccccaccagcccccggcccggcagcgctgccaccgtgtctgccagcaccagcaacatcatccccccaagacaccagaagccagctggggccccagccaccaagaagaagcagcagcagaagaagaagaagggcggcaagggcggctggtag

SEQ ID NO: 169758 - DNA, 1878 bp, synthetic construct
  misc_feature 1..1878: note = Description of Artificial Sequence: Synthetic coding sequence
  source 1..1878: mol_type = other DNA
cccctggtgagcagcaagatggccagcggcggcagcggcggcgtgtctgtgcctgccctgtggagcgaggtgaacagatatggccagaatggagacttcacccgggccctgaagacagtgaacaagatcctgcagatcaacaaggatgatgtgacagccctgcactgcaaggtggtgtgcctgatccagaatggcagcttcaaggaggccctgaatgtcatcaacacccacaccaaggtgctggccaacaacagcctgagctttgagaaggcctactgtgagtaccgcctgaacagaattgaaaatgccctgaagaccattgaaagtgccaaccagcagacagacaagctgaaggagctgtatggccaggtgctgtaccgcctggagagatatgatgaatgtctggccgtgtacagagacctggtgaggaacagccaggatgattatgatgaggagaggaagaccaacctgtctgctgtggtggccgcccagagcaactgggagaaggtggtgcctgagaacctgggcctgcaggagggcacccatgagctgtgctacaacacagcctgtgccctgattggccagggccagctgaaccaggccatgaagatcctgcagaaggccgaggacctgtgcagaagaagcctgtctgaggacacagaccagaatgtgtttgacagcaagaagaaggtgaagctgaccaatgctgagggcgtggagttcaagctgagcaagaagcagctgcaggccatcgagttcaacaaggccctgctggccatgtacaccaaccaggccgagcagtgcaggaagatcagcgccagcctgcagagccagagccctgagcacctgctgcctgtgctgatccaggccgcccagctgtgccgggagaagcagcacaccaaggccatcgagctgctgcaggagttcagtgaccagcacccagaaaatgctgctgagatcaagctgaccatggcccagctgaagatcagccagggcaacatcagcaaggcctgcctgatcctgcggagcattgaggagctgaagcacaagccaggcatggtgtctgccctggtgaccatgtacagccatgaagaagatattgattctgccatcgaggtgttcacccaggccatccagtggtaccagaaccaccagcccaagagccctgcccacctgagcctcatccgggaggccgccaacttcaagctgaagtatggcaggaagaaggaggccatcagtgacctgcagcagctgtggaagcagaaccccaaggacatccacaccctggcccagctgatcagcgcctacagcctggtggaccctgagaaggccaaggccctgagcaagcacctgcccagcagtgacagcatgagcctgaaggtggatgtggaggccctggagaacagcgctggggccacctacatcaggaagaagggcggcaaggtgactggagacagccagcccaaggagcagggccagggcgacctgaagaagaagaagaagaagaagaagggcaagctgcccaagaactatgaccccaaggtgaccccagaccctgagcgctggctgcccatgagggagaggagctactaccggggcaggaagaagggcaagaagaaggaccagatcggcaagggcacccagggcgccacagctggggccagcagcgagctggatgccagcaagacagtgagcagcccccccacccaggacctggccgtgctgcagcagtacctgcccctgcaggtgaccagctacccccaggacaccaggaacctgcagggcctgcagcagcagaagaggaacagcaacaggaagaggaggaaggtggagaaggtggccggagatgagaacatcctggtggccggctgcttctag

SEQ ID NO: 169759 - DNA, 1833 bp, synthetic construct
  misc_feature 1..1833: note = Description of Artificial Sequence: Synthetic coding sequence
  source 1..1833: mol_type = other DNA
atggccagcggcggcagcggcggcgtgtctgtgcctgccctgtggagcgaggtgaacagatatggccagaatggagacttcacccgggccctgaagacagtgaacaagatcctgcagatcaacaaggatgatgtgacagccctgcactgcaaggtggtgtgcctgatccagaatggcagcttcaaggaggccctgaatgtcatcaacacccacaccaaggtgctggccaacaacagcctgagctttgagaaggcctactgtgagtaccgcctgaacagaattgaaaatgccctgaagaccattgaaagtgccaaccagcagacagacaagctgaaggagctgtatggccaggtgctgtaccgcctggagagatatgatgaatgtctggccgtgtacagagacctggtgaggaacagccaggatgattatgatgaggagaggaagaccaacctgtctgctgtggtggccgcccagagcaactgggagaaggtggtgcctgagaacctgggcctgcaggagggcacccatgagctgtgctacaacacagcctgtgccctgattggccagggccagctgaaccaggccatgaagatcctgcagaaggccgaggacctgtgcagaagaagcctgtctgaggacacagaccagaatgtgtttgacagcaagaagaaggtgaagctgaccaatgctgagggcgtggagttcaagctgagcaagaagcagctgcaggccatcgagttcaacaaggccctgctggccatgtacaccaaccaggccgagcagtgcaggaagatcagcgccagcctgcagagccagagccctgagcacctgctgcctgtgctgatccaggccgcccagctgtgccgggagaagcagcacaccaaggccatcgagctgctgcaggagttcagtgaccagcacccagaaaatgctgctgagatcaagctgaccatggcccagctgaagatcagccagggcaacatcagcaaggcctgcctgatcctgcggagcattgaggagctgaagcacaagccaggcatggtgtctgccctggtgaccatgtacagccatgaagaagatattgattctgccatcgaggtgttcacccaggccatccagtggtaccagaaccaccagcccaagagccctgcccacctgagcctcatccgggaggccgccaacttcaagctgaagtatggcaggaagaaggaggccatcagtgacctgcagcagctgtggaagcagaaccccaaggacatccacaccctggcccagctgatcagcgcctacagcctggtggaccctgagaaggccaaggccctgagcaagcacctgcccagcagtgacagcatgagcctgaaggtggatgtggaggccctggagaacagcgctggggccacctacatcaggaagaagggcggcaaggtgactggagacagccagcccaaggagcagggccagggcgacctgaagaagaagaagaagaagaagaagggcaagctgcccaagaactatgaccccaaggtgaccccagaccctgagcgctggctgcccatgagggagaggagctactaccggggcaggaagaagggcaagaagaaggaccagatcggcaagggcacccagggcgccacagctggggccagcagcgagctggatgccagcaagacagtgagcagcccccccaccagccccaggcctggcagcgctgccaccgtgtctgccagcaccagcaacatcatcccccccaggcaccagaagccagctggggccccagccaccaagaagaagcagcagcagaagaagaagaagggcggcaaaggaggctggtag

SEQ ID NO: 169760 - DNA, 1917 bp, synthetic construct
  misc_feature 1..1917: note = Description of Artificial Sequence: Synthetic coding sequence
  source 1..1917: mol_type = other DNA
atgctggacttcttcaccatcttcagcaagggcggcctggtgctgtggtgcttccagggcgtgtctgacagctgcaccggccctgtgaatgccctgatccgctctgtgctgctgcaggagcggggcggcaacaacagcttcacccatgaggccctgaccctgaagtacaagctggacaaccagtttgagctggtgtttgtggtgggcttccagaagatcctgaccctgacctacgtggacaagctgattgatgatgtgcacaggctcttccgggacaagtacagaacagagatccagcagcagagcgccctgagcctgctgaatggcacctttgacttccagaatgacttcctgcggctgctgcgggaggccgaggagagcagcaagatccgggcccccaccaccatgaagaagtttgaggacagcgagaaggccaagaagcctgtgcgctccatgattgagaccagaggagagaagcccaaggagaaggccaagaacagcaagaagaagggggccaagaaggagggcagtgatggccccctggccaccagcaagcctgtgcctgctgagaagagcggcctgcctgtgggcccagaaaatggagtggagctgagcaaggaggagctgatccggaggaagcgggaggagttcatccagaagcacggccggggcatggagaagagcaacaagagcaccaagagtgatgcccccaaggagaagggcaagaaggccccccgggtgtgggagctgggcggctgtgccaacaaggaggtgctggactacagcacccccaccaccaacggcaccccagaggccgccctgtctgaggacatcaacctgatccggggcaccggcagcggcggccagctgcaggacctggactgcagcagcagtgatgatgagggcgccgcccagaacagcaccaagcccagcgccaccaagggcaccctgggcggcatgtttggcatgctgaagggcctggtgggcagcaagagcctgagccgggaggacatggagagcgtgctggacaagatgagggaccacctgattgccaagaatgtggccgctgacattgctgtgcagctgtgtgagagcgtggccaacaagctggagggcaaggtgatgggcaccttcagcacagtgaccagcacagtgaagcaggccctgcaggagagcctggtgcagatcctgcagccccagaggagagtggacatgctgcgggacatcatggatgcccagaggcggcagaggccctacgtggtgaccttctgtggggtgaatggagtgggcaagagcaccaacctggccaagatctccttctggctgctggagaatggcttctctgtgctgattgctgcctgtgacaccttccgggccggggctgtggagcagctgcggacccacacccggcggctgagcgccctgcaccccccagagaagcatggaggccgcaccatggtgcagctgtttgagaagggctacggcaaggatgctgctggcatcgccatggaggccatcgcctttgccaggaaccagggctttgatgtggtgctggtggacacagctggccgcatgcaggacaatgcccccctgatgacagccctggccaagctgatcaccgtgaacaccccagacctggtgctgtttgtgggggaggccctggtgggcaatgaagctgtggaccagctggtgaagttcaacagagccctggccgaccacagcatggcccagaccccccggctgattgatggcatcgtgctgaccaagtttgacaccattgatgacaaggtgggcgccgccatctccatgacctacatcaccagcaagcccatcgtgtttgtgggcaccggccagacctactgtgacctgcggagcctgaatgccaaggctgtggtggccgccctgatgaaggcctag

SEQ ID NO: 169761 - DNA, 552 bp, synthetic construct
  misc_feature 1..552: note = Description of Artificial Sequence: Synthetic coding sequence
  source 1..552: mol_type = other DNA
atgaggctgctgagctttgtggtgctggccctgtttgctgtgacccaggccgaggagggcgcccggctgctggccagcaagagcctgctgaacagatatgctgtggagggccgggacctgaccctgcagtacaacatctacaacgtgggcagcagcgctgccctggatgtggagctgagtgatgacagcttccccccagaagattttggaattgtgtctggcatgctgaatgtgaagtgggacagaattgccccagccagcaatgtgagccacacagtggtgctgcggcccctgaaggccggctacttcaacttcaccagcgccaccatcacctacctggcccaggaggatggccctgtggtgattggcagcaccagcgcccctggccagggcggcatcctggcccagcgggagtttgaccggcgcttcagcccccacttcctggactgggccgcctttggagtgatgaccctgcccagcatcggcatccccctgctgctgtggtacagcagcaagaggaaatatgacacccccaagaccaagaagaactag

SEQ ID NO: 169762 - DNA, 552 bp, synthetic construct; identical to SEQ ID NO: 169761
  misc_feature 1..552: note = Description of Artificial Sequence: Synthetic coding sequence
  source 1..552: mol_type = other DNA

SEQ ID NO: 169763 - DNA, 258 bp, synthetic construct
  misc_feature 1..258: note = Description of Artificial Sequence: Synthetic coding sequence
  source 1..258: mol_type = other DNA
atgaggctgctgagctttgtggtgctggccctgtttgctgtgacccaggccgaggagggcgcccggctgctggccagcaagagcctgctgaacagatatgctgtggagggccgggacctgaccctgcagtacaacatctacaacgtgggcagcagcgctgccctggatgtggagctgagtgatgacagcttccccccagaagattttggaattgtgtctggcatgctgaatgtgaagtgggacagaattgccccctag

SEQ ID NO: 169764 - DNA, 444 bp, synthetic construct
  misc_feature 1..444: note = Description of Artificial Sequence: Synthetic coding sequence
  source 1..444: mol_type = other DNA
atgaggctgctgagctttgtggtgctggccctgtttgctgtgacccaggccgaggagggcgcccggctgctggccagcaagagcctgctgaacagatatgctgtggagggccgggacctgaccctgcagtacaacatctacaacgtgggcagcagcgctgccctggatgtggagctgagtgatgacagcttccccccagaagattttggaattgtgtctggcatgctgaatgtgaagtgggacagaattgccccagccagcaatgtgagccacacagtggtgctgcggcccctgaaggccggctacttcaacttcaccagcgccaccatcacctacctggcccaggaggatggccctgtggtgattggcagcaccagcgcccctggccagggcggcatcctggcccagcgggagtttgaccggcgcttcagcccccacttctag

SEQ ID NO: 169765 - DNA, 522 bp, synthetic construct
  misc_feature 1..522: note = Description of Artificial Sequence: Synthetic coding sequence
  source 1..522: mol_type = other DNA
atggccgccatggccagcctgggcgccctggccctgctgctgctgagcagcctgagccgctgcagcgctgaggcctgcctggagccccagatcacccccagctactacaccaccagtgatgctgtgatcagcacagaaacagtgttcatcgtggagatcagcctgacctgcaagaacagagtgcagaacatggccctgtatgcagatgtgggcggcaagcagtttcctgtgacccggggccaggatgtgggccgctaccaggtgtcctggagcctggaccacaagagcgcccatgctggcacctatgaggtgcgcttctttgatgaggagagctacagcctgctgaggaaggcccagaggaacaatgaagacatcagcatcatccccccactcttcaccgtgtctgtggaccaccggggcacctggaatggcccctgggtgtccacagaggtgctggccgccgccatcggcctggtgatctactacctggccttcagcgccaagagccacatccaggcctag

SEQ ID NO: 169766 - DNA, 447 bp, synthetic construct
  misc_feature 1..447: note = Description of Artificial Sequence: Synthetic coding sequence
  source 1..447: mol_type = other DNA
atggccgccatggccagcctgggcgccctggccctgctgctgctgagcagcctgagccgctgcagcgctgaggcctgcctggagccccagatcacccccagctactacaccaccagtgatgctgtgatcagcacagaaacagtgttcatcgtggagatcagcctgacctgcaagaacagagtgcaggtgtcctggagcctggaccacaagagcgcccacgccggcacctatgaggtgcgcttctttgatgaggagagctacagcctgctgaggaaggcccagagaaataatgaagacatcagcatcatccccccactcttcaccgtgtctgtggaccaccggggcacctggaatggcccctgggtgtccacagaggtgctggccgccgccatcggcctggtgatctactacctggccttcagcgccaagagccacatccaggcctag

SEQ ID NO: 169767 - DNA, 522 bp, synthetic construct; identical to SEQ ID NO: 169765
  misc_feature 1..522: note = Description of Artificial Sequence: Synthetic coding sequence
  source 1..522: mol_type = other DNA

SEQ ID NO: 169768 - DNA, 522 bp, synthetic construct; identical to SEQ ID NO: 169765
  misc_feature 1..522: note = Description of Artificial Sequence: Synthetic coding sequence
  source 1..522: mol_type = other DNA

SEQ ID NO: 169769 - DNA, 363 bp, synthetic construct
  misc_feature 1..363: note = Description of Artificial Sequence: Synthetic coding sequence
  source 1..363: mol_type = other DNA
tgagtgggcagcggctgccgctctgctgctgtgtctgccctggtggtgcgggtggccccaccctgccccctgtgcccccacagcgcccagcaccccacccaggtgtcctggagcctggaccacaagagcgcccacgccggcacctatgaggtgcgcttctttgatgaggagagctacagcctgctgaggaaggcccagagaaataatgaagacatcagcatcatccccccactcttcaccgtgtctgtggaccaccggggcacctggaatggcccctgggtgtccacagaggtgctggccgccgccatcggcctggtgatctactacctggccttcagcgccaagagccacatccaggcctag

SEQ ID NO: 169770 - DNA, 2544 bp, synthetic construct
  misc_feature 1..2544: note = Description of Artificial Sequence: Synthetic coding sequence
  source 1..2544: mol_type = other DNA
atgagcctgtggggcctggtgtccaagatgcctcctgagaaggtgcagaggctgtatgtggacttcccccagcacctgcggcacctgctgggggactggctggagagccagccctgggagttcctggtgggcagtgatgccttctgctgcaacctggccagcgccctgctgagtgacacagtgcagcacctgcaggcctctgtgggggagcagggcgagggcagcaccatcctgcagcacatcagcaccctggagagcatctaccagagggaccccctgaagctggtggccaccttccggcagatcctgcagggcgagaagaaggctgtgatggagcagttccgccacctgcccatgcccttccactggaagcaggaggagctgaagttcaagacaggcctgcggcggctgcagcaccgggtgggggagatccacctgctgcgggaggccctgcagaagggagctgaggccggccaggtgtccctgcacagcctcatcgagaccccagccaatggaacaggccccagcgaggccctggccatgctgctgcaggagaccactggagagctggaggccgccaaggccctggtgctgaagaggatccagatctggaagaggcagcagcagctggccggaaatggagccccctttgaggagagcctggcccccctgcaggagcgctgtgagagcctggtggacatctacagccagctgcagcaggaggtgggcgctgctggaggagagctggagcccaagacccgggccagcctgaccggccgcctggatgaggtgctgcggaccctggtgaccagctgcttcctggtggagaagcagcccccccaggtgctgaagacccagaccaagttccaggccggcgtgcgcttcctgctgggcctgcgcttcctgggcgccccagccaagccacccctggtgcgggctgacatggtgacagagaagcaggcccgggagctgtctgtgccccagggccctggggccggggctgagagcactggagagatcatcaacaacacagtgcccctggagaacagcatccctggcaactgctgcagcgccctcttcaagaacctgctgctgaagaagatcaagagatgtgagaggaagggcacagagagcgtgacagaggagaagtgtgctgtgctcttcagcgccagcttcaccctgggccctgggaagctgcccatccagctgcaggccctgagcctgcccctggtggtgattgtgcacggcaaccaggacaacaatgccaaggccaccatcctgtgggacaatgccttcagcgagatggacagagtgccctttgtggtggccgagcgggtgccctgggagaagatgtgtgagaccctgaacctgaagttcatggccgaggtgggcaccaacagaggcctgctgcctgagcacttcctgttcctggcccagaagatcttcaatgacaacagcctgtccatggaggccttccagcacaggtctgtgtcctggagccagttcaacaaggagatcctgctgggccggggcttcaccttctggcagtggtttgatggagtgctggacctgaccaagcgctgcctgcggagctactggagcgacaggctcatcatcggcttcatcagcaagcagtatgtgaccagcctgctgctgaatgaaccagatggcaccttcctgctgcgcttcagtgacagcgagatcggcggcatcaccatcgcccacgtgatccggggccaggacggcagcccccagatcgagaacatccagcccttcagcgccaaggacctgagcatccgcagcctgggggaccgcatccgggacctggcccagctgaagaacctgtaccccaagaagcccaaggatgaggccttccgcagccactacaagccagagcagatgggcaaggatggccggggctacgtgcctgccaccatcaagatgacagtggagcgggaccagcccctgcccaccccagagctgcagatgcccaccatggtgcccagctatgacctgggcatggccccagacagctccatgtccatgcagctgggccctgacatggtgccccaggtgtacccaccccacagccacagcatccccccctaccagggcctgagccctgaggagagcgtgaatgtgctgagcgccttccaggagccccacctgcagatgccacccagcctgggccagatgagcctgccctttgaccagccccacccccagggcctgctgccctgccagccccaggagcacgctgtgagcagcccagaccccctgctgtgcagtgatgtgaccatggtggaggacagctgcctgagccagcctgtgacagccttcccccagggcacctggattggagaggacatcttcccccccctgctgcccccaacagagcaggacctgaccaagctgctgctggagggccagggcgagagcggcggcggcagcctgggcgcccagcccctgctgcagcccagccactacggccagagcggcatctccatgagccacatggacctgcgggccaaccccagctggtag

SEQ ID NO: 169771 - DNA, 2544 bp, synthetic construct; identical to SEQ ID NO: 169770
  misc_feature 1..2544: note = Description of Artificial Sequence: Synthetic coding sequence
  source 1..2544: mol_type = other DNA

SEQ ID NO: 169772 - DNA, 2214 bp, synthetic construct
  misc_feature 1..2214: note = Description of Artificial Sequence: Synthetic coding sequence
  source 1..2214: mol_type = other DNA
atggagcagttccgccacctgcccatgcccttccactggaagcaggaggagctgaagttcaagacaggcctgcggcggctgcagcaccgggtgggggagatccacctgctgcgggaggccctgcagaagggagctgaggccggccaggtgtccctgcacagcctcatcgagaccccagccaatggaacaggccccagcgaggccctggccatgctgctgcaggagaccactggagagctggaggccgccaaggccctggtgctgaagaggatccagatctggaagaggcagcagcagctggccggaaatggagccccctttgaggagagcctggcccccctgcaggagcgctgtgagagcctggtggacatctacagccagctgcagcaggaggtgggcgctgctggaggagagctggagcccaagacccgggccagcctgaccggccgcctggatgaggtgctgcggaccctggtgaccagctgcttcctggtggagaagcagcccccccaggtgctgaagacccagaccaagttccaggccggcgtgcgcttcctgctgggcctgcgcttcctgggcgccccagccaagccacccctggtgcgggctgacatggtgacagagaagcaggcccgggagctgtctgtgccccagggccctggggccggggctgagagcactggagagatcatcaacaacacagtgcccctggagaacagcatccctggcaactgctgcagcgccctcttcaagaacctgctgctgaagaagatcaagagatgtgagaggaagggcacagagagcgtgacagaggagaagtgtgctgtgctcttcagcgccagcttcaccctgggccctgggaagctgcccatccagctgcaggccctgagcctgcccctggtggtgattgtgcacggcaaccaggacaacaatgccaaggccaccatcctgtgggacaatgccttcagcgagatggacagagtgccctttgtggtggccgagcgggtgccctgggagaagatgtgtgagaccctgaacctgaagttcatggccgaggtgggcaccaacagaggcctgctgcctgagcacttcctgttcctggcccagaagatcttcaatgacaacagcctgtccatggaggccttccagcacaggtctgtgtcctggagccagttcaacaaggagatcctgctgggccggggcttcaccttctggcagtggtttgatggagtgctggacctgaccaagcgctgcctgcggagctactggagcgacaggctcatcatcggcttcatcagcaagcagtatgtgaccagcctgctgctgaatgaaccagatggcaccttcctgctgcgcttcagtgacagcgagatcggcggcatcaccatcgcccacgtgatccggggccaggacggcagcccccagatcgagaacatccagcccttcagcgccaaggacctgagcatccgcagcctgggggaccgcatccgggacctggcccagctgaagaacctgtaccccaagaagcccaaggatgaggccttccgcagccactacaagccagagcagatgggcaaggatggccggggctacgtgcctgccaccatcaagatgacagtggagcgggaccagcccctgcccaccccagagctgcagatgcccaccatggtgcccagctatgacctgggcatggccccagacagctccatgtccatgcagctgggccctgacatggtgccccaggtgtacccaccccacagccacagcatccccccctaccagggcctgagccctgaggagagcgtgaatgtgctgagcgccttccaggagccccacctgcagatgccacccagcctgggccagatgagcctgccctttgaccagccccacccccagggcctgctgccctgccagccccaggagcacgctgtgagcagcccagaccccctgctgtgcagtgatgtgaccatggtggaggacagctgcctgagccagcctgtgacagccttcccccagggcacctggattggagaggacatcttcccccccctgctgcccccaacagagcaggacctgaccaagctgctgctggagggccagggcgagagcggcggcggcagcctgggcgcccagcccctgctgcagcccagccactacggccagagcggcatctccatgagccacatggacctgcgggccaaccccagctggtag

SEQ ID NO: 169773 - DNA, 2214 bp, synthetic construct; identical to SEQ ID NO: 169772
  misc_feature 1..2214: note = Description of Artificial Sequence: Synthetic coding sequence
  source 1..2214: mol_type = other DNA

SEQ ID NO: 169774 - DNA, 2214 bp, synthetic construct; identical to SEQ ID NO: 169772
  misc_feature 1..2214: note = Description of Artificial Sequence: Synthetic coding sequence
  source 1..2214: mol_type = other DNA

SEQ ID NO: 169775 - DNA, 2040 bp, synthetic construct
  misc_feature 1..2040: note = Description of Artificial Sequence: Synthetic coding sequence
  source 1..2040: mol_type = other DNA
atgagcctgtggggcctggtgtccaagatgcctcctgagaaggtgcagaggctgtatgtggacttcccccagcacctgcggcacctgctgggggactggctggagagccagccctgggagttcctggtgggcagtgatgccttctgctgcaacctggccagcgccctgctgagtgacacagtgcagcacctgcaggcctctgtgggggagcagggcgagggcagcaccatcctgcagcacatcagcaccctggagagcatctaccagagggaccccctgaagctggtggccaccttccggcagatcctgcagggcgagaagaaggctgtgatggagcagttccgccacctgcccatgcccttccactggaagcaggaggagctgaagttcaagacaggcctgcggcggctgcagcaccgggtgggggagatccacctgctgcgggaggccctgcagaagggagctgaggccggccaggtgtccctgcacagcctcatcgagaccccagccaatggaacaggccccagcgaggccctggccatgctgctgcaggagaccactggagagctggaggccgccaaggccctggtgctgaagaggatccagatctggaagaggcagcagcagctggccggaaatggagccccctttgaggagagcctggcccccctgcaggagcgctgtgagagcctggtggacatctacagccagctgcagcaggaggtgggcgctgctggaggagagctggagcccaagacccgggccagcctgaccggccgcctggatgaggtgctgcggaccctggtgaccagctgcttcctggtggagaagcagcccccccaggtgctgaagacccagaccaagttccaggccggcgtgcgcttcctgctgggcctgcgcttcctgggcgccccagccaagccacccctggtgcgggctgacatggtgacagagaagcaggcccgggagctgtctgtgccccagggccctggggccggggctgagagcactggagagatcatcaacaacacagtgcccctggagaacagcatccctggcaactgctgcagcgccctcttcaagaacctgctgctgaagaagatcaagagatgtgagaggaagggcacagagagcgtgacagaggagaagtgtgctgtgctcttcagcgccagcttcaccctgggccctgggaagctgcccatccagctgcaggccctgagcctgcccctggtggtgattgtgcacggcaaccaggacaacaatgccaaggccaccatcctgtgggacaatgccttcagcgagatggacagagtgccctttgtggtggccgagcgggtgccctgggagaagatgtgtgagaccctgaacctgaagttcatggccgaggtgggcaccaacagaggcctgctgcctgagcacttcctgttcctggcccagaagatcttcaatgacaacagcctgtccatggaggccttccagcacaggtctgtgtcctggagccagttcaacaaggagatcctgctgggccggggcttcaccttctggcagtggtttgatggagtgctggacctgaccaagcgctgcctgcggagctactggagcgacaggctcatcatcggcttcatcagcaagcagtatgtgaccagcctgctgctgaatgaaccagatggcaccttcctgctgcgcttcagtgacagcgagatcggcggcatcaccatcgcccacgtgatccggggccaggacggcagcccccagatcgagaacatccagcccttcagcgccaaggacctgagcatccgcagcctgggggaccgcatccgggacctggcccagctgaagaacctgtaccccaagaagcccaaggatgaggccttccgcagccactacaagccagagcagatgggcaaggatggccggggctacgtgcctgccaccatcaagatgacagtggagcgggaccagcccctgcccaccccagagctgcagatgcccaccatggtgcccagctatgacctgggcatggccctgatccccccatag

SEQ ID NO: 169776 - DNA, 2193 bp, synthetic construct
  misc_feature 1..2193: note = Description of Artificial Sequence: Synthetic coding sequence
  source 1..2193: mol_type = other DNA
atggagcagttccgccacctgcccatgcccttccactggaagcaggaggagctgaagttcaagacaggcctgcggcggctgcagcaccgggtgggggagatccacctgctgcgggaggccctgcagaagggagctgaggccggccaggtgtccctgcacagcctcatcgagaccccagccaatggaacaggccccagcgaggccctggccatgctgctgcaggagaccactggagagctggaggccgccaaggccctggtgctgaagaggatccagatctggaagaggcagcagcagctggccggaaatggagccccctttgaggagagcctggcccccctgcaggagcgctgtgagagcctggtggacatctacagccagctgcagcaggaggtgggcgctgctggaggagagctggagcccaagacccgggccagcctgaccggccgcctggatgaggtgctgcggaccctggtgaccagctgcttcctggtggagaagcagcccccccaggtgctgaagacccagaccaagttccaggccggcgtgcgcttcctgctgggcctgcgcttcctgggcgccccagccaagccacccctggtgcgggctgacatggtgacagagaagcaggcccgggagctgtctgtgccccagggccctggggccggggctgagagcactggagagatcatcaacaacacagtgcccctggagaacagcatccctggcaactgctgcagcgccctcttcaagaacctgctgctgaagaagatcaagagatgtgagaggaagggcacagagagcgtgacagaggagaagtgtgctgtgctcttcagcgccagcttcaccctgggccctgggaagctgcccatccagctgcaggccctgagcctgcccctggtggtgattgtgcacggcaaccaggacaacaatgccaaggccaccatcctgtgggacaatgccttcagcgagatggacagagtgccctttgtggtggccgagcgggtgccctgggagaagatgtgtgagaccctgaacctgaagttcatggccgaggtgggcaccaacagaggcctgctgcctgagcacttcctgttcctggcccagaagatcttcaatgacaacagcctgtccatggaggccttccagcacaggtctgtgtcctggagccagttcaacaaggagatcctgctgggccggggcttcaccttctggcagtggtttgatggagtgctggacctgaccaagcgctgcctgcggagctactggagcgacaggctcatcatcggcttcatcagcaagcagtatgtgaccagcctgctgctgaatgaaccagatggcaccttcctgctgcgcttcagtgacagcgagatcggcggcatcaccatcgcccacgtgatccggggccaggacggcagcccccagatcgagaacatccagcccttcagcgccaaggacctgagcatccgcagcctgggggaccgcatccgggacctggcccagctgaagaacctgtaccccaagaagcccaaggatgaggccttccgcagccactacaagccagagcagatgggcaaggatggccggggctacgtgcctgccaccatcaagatgacagtggagcgggaccagcccctgcccaccccagagctgcagatgcccaccatggtgcccagctatgacctgggcatggccccagacagctccatgtccatgcagctgggccctgacatggtgccccaggtgtacccaccccacagccacagcatccccccctaccagggcctgagccctgaggagagcgtgaatgtgctgagcgccttccaggagccccacctgcagatgccacccagcctgggccagatgagcctgccctttgaccagccccacccccagggcctgctgccctgccagccccaggagcacgctgtgagcagcccagaccccctgctgtgcagtgatgtgaccatggtggaggacagctgcctgagccagcctgtgacagccttcccccagggcacctggattggagaggacatcttcccccccctgctgcccccaacagagcaggacctgaccaagctgctgctggagggccagggcgagagcggcggcggcagcctgggccacagccccagctgcagcccccccaccatgggcaacctgggcagccagtgccccacctggacctag

SEQ ID NO: 169777 - DNA, 2544 bp, synthetic construct; identical to SEQ ID NO: 169770
  misc_feature 1..2544: note = Description of Artificial Sequence: Synthetic coding sequence
  source 1..2544: mol_type = other DNA

SEQ ID NO: 169778 - DNA, 195 bp, synthetic construct
  misc_feature 1..195: note = Description of Artificial Sequence: Synthetic coding sequence
  source 1..195: mol_type = other DNA
atgagcctgtggggcctggtgtccaagatgcctcctgagaaggtgcagaggctgtatgtggacttcccccagcacctgcggcacctgctgggggactggctggagagccagccctgggagttcctggtgggcagtgatgccttctgctgcaacctggccagcgccctgctgagtgacacagtgcagcacctgtag

SEQ ID NO: 169779 - DNA, 435 bp, synthetic construct
  misc_feature 1..435: note = Description of Artificial Sequence: Synthetic coding sequence
  source 1..435: mol_type = other DNA
atgagcctgtggggcctggtgtccaagatgcctcctgagaaggtgcagaggctgtatgtggacttcccccagcacctgcggcacctgctgggggactggctggagagccagccctgggagttcctggtgggcagtgatgccttctgctgcaacctggccagcgccctgctgagtgacacagtgcagcacctgcaggcctctgtgggggagcagggcgagggcagcaccatcctgcagcacatcagcaccctggagagcatctaccagagggaccccctgaagctggtggccaccttccggcagatcctgcagggcgagaagaaggctgtgatggagcagttccgccacctgcccatgcccttccactggaagcaggaggagctgaagttcaagacaggcctgcggcggctgcagcaccgggtgggggagatctag

SEQ ID NO: 169780 - DNA, 465 bp, synthetic construct
  misc_feature 1..465: note = Description of Artificial Sequence: Synthetic coding sequence
  source 1..465: mol_type = other DNA
atgagcctgtggggcctggtgtccaagatgcctcctgagaaggtgcagaggctgtatgtggacttcccccagcacctgcggcacctgctgggggactggctggagagccagccctgggagttcctggtgggcagtgatgccttctgctgcaacctggccagcgccctgctgagtgacacagtgcagcacctgcaggcctctgtgggggagcagggcgagggcagcaccatcctgcagcacatcagcaccctggagagcatctaccagagggaccccctgaagctggtggccaccttccggcagatcctgcagggcgagaagaaggctgtgatggagcagttccgccacctgcccatgcccttccactggaagcaggaggagctgaagttcaagacaggcctgcggcggctgcagcaccgggtgggggagatccacctgctgcgggaggccctgcagaagggctag

SEQ ID NO: 169781 - DNA, 318 bp, synthetic construct
  misc_feature 1..318: note = Description of Artificial Sequence: Synthetic coding sequence
  source 1..318: mol_type = other DNA
atgagcctgtggggcctggtgtccaagatgcctcctgagaaggtgcagaggctgtatgtggacttcccccagcacctgcggcacctgctgggggactggctggagagccagccctgggagttcctggtgggcagtgatgccttctgctgcaacctggccagcgccctgctgagtgacacagtgcagcacctgcaggcctctgtgggggagcagggcgagggcagcaccatcctgcagcacatcagcaccctggagagcatctaccagagggaccccctgaagctggtggccaccttccggcagatcctgcagggctag

SEQ ID NO: 169782 - DNA, 312 bp, synthetic construct
  misc_feature 1..312: note = Description of Artificial Sequence: Synthetic coding sequence
  source 1..312: mol_type = other DNA
atgagcctgtggggcctggtgtccaagatgcctcctgagaaggtgcagaggctgtatgtggacttcccccagcacctgcggcacctgctgggggactggctggagagccagccctgggagttcctggtgggcagtgatgccttctgctgcaacctggccagcgccctgctgagtgacacagtgcagcacctgcaggcctctgtgggggagcagggcgagggcagcaccatcctgcagcacatcagcaccctggagagcatctaccagagggaccccctgaagctggtggccaccttccggcagatcctgtag

SEQ ID NO: 169783 - DNA, 480 bp, synthetic construct
  misc_feature 1..480: note = Description of Artificial Sequence: Synthetic coding sequence
  source 1..480: mol_type = other DNA
atgagcctgtggggcctggtgtccaagatgcctcctgagaaggtgcagaggctgtatgtggacttcccccagcacctgcggcacctgctgggggactggctggagagccagccctgggagttcctggtgggcagtgatgccttctgctgcaacctggccagcgccctgctgagtgacacagtgcagcacctgcaggcctctgtgggggagcagggcgagggcagcaccatcctgcagcacatcagcaccctggagagcatctaccagagggaccccctgaagctggtggccaccttccggcagatcctgcagggcgagaagaaggctgtgatggagcagttccgccacctgcccatgcccttccactggaagcaggaggagctgaagttcaagacaggcctgcggcggctgcagcaccgggtgggggagatccacctgctgcgggaggccctgcagaagggagctgaggccggccagtag

SEQ ID NO: 169784 - DNA, 2544 bp, synthetic construct; identical to SEQ ID NO: 169770
  misc_feature 1..2544: note = Description of Artificial Sequence: Synthetic coding sequence
  source 1..2544: mol_type = other DNA

SEQ ID NO: 169785 - DNA, 225 bp, synthetic construct
  misc_feature 1..225: note = Description of Artificial Sequence: Synthetic coding sequence
  source 1..225: mol_type = other DNA
atgagcctgtggggcctggtgtccaagatgcctcctgagaaggtgcagaggctgtatgtggacttcccccagcacctgcggcacctgctgggggactggctggagagccagccctgggagttcctggtgggcagtgatgccttctgctgcaacctggccagcgccctgctgagtgacacagtgcagcacctgcaggcctctgtgggggagcagggcgagggctag

SEQ ID NO: 169786 - DNA, 564 bp, synthetic construct
  misc_feature 1..564: note = Description of Artificial Sequence: Synthetic coding sequence
  source 1..564: mol_type = other DNA
atgctgggccaccccaaggtgtgtgagaagctgaaggccctgatggtggagtggacagatgagttcaagaatgacccccagctgagcctcatcagcgccatgatcaagaacctgaaggagcagggcgtgaccttccctgccatcggcagccaggccgctgagcaggccaaggccagccctgccctggtggccaaggaccccggcaccgtggccaacaagaaggaggaggaggacctggccaaggccatcgagctgagcctgaaggagcagaggcagcagagcaccaccctgagcaccctgtaccccagcaccagcagcctgctgaccaaccaccagcacgagggcaggaaggtgcgggccatctatgactttgaggccgctgaggacaatgagctgaccttcaaggccggggagatcatcaccgtgctggatgacagcgaccccaactggtggaagggggagacccaccagggcatcggcctcttccccagcaactttgtgacagctgacctgacagctgagcctgagatgatcaagacagagaagaagacagtgcagttctag

SEQ ID NO: 169787 - DNA, 1623 bp, synthetic construct
  misc_feature 1..1623: note = Description of Artificial Sequence: Synthetic coding sequence
  source 1..1623: mol_type = other DNA
atgcccctgtttgccaccaacccctttgaccaggatgtggagaaggccaccagcgagatgaacacagctgaggactggggcctcatcctggacatctgtgacaaggtgggccagagcaggacaggccccaaggactgcctgcggagcatcatgagaagagtgaaccacaaggacccccacgtggccatgcaggccctgaccctgctgggcgcctgtgtgagcaactgtgggaagatcttccacctggaggtgtgcagccgggactttgccagcgaggtgtccaatgtgctgaacaagggccaccccaaggtgtgtgagaagctgaaggccctgatggtggagtggacagatgagttcaagaatgacccccagctgagcctcatcagcgccatgatcaagaacctgaaggagcagggcgtgaccttccctgccatcggcagccaggccgctgagcaggccaaggccagccctgccctggtggccaaggaccccggcaccgtggccaacaagaaggaggaggaggacctggccaaggccatcgagctgagcctgaaggagcagaggcagcagagcaccaccctgagcaccctgtaccccagcaccagcagcctgctgaccaaccaccagcacgagggcaggaaggtgcgggccatctatgactttgaagctgctgaagataatgagctgaccttcaaggccggggagatcatcaccgtgctggatgacagcgaccccaactggtggaagggggagacccaccagggcatcggcctcttccccagcaactttgtgacagctgacctgacagctgagcctgagatgatcaagacagagaagaagacagtgcagttcagtgatgatgtgcaggtggagaccatcgagcctgagcctgagcccgccttcattgatgaggacaagatggaccagctgctgcagatgctgcagagcacagaccccagtgatgaccagcctgacctgcctgagctgctgcacctggaggccatgtgccaccagatgggccccctgattgatgagaagctggaggacatcgacaggaagcacagcgagctgtctgagctgaatgtgaaggtgatggaggccctgagcctgtacaccaagctgatgaatgaagaccccatgtacagcatgtatgccaagctgcagaaccagccctactacatgcagagcagtggagtgtctggcagccaggtgtatgccggccccccaccttctggggcctacctggtggccggaaatgcccagatgagccacctgcagagctacagcctgcccccagagcagctgagcagcctgagccaggccgtggtgccccccagcgccaacccagccctgcccagccagcagacccaggccgcctaccccaacaccatggtgtcctctgtgcagggcaacacctaccccagccaggcccctgtgtacagccccccacctgctgccacagctgctgctgccacagcagatgtgaccctgtaccagaatgccggccccaacatgccccaggtgcccaactacaacctgaccagcagcaccctgccccagcccggcggcagccagcagcccccccagccccagcagccctacagccagaaggccctgctgtag

SEQ ID NO: 169788 - DNA, 357 bp, synthetic construct
  misc_feature 1..357: note = Description of Artificial Sequence: Synthetic coding sequence
  source 1..357: mol_type = other DNA
atgagaagagtgaaccacaaggacccccacgtggccatgcaggccctgaccctgctgggcgcctgtgtgagcaactgtgggaagatcttccacctggaggtgtgcagccgggactttgccagcgaggtgtccaatgtgctgaacaagggccaccccaaggtgtgtgagaagctgaaggccctgatggtggagtggacagatgagttcaagaatgacccccagctgagcctcatcagcgccatgatcaagaacctgaaggagcagggcgtgaccttccctgccatcggcagccaggccgctgagcaggccaaggccagccctgccctggtggccaaggaccccggcaccgtggcctag

SEQ ID NO: 169789 - DNA, 1290 bp, synthetic construct
  misc_feature 1..1290: note = Description of Artificial Sequence: Synthetic coding sequence
  source 1..1290: mol_type = other DNA
atggtggagtggacagatgagttcaagaatgacccccagctgagcctcatcagcgccatgatcaagaacctgaaggagcagggcgtgaccttccctgccatcggcagccaggccgctgagcaggccaaggccagccctgccctggtggccaaggaccccggcaccgtggccaacaagaaggaggaggaggacctggccaaggccatcgagctgagcctgaaggagcagaggcagcagagcaccaccctgagcaccctgtaccccagcaccagcagcctgctgaccaaccaccagcacgagggcaggaaggtgcgggccatctatgactttgaggccgctgaggacaatgagctgaccttcaaggccggggagatcatcaccgtgctggatgacagcgaccccaactggtggaagggggagacccaccagggcatcggcctcttccccagcaactttgtgacagctgacctgacagctgagcctgagatgatcaagacagagaagaagacagtgcagttcagtgatgatgtgcaggtggagaccatcgagcctgagcctgagcccgccttcattgatgaggacaagatggaccagctgctgcagatgctgcagagcacagaccccagtgatgaccagcctgacctgcctgagctgctgcacctggaggccatgtgccaccagatgggccccctgattgatgagaagctggaggacatcgacaggaagcacagcgagctgtctgagctgaatgtgaaggtgatggaggccctgagcctgtacaccaagctgatgaatgaagaccccatgtacagcatgtatgccaagctgcagaaccagccctactacatgcagagcagcggcgtgtctggcagccaggtgtatgccggccccccacccagcggggcctacctggtggccggaaatgcccagatgagccacctgcagagctacagcctgcccccagagcagctgagcagcctgagccaggccgtggtgcccccatctgccaacccagccctgcccagccagcagacccaggccgcctaccccaacaccatggtgtcctctgtgcagggcaacacctaccccagccaggcccctgtgtacagccccccacctgctgccacagctgctgctgccacagcagatgtgaccctgtaccagaatgccggccccaacatgccccaggtgcccaactacaacctgaccagcagcaccctgccccagcccggcggcagccagcagcccccccagccccagcagccctacagccagaaggccctgctgtag

SEQ ID NO: 169790 - DNA, 1578 bp, synthetic construct
  misc_feature 1..1578: note = Description of Artificial Sequence: Synthetic coding sequence
  source 1..1578: mol_type = other DNA
atgcccctcttcaccgccaacccctttgagcaggatgtggagaaggccaccaatgagtacaacaccacagaggactggagcctcatcatggacatctgtgacaaggtgggcagcaccccaaatggagccaaggactgcctgaaggccatcatgaagagggtgaaccacaaggtgccccacgtggccctgcaggccctgaccctgctgggcgcctgtgtggccaactgtgggaagatcttccacctggaggtgtgcagccgggactttgccacagaggtgcgggctgtgatcaagaacaaggcccaccccaaggtgtgtgagaagctgaagagcctgatggtggagtggagcgaggagttccagaaggacccccagttcagcctcatcagcgccaccatcaagtccatgaaggaggagggcatcaccttccccccagctggcagccagacagtgtctgctgctgccaagaatggcaccagcagcaacaagaacaaggaggatgaggacatcgccaaggccatcgagctgagcctgcaggagcagaagcagcagcacacagagaccaagagcctgtaccccagcagcgagatccagctgaacaacaaggtggccaggaaggtgcgggccctgtatgactttgaagctgtggaggacaatgagctgaccttcaagcatggagagatcatcatcgtgctggatgacagtgatgccaactggtggaagggggagaaccaccggggcatcggcctcttccccagcaactttgtgaccaccaacctgaacatcgagacagaggccgctgctgtggacaagctgaatgtgattgatgatgatgtggaggagatcaagaagtctgagcctgagcctgtgtacattgatgaggacaagatggaccgggccctgcaggtgctgcagagcattgaccccacagacagcaagccagacagccaggacctgctggacctggaggacatctgccagcagatgggccccatgattgatgagaagctggaggagattgacaggaagcacagcgagctgtctgagctgaatgtgaaggtgctggaggccctggagctgtacaacaagctggtgaatgaggcccctgtgtacagcgtgtacagcaagctgcaccccccagcccactaccccccagccagcagcggcgtgcccatgcagacctaccctgtgcagagccacggcggcaactacatgggccagagcatccaccaggtgacagtggcccagagctacagcctgggccctgaccagatcggccccctgcggagcctgccccccaacgtgaacagctctgtgacagcccagcctgcccagaccagctacctgagcacaggccaggacacagtgagcaaccccacctacatgaaccagaacagcaacctgcagagcgccaccggcaccacagcctacacccagcagatgggcatgtctgtggacatgagcagctaccagaacaccaccagcaacctgccccagctggccggcttccctgtgacagtgcctgcccaccctgtggcccagcagcacaccaactaccaccagcagcccctgctgtag

SEQ ID NO: 169791 - DNA, 3129 bp, synthetic construct
  misc_feature 1..3129: note = Description of Artificial Sequence: Synthetic coding sequence
  source 1..3129: mol_type = other DNA
atgcccatgtgggccggcggcgtgggcagcccccggcggggcatggccccagccagcacagatgacctgtttgccaggaagctgcggcagcctgcccggccccccctgaccccccacacctttgagcccaggcctgtgcggggccccctgctgcggagcggcagtgatgctggggaggcccggccccccaccccagccagcccccgggcccgggcccacagccatgaggaggccagcaggcctgctgccaccagcaccaggctcttcacagaccccctggccctgctgggcctgcctgctgaggagcctgagcccgccttcccccctgtgctggagccccgctggtttgcccactatgatgtgcagagcctgctgtttgactgggcccccaggagccagggcatgggcagccacagcgaggccagcagcggcaccctggccagcgctgaggaccaggccgccagcagtgacctgctgcacggggcccctggctttgtgtgtgagctgggcggggagggggagctgggcctgggcggccctgccagcccccctgtgcccccagccctgcccaatgctgctgtgtccatcctggaggagccccagaacagaacatctgcctacagcctggagcacgccgacctgggcgccggctactacaggaagtacttctacggcaaggagcaccagaacttcttcggcatggatgagagcctgggccctgtggccgtgtccctgcggcgggaggagaaggagggcagcggcggcggcaccctgcacagctacagagtcatcgtgaggaccacccagctgcggaccctgcggggcaccatcagtgaagatgccctgcccccaggccccccccggggcctgagccccaggaagctgctggagcacgtggccccccagctgagccccagctgcctgcggctgggcagcgccagccccaaggtgcccaggaccctgctgaccctggatgagcaggtgctgtccttccagaggaaggtgggcatcctgtactgccgggccggccagggcagcgaggaggagatgtacaacaaccaggaggccggccctgccttcatgcagttcctgaccctgctgggagatgtggtgcggctgaagggctttgagagctaccgggcccagctggacaccaagacagacagcacaggcacccacagcctgtacaccacctaccaggaccacgagatcatgtttcatgtgtccaccatgctgccctacacccccaacaaccagcagcagctgctgaggaagaggcacatcggaaatgacatcgtgaccatcgtgttccaggagcccggcagcaagcccttctgccccaccaccatccgcagccacttccagcacgtgttcctggtggtgcgggcccacaccccctgcaccccccacaccacctacagagtggccgtgtccaggacccaggacaccccagccttcggccctgccctgcctgctgggggcggcccctttgctgccaatgctgacttccgggccttcctgctggccaaggccctgaatggagagcaggccgccggccacgcccggcagttccacgccatggccaccaggacccggcagcagtacctgcaggacctggccaccaatgaggtgaccaccaccagcctggacagcgccagcagatttggcctgcccagcctgggcggcagaagaagagctgccccccggggccctggagctgagctgcaggccgccggcagcctggtgtggggcgtgcgggccgcccctggggcccgggtggccgccggggcccaggccagcggccctgagggcatcgaggtgccctgcctgctgggcatctctgctgaggccctggtgctggtggcccccagagatggccgggtggtgttcaactgtgcctgcagagatgtgctggcctggaccttcagcgagcagcagctggacctgtaccacggccgcggggaggccatcaccctgcgctttgatggcagccctggccaggccgtgggggaggtggtggcccggctgcagctggtgtcccggggctgtgagacccgggagctggccctgcccagagatggccagggccgcctgggctttgaggtggatgctgagggctttgtgacccacgtggagcgcttcacctttgctgagacagctggcctgcggcctggggcccggctgctgcgggtgtgtggccagaccctgcccagcctgcggcctgaggccgccgcccagctgctgcggagcgcccccaaggtgtgtgtgacagtgctgcccccagatgagagcggccggccccggcgctccttcagcgagctgtacaccctgagcctgcaggagcccagccggcggggggccccagaccctgtgcaggatgaggtgcagggcgtgaccctgctgcccaccaccaagcagctgctgcacctgtgcctgcaggacggcggcagccccccaggccctggggacctggccgaggagaggacagagttcctgcacagccagaacagcctgagccccaggagcagcctgagtgatgaggcccctgtgctgcccaacaccaccccagacctgctgctggccaccacagccaagcccagcgtgcccagcgctgacagcgagacccccctgacccaggaccggcccggcagccccagcggctctgaagataaaggaaatcctgcccctgagctgcgggccagcttcctgcccaggaccctgagcctgaggaacagcatcagccgcatcatgtctgaggccggcagcggcaccctggaggatgagtggcaggccatcagcgagatcgccagcacctgcaacaccatcctggagagcctgagccgggagggccagcccatccctgagagcggggaccccaagggcacccccaagagtgatgctgagcctgagcccggcaacctgtctgagaaggtgagccacctggagagcatgctgaggaagctgcaggaggacctgcagaaggagaaggctgaccgggccgccctggaggaggaggtgcgcagcctgcggcacaacaacagaaggctgcaggccgagagcgagagcgctgccacccggctgctgctggccagcaagcagctgggcagccccacagctgacctggcctag

SEQ ID NO: 169792 - DNA, 2823 bp, synthetic construct
  misc_feature 1..2823: note = Description of Artificial Sequence: Synthetic coding sequence
  source 1..2823: mol_type = other DNA
atgcccatgtgggccggcggcgtgggcagcccccggcggggcatggccccagccagcacagatgacctgtttgccaggaagctgcggcagcctgcccggccccccctgaccccccacacctttgagcccaggcctgtgcggggccccctgctgcggagcggcagtgatgctggggaggcccggccccccaccccagccagcccccgggcccgggcccacagccatgaggaggccagcaggcctgctgccaccagcaccaggctcttcacagaccccctggccctgctgggcctgcctgctgaggagcctgagcccgccttcccccctgtgctggagccccgctggtttgcccactatgatgtgcagagcctgctgtttgactgggcccccaggagccagggcatgggcagccacagcgaggccagcagcggcaccctggccagcgctgaggaccaggccgccagcagtgacctgctgcacggggcccctggctttgtgtgtgagctgggcggggagggggagctgggcctgggcggccctgccagcccccctgtgcccccagccctgcccaatgctgctgtgtccatcctggaggagccccagaacagaacatctgcctacagcctggagcacgccgacctgggcgccggctactacaggaagtacttctacggcaaggagcaccagaacttcttcggcatggatgagagcctgggccctgtggccgtgtccctgcggcgggaggagaaggagggcagcggcggcggcaccctgcacagctacagagtcatcgtgaggaccacccagctgcggaccctgcggggcaccatcagtgaagatgccctgcccccaggccccccccggggcctgagccccaggaagctgctggagcacgtggccccccagctgagccccagctgcctgcggctgggcagcgccagccccaaggtgcccaggaccctgctgaccctggatgagcaggtgctgtccttccagaggaaggtgggcatcctgtactgccgggccggccagggcagcgaggaggagatgtacaacaaccaggaggccggccctgccttcatgcagttcctgaccctgctgggagatgtggtgcggctgaagggctttgagagctaccgggcccagctggacaccaagacagacagcacaggcacccacagcctgtacaccacctaccaggaccacgagatcatgtttcatgtgtccaccatgctgccctacacccccaacaaccagcagcagctgctgaggaagaggcacatcggaaatgacatcgtgaccatcgtgttccaggagcccggcagcaagcccttctgccccaccaccatccgcagccacttccagcacgtgttcctggtggtgcgggcccacaccccctgcaccccccacaccacctacagagtggccgtgtccaggacccaggacaccccagccttcggccctgccctgcctgctgggggcggcccctttgctgccaatgctgacttccgggccttcctgctggccaaggccctgaatggagagcaggccgccggccacgcccggcagttccacgccatggccaccaggacccggcagcagtacctgcaggacctggccaccaatgagcagctggacctgtaccacggccgcggggaggccatcaccctgcgctttgatggcagccctggccaggccgtgggggaggtggtggcccggctgcagctggtgtcccggggctgtgagacccgggagctggccctgcccagagatggccagggccgcctgggctttgaggtggatgctgagggctttgtgacccacgtggagcgcttcacctttgctgagacagctggcctgcggcctggggcccggctgctgcgggtgtgtggccagaccctgcccagcctgcggcctgaggccgccgcccagctgctgcggagcgcccccaaggtgtgtgtgacagtgctgcccccagatgagagcggccggccccggcgctccttcagcgagctgtacaccctgagcctgcaggagcccagccggcggggggccccagaccctgtgcaggatgaggtgcagggcgtgaccctgctgcccaccaccaagcagctgctgcacctgtgcctgcaggacggcggcagccccccaggccctggggacctggccgaggagaggacagagttcctgcacagccagaacagcctgagccccaggagcagcctgagtgatgaggcccctgtgctgcccaacaccaccccagacctgctgctggccaccacagccaagcccagcgtgcccagcgctgacagcgagacccccctgacccaggaccggcccggcagccccagcggctctgaagataaaggaaatcctgcccctgagctgcgggccagcttcctgcccaggaccctgagcctgaggaacagcatcagccgcatcatgtctgaggccggcagcggcaccctggaggatgagtggcaggccatcagcgagatcgccagcacctgcaacaccatcctggagagcctgagccgggagggccagcccatccctgagagcggggaccccaagggcacccccaagagtgatgctgagcctgagcccggcaacctgtctgagaaggtgagccacctggagagcatgctgaggaagctgcaggaggacctgcagaaggagaaggctgaccgggccgccctggaggaggaggtgcgcagcctgcggcacaacaacagaaggctgcaggccgagagcgagagcgctgccacccggctgctgctggccagcaagcagctgggcagccccacagctgacctggcctag

SEQ ID NO: 169793 - DNA, 21 bp, synthetic construct
  misc_feature 1..21: note = Description of Artificial Sequence: Synthetic coding sequence
  source 1..21: mol_type = other DNA
atgcccatgtgggccggctag

SEQ ID NO: 169794 - DNA, 312 bp, synthetic construct
  misc_feature 1..312: note = Description of Artificial Sequence: Synthetic coding sequence
  source 1..312: mol_type = other DNA
atgcccatgtgggccggcggcgtgggcagcccccggcggggcatggccccagccagcacagatgacctgtttgccaggaagctgcggcagcctgcccggccccccctgaccccccacacctttgagcccaggcctgtgcggggccccctgctgcggagcggcagtgatgctggggaggcccggccccccaccccagccagcccccgggcccgggcccacagccatgaggaggccagcaggcctgctgccaccagcaccaggctcttcacagaccccctggccctgctgggcctgcctgctgaggagccctag

SEQ ID NO: 169795 - DNA, 3129 bp, synthetic construct; identical to SEQ ID NO: 169791
  misc_feature 1..3129: note = Description of Artificial Sequence: Synthetic coding sequence
  source 1..3129: mol_type = other DNA

SEQ ID NO: 169796 - DNA, 5169 bp, synthetic construct
  misc_feature 1..5169: note = Description of Artificial Sequence: Synthetic coding sequence
  source 1..5169: mol_type = other DNA
atgtctgacccccggcagagccaggaggagaagcacaagctgggccgggccagcagcaagttcaaggaccccccacgcatcatgcagagtgatgactactttgccaggaagttcaaggccatcaatggaaacatgggccccaccaccagcctgaatgccagcaacagcaatgaaacaggaggcggcggccctgccaacggcaccccagctgtgcccaagatgggcgtgcgggcccgggtgtctgagtggccacccaagaaggactgcagcaaggagctgacctgcaaggccctgtgggagagccgcagccagaccagctatgagagcatcacctctgtgctgcagaatggccagagcgaccagagcgagggccagcaggatgagcagctggacctggactttgtggaggccaagtacaccatcggggacatctttgtgcacagcccccagaggggcctgcaccccatccggcagaggagcaacagtgatgtgaccatcagtgacattgatgctgaagatgtgctggaccagaatgctgtgaaccccaacacaggagctgccctgcaccgggagtatggcagcaccagcagcattgaccggcagggcctgagcggggagaacttctttgccatgctgcggggctacagagtggagaactatgaccacaaggccatggtgcccttcggcttccctgagttcttccgctgtgaccctgccatcagccccagcctgcacgccgccgcccagatcagcagaggagaatttgtgcgcatcagcggcctggactatgtggacagcgccctgctgatgggccgggaccgggacaagcccttcaagaggcggctgaagtctgagagcgtggagaccagcctcttcaggaagctgaggacagtgaagtctgagcacgagaccttcaagttcaccagcgagctggaggagagccggctggagcggggcatccggccctggaactgccagcgctgctttgcccactatgatgtgcagagcatcctcttcaacatcaatgaggccatggccacccgggccaacgtgggcaagaggaagaacatcaccactggagccagcgctgccagccagacccagatgcccaccggccagacaggcaactgtgagagccccctgggcagcaaagaagacctgaacagcaaagaaaacctggatgctgatgaaggagatggcaagagcaatgacctggtgctgagctgcccctacttcagaaatgagaccggcggggagggggaccggcgcatcgccctgagccgggccaacagcagcagcttcagcagcggggagagctgcagctttgagagcagcctgagcagccactgcaccaatgccggcgtgtctgtgctggaggtgccccgggagaaccagcccatccaccgggagaaggtgaagcgctacatcatcgagcacatcgacctgggcgcctactactacaggaagttcttctacggcaaggagcaccagaactacttcggcattgatgagaacctgggccctgtggccgtgtccatccggcgggagaaggtggaggatgccaaggagaaggagggcagccagttcaactacagagtggccttccgcaccagcgagctgaccaccctgcggggggccatcctggaggatgccatccccagcacagcccggcacggcacagcccggggcctgcccctgaaggaggtgctggagtatgtgattcctgagctgagcatccagtgcctgcggcaggccagcaacagccccaaggtgtctgagcagctgctgaagctggatgagcagggcctgtccttccagcacaagattggcatcctgtactgcaaggccggccagagcacagaggaggagatgtacaacaatgaaacagctggccctgcctttgaggagttcctggacctgctgggccagagggtgcggctgaagggcttcagcaagtaccgggcccagctggacaacaagacagacagcacaggcacccacagcctgtacaccacctacaaggactatgagctgatgtttcatgtgtccaccctgctgccctacatgcccaacaaccggcagcagctgctgaggaagaggcacatcggaaatgacatcgtgaccatcgtgttccaggagcccggggccctgcccttcacccccaagagcatccgcagccacttccagcacgtgtttgtgattgtgaaggtgcacaacccctgcacagaaaatgtgtgctacagcgtgggcgtgagccgcagcaaggatgtgccccccttcggcccccccatccccaagggcgtgaccttccccaagtctgctgtgttccgggacttcctgctggccaaggtgatcaatgcagaaaatgctgcccacaagtctgagaagttccgggccatggccaccaggacccggcaggagtacctgaaggacctggccgagaactttgtgaccacagccaccgtggacacctctgtgaagttctccttcatcaccctgggcgccaagaagaaggagaaggtgaagcccaggaaggatgcccacctgttcagcatcggggccatcatgtggcacgtgattgcccgggactttggccagagcgctgacattgaatgtctgctgggcatcagcaatgagttcatcatgctgattgagaaggacagcaagaatgtggtgttcaactgcagctgcagagatgtgattggctggaccagcggcctggtgtccatcaaggtgttctatgaaagaggagaatgtgtgctgctgagctctgtggacaactgtgccgaggacatccgggagatcgtgcagaggctggtgattgtgacccggggctgtgagaccgtggagatgaccctgcggagaaatggcctgggccagctgggcttccacgtgaactttgagggcatcgtggctgatgtggagccctttggatttgcctggaaggccggcctgcggcagggcagccggctggtggagatctgcaaggtggccgtggccaccctgacccatgagcagatgattgacctgctgcggacctctgtgacagtgaaggtggtgatcatccagccccatgatgatggcagcccccggcggggctgcagcgagctgtgccgcatccccatggtggagtacaagctggacagcgagggcaccccctgtgagtacaagacccccttcagaagaaacaccacctggcaccgggtgcccaccccagccctgcagcccctgagccgggccagccccatccctggcaccccagaccggctgccctgccagcagctgctgcagcaggcccaggccgccatccccaggagcaccagctttgacaggaagctgcctgatggcaccaggagcagccccagcaaccagagcagcagcagtgaccccggccctgggggcagcggcccctggaggccccaggtgggctatgatggctgccagagccccctgctgctggagcaccagggcagcggccccctggagtgtgatggagcccgggagcgggaggacaccatggaggccagccgccaccctgagaccaagtggcacggcccccccagcaaggtgctgggcagctacaaggagcgggccctgcagaaggatggcagctgcaaggacagccccaacaagctgagccacatcggggacaagagctgcagcagccacagcagcagcaacaccctgagcagcaacaccagcagcaacagtgatgacaagcacttcggcagcggggacctgatggaccctgagctgctgggcctgacctacatcaagggggccagcacagattctggaattgacacagccccctgcatgcctgccaccatcctgggccctgtgcacctggccggcagccgcagcctcatccacagcagagctgagcagtgggcagatgctgctgatgtgtctggcccagatgatgagcccgccaagctgtacagcgtgcacggctacgccagcaccatctctgctggcagcgctgctgagggctccatgggagacctgtctgagatcagcagccacagcagcggcagccaccacagcggcagccccagcgcccactgcagcaagagcagcggcagcctggacagcagcaaggtgtacatcgtgagccacagcagcggccagcaggtgcccggctccatgagcaagccctaccaccggcagggcgctgtgaacaagtatgtgattggctggaagaagtctgagggcagccccccacctgaggagcctgaggtgacagagtgccccggcatgtacagcgagatggatgtgatgagcacagccacccagcaccagacagtggtgggagatgctgtggccgagacccagcacgtgctgagcaaagaagacttcctgaagctgatgctgcctgacagccccctggtggaggagggccgcaggaagttctccttctacggcaacctgagcccccggcgcagcctgtaccgcaccctgagtgatgagagcatctgcagcaacagaagaggcagcagctttggcagcagccgcagctctgtgctggaccaggccctgcccaatgacatcctcttcagcaccaccccaccctaccacagcaccctgcccccccgggcccacccagcccccagcatgggcagcctgagaaatgagttctggttcagtgatggcagcctgagtgacaagagcaaatgtgccgaccccggcctgatgcccctgcctgacacagccaccggcctggactggacccacctggtggatgctgcccgggcctttgagggcctggacagtgatgaggagctgggcctgctgtgccaccacaccagctacctggaccagagggtggccagcttctgcaccctgacagacatgcagcacggccaggacctggagggcgcccaggagctgcccctgtgtgtggaccccggcagcggcaaggagttcatggacaccaccggggagaggagccccagccccctgaccgggaaggtgaaccagctggagctgatcctgcggcagctgcagacagacctgaggaaggagaagcaggacaaggctgtgctgcaggccgaggtgcagcacctgcggcaggacaacatgaggctgcaggaggagagccagacagccacagcccagctgaggaagttcacagagtggttcttcaccaccatcgacaagaagagctag

SEQ ID NO: 169797 - DNA, 2337 bp, synthetic construct
  misc_feature 1..2337: note = Description of Artificial Sequence: Synthetic coding sequence
  source 1..2337: mol_type = other DNA
atgagcccctgcttctccttcatcggctgcaagctgtgcagcatcgtgacccggggctgtgagaccgtggagatgaccctgcggagaaatggcctgggccagctgggcttccacgtgaactttgagggcatcgtggctgatgtggagccctttggatttgcctggaaggccggcctgcggcagggcagccggctggtggagatctgcaaggtggccgtggccaccctgacccatgagcagatgattgacctgctgcggacctctgtgacagtgaaggtggtgatcatccagccccatgatgatggcagcccccggcggggctgcagcgagctgtgccgcatccccatggtggagtacaagctggacagcgagggcaccccctgtgagtacaagacccccttcagaagaaacaccacctggcaccgggtgcccaccccagccctgcagcccctgagccgggccagccccatccctggcaccccagaccggctgccctgccagcagctgctgcagcaggcccaggccgccatccccaggagcaccagctttgacaggaagctgcctgatggcaccaggagcagccccagcaaccagagcagcagcagtgaccccggccctgggggcagcggcccctggaggccccaggtgggctatgatggctgccagagccccctgctgctggagcaccagggcagcggccccctggagtgtgatggagcccgggagcgggaggacaccatggaggccagccgccaccctgagaccaagtggcacggcccccccagcaaggtgctgggcagctacaaggagcgggccctgcagaaggatggcagctgcaaggacagccccaacaagctgagccacatcggggacaagagctgcagcagccacagcagcagcaacaccctgagcagcaacaccagcagcaacagtgatgacaagcacttcggcagcggggacctgatggaccctgagctgctgggcctgacctacatcaagggggccagcacagattctggaattgacacagccccctgcatgcctgccaccatcctgggccctgtgcacctggccggcagccgcagcctcatccacagcagagctgagcagtgggcagatgctgctgatgtgtctggcccagatgatgagcccgccaagctgtacagcgtgcacggctacgccagcaccatctctgctggcagcgctgctgagggctccatgggagacctgtctgagatcagcagccacagcagcggcagccaccacagcggcagccccagcgcccactgcagcaagagcagcggcagcctggacagcagcaaggtgtacatcgtgagccacagcagcggccagcaggtgcccggctccatgagcaagccctaccaccggcagggcgctgtgaacaagtatgtgattggctggaagaagtctgagggcagccccccacctgaggagcctgaggtgacagagtgccccggcatgtacagcgagatggatgtgatgagcacagccacccagcaccagacagtggtgggagatgctgtggccgagacccagcacgtgctgagcaaagaagacttcctgaagctgatgctgcctgacagccccctggtggaggagggccgcaggaagttctccttctacggcaacctgagcccccggcgcagcctgtaccgcaccctgagtgatgagagcatctgcagcaacagaagaggcagcagctttggcagcagccgcagctctgtgctggaccaggccctgcccaatgacatcctcttcagcaccaccccaccctaccacagcaccctgcccccccgggcccacccagcccccagcatgggcagcctgagaaatgagttctggttcagtgatggcagcctgagtgacaagagcaaatgtgccgaccccggcctgatgcccctgcctgacacagccaccggcctggactggacccacctggtggatgctgcccgggcctttgaggaccagagggtggccagcttctgcaccctgacagacatgcagcacggccaggacctggagggcgcccaggagctgcccctgtgtgtggaccccggcagcggcaaggagttcatggacaccaccggggagaggagccccagccccctgaccgggaaggtgaaccagctggagctgatcctgcggcagctgcagacagacctgaggaaggagaagcaggacaaggctgtgctgcaggccgaggtgcagcacctgcggcaggacaacatgaggctgcaggaggagagccagacagccacagcccagctgaggaagttcacagagtggttcttcaccaccatcgacaagaagagctag

SEQ ID NO: 169798 - DNA, 5169 bp, synthetic construct; identical to SEQ ID NO: 169796
  misc_feature 1..5169: note = Description of Artificial Sequence: Synthetic coding sequence
  source 1..5169: mol_type = other DNA

SEQ ID NO: 169799 - DNA, 918 bp, synthetic construct
  misc_feature 1..918: note = Description of Artificial Sequence: Synthetic coding sequence
  source 1..918: mol_type = other DNA
atggaccccaagggcctgctgagcctgacctttgtgctcttcctgagcctggcctttggagccagctatggaactggaggccgcatgatgaactgccccaagatcctgcggcagctgggcagcaaggtgctgctgcccctgacctatgagcgcatcaacaagtccatgaacaagagcatccacatcgtggtgaccatggccaagagcctggagaacagcgtggagaacaagatcgtgtccctggaccccagcgaggccggccccccacgctacctgggggaccgctacaagttctacctggagaacctgaccctgggcatccgggagagcaggaaagaagatgagggctggtacctgatgaccctggagaagaatgtgtctgtgcagcgcttctgcctgcagctgcggctgtatgagcaggtgtccaccccagagatcaaggtgctgaacaagacccaggagaatggcacctgcaccctcatcctgggctgcaccgtggagaagggggaccacgtggcctacagctggagcgagaaggccggcacccaccccctgaacccagccaacagcagccacctgctgagcctgaccctgggcccccagcacgccgacaacatctacatctgcaccgtgagcaaccccatcagcaacaacagccagaccttcagcccctggccaggctgcaggacagaccccagcggcaagaccaaccactaccagaccaccgtggagaagaagagcctgaccatctatgcccaggtgcagaagccaggccccctgcagaagaagctggacagcttccctgcccaggacccctgcaccaccatctacgtggccgccacagagcctgtgcctgagagcgtgcaggagaccaacagcatcaccgtgtatgcctctgtgaccctgcctgagagctag

SEQ ID NO: 169800 - DNA, 1008 bp, synthetic construct
  misc_feature 1..1008: note = Description of Artificial Sequence: Synthetic coding sequence
  source 1..1008: mol_type = other DNA
atggaccccaagggcctgctgagcctgacctttgtgctcttcctgagcctggcctttggagccagctatggaactggaggccgcatgatgaactgccccaagatcctgcggcagctgggcagcaaggtgctgctgcccctgacctatgagcgcatcaacaagtccatgaacaagagcatccacatcgtggtgaccatggccaagagcctggagaacagcgtggagaacaagatcgtgtccctggaccccagcgaggccggccccccacgctacctgggggaccgctacaagttctacctggagaacctgaccctgggcatccgggagagcaggaaagaagatgagggctggtacctgatgaccctggagaagaatgtgtctgtgcagcgcttctgcctgcagctgcggctgtatgagcaggtgtccaccccagagatcaaggtgctgaacaagacccaggagaatggcacctgcaccctcatcctgggctgcaccgtggagaagggggaccacgtggcctacagctggagcgagaaggccggcacccaccccctgaacccagccaacagcagccacctgctgagcctgaccctgggcccccagcacgccgacaacatctacatctgcaccgtgagcaaccccatcagcaacaacagccagaccttcagcccctggccaggctgcaggacagaccccagcgagaccaagccctgggccgtgtatgccggcctgctgggcggcgtcatcatgatcctgatcatggtggtgatcctgcagctgcggcggcggggcaagaccaaccactaccagaccaccgtggagaagaagagcctgaccatctatgcccaggtgcagaagccaggccccctgcagaagaagctggacagcttccctgcccaggacccctgcaccaccatctacgtggccgccacagagcctgtgcctgagagcgtgcaggagaccaacagcatcaccgtgtatgcctctgtgaccctgcctgagagctag

SEQ ID NO: 169801 - DNA, 897 bp, synthetic construct
  misc_feature 1..897: note = Description of Artificial Sequence: Synthetic coding sequence
  source 1..897: mol_type = other DNA
atggaccccaagggcctgctgagcctgacctttgtgctcttcctgagcctggcctttggagccagctatggaactggaggccgcatgatgaactgccccaagatcctgcggcagctgggcagcaaggtgctgctgcccctgacctatgagcgcatcaacaagtccatgaacaagagcatccacatcgtggtgaccatggccaagagcctggagaacagcgtggagaacaagatcgtgtccctggaccccagcgaggccggccccccacgctacctgggggaccgctacaagttctacctggagaacctgaccctgggcatccgggagagcaggaaagaagatgagggctggtacctgatgaccctggagaagaatgtgtctgtgcagcgcttctgcctgcagctgcggctgtatgagcaggtgtccaccccagagatcaaggtgctgaacaagacccaggagaatggcacctgcaccctcatcctgggctgcaccgtggagaagggggaccacgtggcctacagctggagcgagaaggccggcacccaccccctgaacccagccaacagcagccacctgctgagcctgaccctgggcccccagcacgccgacaacatctacatctgcaccgtgagcaaccccatcagcaacaacagccagaccttcagcccctggccaggctgcaggacagaccccagcgagaccaagccctgggccgtgtatgccggcctgctgggcggcgtcatcatgatcctgatcatggtggtgatcctgcagctgcggcggcggggcaagaccaaccactaccagaccaccgtggagaagaagagcctgaccatctatgcccaggtgcagaagccaggggacagccaccaccagaccagtgacctcttctag

SEQ ID NO: 169802 - DNA, 435 bp, synthetic construct
  misc_feature 1..435: note = Description of Artificial Sequence: Synthetic coding sequence
  source 1..435: mol_type = other DNA
atggaccccaagggcctgctgagcctgacctttgtgctcttcctgagcctggcctttggagccagctatggaactggaggccgcatgatgaactgccccaagatcctgcggcagctgggcagcaaggtgctgctgcccctgacctatgagcgcatcaacaagtccatgaacaagagcatccacatcgtggtgaccatggccaagagcctggagaacagcgtggagaacaagatcgtgtccctggaccccagcgaggccggccccccacgctacctgggggaccgctacaagttctacctggagaacctgaccctgggcatccgggagagcaggaaagaagatgagggctggtacctgatgaccctggagaagagcctgcacttcggctacctgtactttgtgctgggcgctgaccatgacaacctgcagacctag

SEQ ID NO: 169803 - DNA, 810 bp, synthetic construct
  misc_feature 1..810: note = Description of Artificial Sequence: Synthetic coding sequence
  source 1..810: mol_type = other DNA
atggaccccaagggcctgctgagcctgacctttgtgctcttcctgagcctggcctttggagccagctatggaactggaggccgcatgatgaactgccccaagatcctgcggcagctgggcagcaaggtgctgctgcccctgacctatgagcgcatcaacaagtccatgaacaagagcatccacatcgtggtgaccatggccaagagcctggagaacagcgtggagaacaagatcgtgtccctggaccccagcgaggccggccccccacgctacctgggggaccgctacaagttctacctggagaacctgaccctgggcatccgggagagcaggaaagaagatgagggctggtacctgatgaccctggagaagaatgtgtctgtgcagcgcttctgcctgcagctgcggctgtatgagcaggtgtccaccccagagatcaaggtgctgaacaagacccaggagaatggcacctgcaccctcatcctgggctgcaccgtggagaagggggaccacgtggcctacagctggagcgagaaggccggcacccaccccctgaacccagccaacagcagccacctgctgagcctgaccctgggcccccagcacgccgacaacatctacatctgcaccgtgagcaaccccatcagcaacaacagccagaccttcagcccctggccaggctgcaggacagaccccagcgagaccaagccctgggccgtgtatgccggcctgctgggcggcgtcatcatgatcctgatcatggtggtgatcctgcagctgcggcggcgggccagcagcgaggagacctag

SEQ ID NO: 169804 - DNA, 1029 bp, synthetic construct
  misc_feature 1..1029: note = Description of Artificial Sequence: Synthetic coding sequence
  source 1..1029: mol_type = other DNA
atgtgcagcaccatgtctgcccccacctgcctggcccacctgcccccctgcttcctgctgctggccctggtgctggtgcccagtgatgccagcggccagagcagcagaaatgactggcaggtgctgcagcctgagggccccatgctggtggccgagggggagaccctgctgctgcgctgcatggtggtgggcagctgcacagatggcatgatcaagtgggtgaaggtgtccacccaggaccagcaggagatctacaacttcaagaggggcagcttccctggggtgatgcccatgatccagaggaccagcgagcccctgaactgtgactacagcatctacatccacaacgtgacccgggagcacacaggcacctaccactgtgtgcgctttgatggcctgtctgagcacagcgagatgaagagtgatgagggcacctctgtgctggtgaagggggccggggaccctgagccagacctgtggatcatccagccccaggagctggtgctgggcaccaccggggacacagtgttcctgaactgcaccgtgctgggagatggccccccaggccccatccgctggttccagggcgccggcctgagccgggaggccatctacaactttggaggcatcagccaccccaaggagacagctgtgcaggccagcaacaatgacttcagcatcctgctgcagaatgtgtccagtgaagatgctggcacctactactgtgtgaagttccagaggaagcccaaccggcagtacctgagcggccagggcaccagcctgaaggtgaaggccaagagcaccagcagcaaggaggccgagttcaccagcgagcccgccacagagatgagccccaccggcctgctggtggtgtttgcccctgtggtgctgggcctgaaggccatcaccctggccgccctgctgctggccctggccaccagcagaagaagccctggccaggaggatgtgaagaccaccggccctgctggggccatgaacaccctggcctggagcaagggccaggagtag

SEQ ID NO: 169805 - DNA, 624 bp, synthetic construct
  misc_feature 1..624: note = Description of Artificial Sequence: Synthetic coding sequence
  source 1..624: mol_type = other DNA
atgtgcagcaccatgtctgcccccacctgcctggcccacctgcccccctgcttcctgctgctggccctggtgctggtgcccagtgatgccagcggccagagcagcagaaatgactggcaggtgctgcagcctgagggccccatgctggtggccgagggcgctggggaccctgagccagacctgtggatcatccagccccaggagctggtgctgggcaccaccggggacacagtgttcctgaactgcaccgtgctgggagatggccccccaggccccatccgctggttccagggcgccggcctgagccgggaggccatctacaactttggaggcatcagccaccccaaggagacagctgtgcaggccagcaacaatgacttcagcatcctgctgcagaatgtgtccagtgaagatgctggcacctactactgtgtgaagttccagaggaagcccaaccggcagtacctgagcggccagggcaccagcctgaaggtgaaggagcagaacctgcccctgcccaagaggcagaacagccctgtgaacctgcagctgcgctgcctgcagcaggtgtctgtgcccacctctgtggagagcatgagccccccccaggcccggggcccctag

SEQ ID NO: 169806 - DNA, 624 bp, synthetic construct; identical to SEQ ID NO: 169805
  misc_feature 1..624: note = Description of Artificial Sequence: Synthetic coding sequence
  source 1..624: mol_type = other DNA

SEQ ID NO: 169807 - DNA, 735 bp, synthetic construct
  misc_feature 1..735: note = Description of Artificial Sequence: Synthetic coding sequence
  source 1..735: mol_type = other DNA
atgtgcagcaccatgtctgcccccacctgcctggcccacctgcccccctgcttcctgctgctggccctggtgctggtgcccagtgatgccagcggccagagcagcagaaatgactggcaggtgctgcagcctgagggccccatgctggtggccgagggcgctggggaccctgagccagacctgtggatcatccagccccaggagctggtgctgggcaccaccggggacacagtgttcctgaactgcaccgtgctgggagatggccccccaggccccatccgctggttccagggcgccggcctgagccgggaggccatctacaactttggaggcatcagccaccccaaggagacagctgtgcaggccagcaacaatgacttcagcatcctgctgcagaatgtgtccagtgaagatgctggcacctactactgtgtgaagttccagaggaagcccaaccggcagtacctgagcggccagggcaccagcctgaaggtgaaggccaagagcaccagcagcaaggaggccgagttcaccagcgagcccgccacagagatgagccccaccggcctgctggtggtgtttgcccctgtggtgctgggcctgaaggccatcaccctggccgccctgctgctggccctggccaccagcagaagaagccctggccaggaggatgtgaagaccaccggccctgctggggccatgaacaccctggcctggagcaagggccaggagtag

SEQ ID NO: 169808 - DNA, 633 bp, synthetic construct
  misc_feature 1..633: note = Description of Artificial Sequence: Synthetic coding sequence
  source 1..633: mol_type = other DNA
atgaagagtgatgagggcacctctgtgctggtgaagggggccggggaccctgagccagacctgtggatcatccagccccaggagctggtgctgggcaccaccggggacacagtgttcctgaactgcaccgtgctgggagatggccccccaggccccatccgctggttccagggcgccggcctgagccgggaggccatctacaactttggaggcatcagccaccccaaggagacagctgtgcaggccagcaacaatgacttcagcatcctgctgcagaatgtgtccagtgaagatgctggcacctactactgtgtgaagttccagaggaagcccaaccggcagtacctgagcggccagggcaccagcctgaaggtgaaggccaagagcaccagcagcaaggaggccgagttcaccagcgagcccgccacagagatgagccccaccggggagaggacccacctgtctggagtgaatgaaagccccaccgggaagggggccatgaatggcctggtgatgggccgggagcagagccagacccctggggccaacctgccccccaggatgctgcccggcctgcacctgaactgcaggaccaggaccccagagaaccacgtgatcacagcccagctgtag

SEQ ID NO: 169809 - DNA, 2046 bp, synthetic construct
  misc_feature 1..2046: note = Description of Artificial Sequence: Synthetic coding sequence
  source 1..2046: mol_type = other DNA
atgaatgccagcagcgagggggagagctttgctggctctgtgcagatccctgggggcaccaccgtgctggtggagctgaccccagacatccacatctgtggcatctgcaagcagcagttcaacaacctggatgcctttgtggcccacaagcagagcggctgccagctgaccggcaccagcgctgctgcccccagcacagtgcagtttgtgtctgaggagaccgtgcctgccacccagacccagaccaccaccaggaccatcaccagcgagacccagaccatcaccgtgtctgcccctgagtttgtgtttgaacatggctaccagacctacctgcccacagagagcaatgaaaaccagacagccaccgtcatcagcctgcctgccaagagcaggaccaagaagcccaccaccccaccagcccagaagaggctgaactgctgctacccaggctgccagttcaagacagcctacggcatgaaggacatggagcggcacctgaagatccacactggagacaagccccacaagtgtgaggtgtgtgggaagtgcttcagcaggaaggacaagctgaagacccacatgcgctgccacactggagtgaagccctacaagtgcaagacctgtgactatgctgctgctgacagcagcagcctgaacaagcacctgcgcatccacagtgatgagcggcccttcaagtgccagatctgcccctatgccagcaggaacagcagccagctgactgtgcacctgcggagccacactggagatgcccccttccagtgctggctgtgcagcgccaagttcaagatcagcagtgacctgaagaggcacatgagggtgcacagcggggagaagcccttcaagtgtgagttctgcaatgtgcgctgcaccatgaagggcaacctgaagagccacatccgcatcaagcacagcggcaacaacttcaagtgcccccactgtgacttcctgggggacagcaaggccaccctgaggaagcacagccgggtgcaccagagcgagcaccctgagaagtgcagtgaatgttcctacagctgcagcagcaaggccgccctgcgcatccacgagcgcatccactgcacagaccggcccttcaagtgcaactactgcagctttgacaccaagcagcccagcaacctgagcaagcacatgaagaagttccacggggacatggtgaagacagaggccctggagaggaaggacaccggccggcagagcagccggcaggtggccaagctggatgccaagaagagcttccactgtgacatctgtgatgccagcttcatgagggaggacagcctgcggagccacaagaggcagcacagcgagtacagcgagagcaagaacagtgatgtgacagtgctgcagttccagattgaccccagcaagcagcctgccacccccctgactgtgggccacctgcaggtgcccctgcagcccagccaggtgccccagttcagcgagggccgggtgaagatcatcgtgggccaccaggtgccccaggccaacaccatcgtgcaggccgctgctgctgctgtgaacatcgtgcccccagccctggtggcccagaaccctgaggagctgcccggcaacagccggctgcagatcctgcggcaggtgtccctgattgccccaccccagagcagccgctgccccagcgaggccggggccatgacccagcctgctgtgctgctgaccacccatgagcagacagatggagccaccctgcaccagaccctcatccccacagccagcggcggcccccaggagggcagcggcaaccagaccttcatcaccagcagcggcatcacctgcacagactttgagggcctgaatgccctgatccaggagggcacagctgaggtgacagtggtgtctgatggcggccagaacattgctgtggccaccacagcccctcctgtgttcagcagcagcagccagcaggagctgcccaagcagacctacagcatcatccagggcgccgcccacccagccctgctgtgcccagctgacagcatcccagactag

SEQ ID NO: 169810 - DNA, 1164 bp, synthetic construct
  misc_feature 1..1164: note = Description of Artificial Sequence: Synthetic coding sequence
  source 1..1164: mol_type = other DNA
atgcctgtgcctgcctcctggccccaccccccaggccccttcctgctgctgaccctgctgctgggcctgacagaggtggccggggaggaggagctgcagatgatccagcctgagaagctgctgctggtgacagtgggcaagacagccaccctgcactgcaccgtgaccagcctgctgcctgtgggccctgtgctgtggttccggggcgtgggccctggccgggagctgatctacaaccagaaggagggccacttcccccgggtgaccaccgtgtctgacctgaccaagaggaacaacatggacttcagcatccgcatcagcagcatcaccccagcagatgtgggcacctactactgtgtgaagttcaggaagggcagcccagaaaatgtggagttcaagagcggccctggaacagagatggccctgggcgccaagcccagcgcccctgtggtgctgggccctgctgcccggaccaccccagagcacacagtgtccttcacctgtgagagccacggcttcagcccccgggacatcaccctgaagtggttcaagaatggaaatgagctgagtgacttccagaccaacgtggaccccaccggccagagcgtggcctacagcatccgcagcacagcccgggtggtgctggacccctgggatgtgcgcagccaggtgatctgtgaggtggcccacgtgaccctgcagggcgaccccctgcggggcacagccaacctgtctgaggccatccgggtgccccccaccctggaggtgacccagcagcccatgagggtgggcaaccaggtgaatgtgacctgccaggtgaggaagttctacccccagagcctgcagctgacctggagcgaaaatggaaatgtgtgccagcgggagacagccagcaccctgacagagaacaaggatggcacctacaactggacctcctggttcctggtgaacatcagtgaccagagagatgatgtggtgctgacctgccaggtgaagcatgatggccagctggccgtgtccaagaggctggccctggaggtgacagtgcaccagaaggaccagagcagtgatgccaccccaggccctgccagcagcctgacagccctgctgctgattgctgtgctgctgggccccatctacgtgccctggaagcagaagacctag

SEQ ID NO: 169811 - DNA, 513 bp, synthetic construct
  misc_feature 1..513: note = Description of Artificial Sequence: Synthetic coding sequence
  source 1..513: mol_type = other DNA
atgcctgtgcctgcctcctggccccaccccccaggccccttcctgctgctgaccctgctgctgggcctgacagaggtggccggggaggaggagctgcagatgatccagcctgagaagctgctgctggtgacagtgggcaagacagccaccctgcactgcaccgtgaccagcctgctgcctgtgggccctgtgctgtggttccggggcgtgggccctggccgggagctgatctacaaccagaaggagggccacttcccccgggtgaccaccgtgtctgacctgaccaagaggaacaacatggacttcagcatccgcatcagcagcatcaccccagcagatgtgggcacctactactgtgtgaagttcaggaagggcagcccagaaaatgtggagttcaagagcggccctggaacagagatggccctgggcggccctgccagcagcctgacagccctgctgctgattgctgtgctgctgggccccatctacgtgccctggaagcagaagacctag

SEQ ID NO: 169812 - DNA, 1065 bp, synthetic construct
  misc_feature 1..1065: note = Description of Artificial Sequence: Synthetic coding sequence
  source 1..1065: mol_type = other DNA
atgatccagcctgagaagctgctgctggtgacagtgggcaagacagccaccctgcactgcaccgtgaccagcctgctgcctgtgggccctgtgctgtggttccggggcgtgggccctggccgggagctgatctacaaccagaaggagggccacttcccccgggtgaccaccgtgtctgacctgaccaagaggaacaacatggacttcagcatccgcatcagcagcatcaccccagcagatgtgggcacctactactgtgtgaagttcaggaagggcagcccagaaaatgtggagttcaagagcggccctggaacagagatggccctgggcgccaagcccagcgcccctgtggtgctgggccctgctgcccggaccaccccagagcacacagtgtccttcacctgtgagagccacggcttcagcccccgggacatcaccctgaagtggttcaagaatggaaatgagctgagtgacttccagaccaacgtggaccccaccggccagagcgtggcctacagcatccgcagcacagcccgggtggtgctggacccctgggatgtgcgcagccaggtgatctgtgaggtggcccacgtgaccctgcagggcgaccccctgcggggcacagccaacctgtctgaggccatccgggtgccccccaccctggaggtgacccagcagcccatgagggtgggcaaccaggtgaatgtgacctgccaggtgaggaagttctacccccagagcctgcagctgacctggagcgaaaatggaaatgtgtgccagcgggagacagccagcaccctgacagagaacaaggatggcacctacaactggacctcctggttcctggtgaacatcagtgaccagagagatgatgtggtgctgacctgccaggtgaagcatgatggccagctggccgtgtccaagaggctggccctggaggtgacagtgcaccagaaggaccagagcagtgatgccaccccaggccctgccagcagcctgacagccctgctgctgattgctgtgctgctgggccccatctacgtgccctggaagcagaagacctag

SEQ ID NO: 169813 - DNA, 831 bp, synthetic construct; identical to SEQ ID NO: 154127
  misc_feature 1..831: note = Description of Artificial Sequence: Synthetic coding sequence
  source 1..831: mol_type = other DNA

SEQ ID NO: 169814 - DNA, 1386 bp, synthetic construct
  misc_feature 1..1386: note = Description of Artificial Sequence: Synthetic coding sequence
  source 1..1386: mol_type = other DNA
atggccccccagagcctgcccagcagcaggatggcccccctgggcatgctgctgggcctgctgatggccgcctgcttcaccttctgcctgagccaccagaacctgaaggagtttgccctgaccaaccctgagaagagcagcaccaaggagacagagaggaaggagaccaaggccgaggaggagctggatgctgaggtgctggaggtgttccaccccacccatgagtggcaggccctgcagcccggccaggccgtgcctgctggcagccacgtgcggctgaacctgcagacaggagagcgggaggccaagctgcagtatgaggacaagttcaggaacaacctgaagggcaagaggctggacatcaacaccaacacctacaccagccaggacctgaagagcgccctggccaagttcaaggagggcgctgagatggagagcagcaaagaagacaaggcccggcaggccgaggtgaagaggctcttccggcccatcgaggagctgaagaaggactttgatgagctgaatgtggtgattgaaacagacatgcagatcatggtgcggctcatcaacaagttcaacagcagcagcagcagcctggaggagaagattgctgccctgtttgacctggagtactacgtgcaccagatggacaatgcccaggacctgctgagctttggaggcctgcaggtggtgatcaatggcctgaacagcacagagcccctggtgaaggagtatgctgcctttgtgctgggcgccgccttcagcagcaaccccaaggtgcaggtggaggccattgaaggaggagccctgcagaagctgctggtgatcctggccacagagcagcccctgacagccaagaagaaggtgctgtttgccctgtgcagcctgctgcggcacttcccctatgcccagaggcagttcctgaagctgggcggcctgcaggtgctgcggaccctggtgcaggagaagggcacagaggtgctggccgtgcgggtggtgaccctgctgtatgacctggtgacagagaagatgtttgctgaggaggaggccgagctgacccaggagatgagccctgagaagctgcagcagtaccggcaggtgcacctgctgcccggcctgtgggagcagggctggtgtgagatcacagcccacctgctggccctgcctgagcatgatgcccgggagaaggtgctgcagaccctgggcgtgctgctgaccacctgccgggaccgctaccggcaggacccccagctgggccgcaccctggccagcctgcaggccgagtaccaggtgctggccagcctggagctgcaggatggagaagatgagggctacttccaggagctgctgggctctgtgaacagcctgctgaaggagctgaggtag

SEQ ID NO: 169815 - DNA, 1386 bp, synthetic construct; identical to SEQ ID NO: 169814
  misc_feature 1..1386: note = Description of Artificial Sequence: Synthetic coding sequence
  source 1..1386: mol_type = other DNA

SEQ ID NO: 169816 - DNA, 288 bp, synthetic construct
  misc_feature 1..288: note = Description of Artificial Sequence: Synthetic coding sequence
  source 1..288: mol_type = other DNA
atggccccccagagcctgcccagcagcaggatggcccccctgggcatgctgctgggcctgctgatggccgcctgcttcaccttctgcctgagccaccagaacctgaaggagtttgccctgaccaaccctgagaagagcagcaccaaggagacagagaggaaggagaccaaggccgaggaggagctggatgctgaggtgctggaggtgttccaccccacccatgagtggcaggccctgcagcccggccaggccgtgcctgctggcagccacgtgcggctgaacctgtag

SEQ ID NO: 169817 - DNA, 492 bp, synthetic construct
  misc_feature 1..492: note = Description of Artificial Sequence: Synthetic coding sequence
  source 1..492: mol_type = other DNA
atggccccccagagcctgcccagcagcaggatggcccccctgggcatgctgctgggcctgctgatggccgcctgcttcaccttctgcctgagccaccagaacctgaaggagtttgccctgaccaaccctgagaagagcagcaccaaggagacagagaggaaggagaccaaggccgaggaggagctggatgctgaggtgctggaggtgttccaccccacccatgagtggcaggccctgcagcccggccaggccgtgcctgctggcagccacgtgcggctgaacctgcagacaggagagcgggaggccaagctgcagtatgaggacaagttcaggaacaacctgaagggcaagaggctggacatcaacaccaacacctacaccagccaggacctgaagagcgccctggccaagttcaaggagggcgctgagatggagagcagcaaagaagacaaggcccggcaggccgaggtgaagaggctcttccggccctag

SEQ ID NO: 169818 - DNA, 372 bp, synthetic construct
  misc_feature 1..372: note = Description of Artificial Sequence: Synthetic coding sequence
  source 1..372: mol_type = other DNA
atggccccccagagcctgcccagcagcaggatggcccccctgggcatgctgctgggcctgctgatggccgcctgcttcaccttctgcctgagccaccagaacctgaaggagtttgccctgaccaaccctgagaagagcagcaccaaggagacagagaggaaggagaccaaggccgaggaggagctggatgctgaggtgctggaggtgttccaccccacccatgagtggcaggccctgcagcccggccaggccgtgcctgctggcagccacgtgcggctgaacctgcagacaggagagcgggaggccaagctgcagtatgaggacaagttcaggaacaacctgaagggcaagaggctggacatcaacacctag

SEQ ID NO: 169819 - DNA, 579 bp, synthetic construct
  misc_feature 1..579: note = Description of Artificial Sequence: Synthetic coding sequence
  source 1..579: mol_type = other DNA
atggccgcctgcttcaccttctgcctgagccaccagaacctgaaggagtttgccctgaccaaccctgagaagagcagcaccaaggagacagagaggaaggagaccaaggccgaggaggagctggatgctgaggtgctggaggtgttccaccccacccatgagtggcaggccctgcagcccggccaggccgtgcctgctggcagccacgtgcggctgaacctgcagacaggagagcgggaggccaagctgcagtatgaggacaagttcaggaacaacctgaagggcaagaggctggacatcaacaccaacacctacaccagccaggacctgaagagcgccctggccaagttcaaggagggcgctgagatggagagcagcaaggaggacaagatggacaatgcccaggacctgctgagctttggaggcctgcaggtggtgatcaatggcctgaacagcacagagcccctggtgaaggagtatgctgcctttgtgctgggcgccgccttcagcagcaaccccaaggtgcaggtggaggccatcgagggcggggccctgcagaagctgctggtgatcctgtag

SEQ ID NO: 169820 - DNA, 3822 bp, synthetic construct
  misc_feature 1..3822: note = Description of Artificial Sequence: Synthetic coding sequence
  source 1..3822: mol_type = other DNA
atgaagaggcggctggatgaccaggagagccctgtgtatgctgcccagcagaggcgcatccctggcagcacagaggccttcccccaccagcaccgggtgctggccccagcccctcctgtgtatgaagctgtgtctgagaccatgcagagcgccaccggcatccagtacagcgtgacccccagctaccaggtgtctgccatgccccagagcagcggcagccacggccctgccatcgctgctgtgcacagcagccaccaccaccccacagctgtgcagccccacggcggccaggtggtgcagagccacgcccacccagcccctcctgtggcccctgtgcagggccagcagcagttccagaggctgaaggtggaggatgccctgagctacctggaccaggtgaagctgcagtttggcagccagccccaggtgtacaatgacttcctggacatcatgaaggagttcaagagccagagcattgacaccccaggagtcatcagccgggtgtcccagctgttcaagggccacccagacctgatcatgggcttcaacaccttcctgcccccaggctacaagattgaggtgcagaccaatgacatggtgaatgtgaccaccccaggccaggtgcaccagatccccacccacggcatccagccccagccccagcccccaccccagcaccccagccagcccagcgcccagagcgccccagccccagcccagcctgccccccagcccccaccagccaaggtgtccaagcccagccagctgcaggcccacaccccagccagccagcagaccccacccctgcccccctatgccagccccaggagcccccctgtgcagccccacacccctgtgaccatcagcctgggcacagcccccagcctgcagaacaaccagcctgtggagttcaaccacgccatcaactacgtgaacaagatcaagaaccgcttccagggccagcctgacatctacaaggccttcctggagatcctgcacacctaccagaaggagcagagaaatgccaaggaggccggcggcaactacaccccagccctgacagagcaggaggtgtatgcccaggtggcccggctcttcaagaaccaggaggacctgctgtctgaatttggccagttcctgcctgatgccaacagctctgtgctgctgagcaagaccacagctgagaaggtggacagcgtgagaaatgaccacggcggcaccgtgaagaagccccagctgaacaacaagccccagaggcccagccagaatggctgccagatccgccgccaccccaccggcaccaccccacctgtgaagaagaagcccaagctgctgaacctgaaggacagctccatggctgatgccagcaagcacggcggcggcacagagagcctcttctttgacaaggtgaggaaggccctgcggtctgctgaggcctatgagaacttcctgcgctgcctggtgatcttcaaccaggaggtgatcagcagagctgagctggtgcagctggtgagccccttcctgggcaagtttcctgagctgttcaactggttcaagaacttcctgggctacaaggagagcgtgcacctggagacctaccccaaggagcgggccacagagggcatcgccatggagattgattatgccagctgcaagaggctgggcagcagctaccgggccctgcccaagagctaccagcagcccaagtgcaccggccgcacccccctgtgcaaggaggtgctgaatgacacctgggtgtccttccccagctggagcgaggacagcacctttgtgagcagcaagaagacccagtatgaggagcacatctaccgctgtgaagatgaaagatttgagctggatgtggtgctggagaccaacctggccaccatccgggtgctggaggccatccagaagaagctgagccggctgtctgctgaggagcaggccaagttccggctggacaacaccctgggcggcaccagcgaggtgatccacaggaaggccctgcagaggatctatgctgacaaggctgctgacatcattgatggcctgaggaagaaccccagcattgctgtgcccatcgtgctgaagaggctgaagatgaaggaggaggagtggagggaggcccagaggggcttcaacaaggtgtggagggagcagaatgagaagtactacctgaagagcctggaccaccagggcatcaacttcaagcagaatgacaccaaggtgctgcggagcaagagcctgctgaatgaaattgagagcatctatgatgagcggcaggagcaggccacagaagaaaatgccggcgtgcctgtgggcccccacctgagcctggcctatgaggacaagcagatcctggaggatgctgctgccctgatcatccaccacgtgaagaggcagacaggcatccagaaggaggacaagtacaagatcaagcagatcatgcaccacttcatcccagacctgctgtttgcccagagaggagacctgagtgatgtggaggaggaggaggaggaggagatggatgtggatgaggccaccggggctgtgaagaagcacaatggagtgggcggcagcccccccaagagcaagctgctcttcagcaacacagctgcccagaagctgcggggcatggatgaggtgtacaacctcttctacgtgaacaacaactggtacatcttcatgaggctgcaccagatcctgtgcctgcggctgctgcgcatctgcagccaggccgagcggcagatcgaggaggagaaccgggagcgggagtgggagcgggaggtgctgggcatcaagagggacaagagtgacagccctgccatccagctgcggctgaaggagcccatggatgtggatgtggaggactactacccagccttcctggacatggtgcgcagcctgctggatggcaacatcgacagcagccagtatgaggacagcctgcgggagatgttcaccatccacgcctacatcgccttcaccatggacaagctgatccagagcatcgtgcggcagctgcagcacatcgtgtctgatgagatctgtgtgcaggtgacagacctgtacctggccgagaacaacaacggggccactggaggccagctgaacacccagaacagccgcagcctgctggagagcacctaccagaggaaggccgagcagctgatgtctgatgagaactgcttcaagctgatgttcatccagagccagggccaggtgcagctgaccatcgagctgctggacacagaggaggagaacagtgatgatcctgtggaggccgagcgctggagcgactatgtggagcgctacatgaacagcgacaccaccagccctgagctgcgggagcacctggcccagaagcctgtgttcctgcccaggaacctgcggcgcatcaggaagtgccagaggggccgggagcagcaggagaaggagggcaaggagggcaacagcaagaagaccatggagaatgtggacagcctggacaagctggagtgccgcttcaagctgaacagctacaagatggtgtatgtgatcaagtctgaggactacatgtacagaagaacagccctgctgcgggcccaccagagccatgagcgggtgtccaagaggctgcaccagcgcttccaggcctgggtggacaagtggaccaaggagcacgtgccccgggagatggctgctgagaccagcaagtggctgatgggagagggcctggagggcctggtgccctgcaccaccacctgtgacacagagaccctgcactttgtgtccatcaacaagtacagagtgaagtatggcaccgtcttcaaggccccctag

SEQ ID NO: 169821 - DNA, 3822 bp, synthetic construct; identical to SEQ ID NO: 169820
  misc_feature 1..3822: note = Description of Artificial Sequence: Synthetic coding sequence
  source 1..3822: mol_type = other DNA

SEQ ID NO: 169822 - DNA, 3822 bp, synthetic construct; identical to SEQ ID NO: 169820
  misc_feature 1..3822: note = Description of Artificial Sequence: Synthetic coding sequence
  source 1..3822: mol_type = other DNA

SEQ ID NO: 169823 - DNA, 3393 bp, synthetic construct
  misc_feature 1..3393: note = Description of Artificial Sequence: Synthetic coding sequence
  source 1..3393: mol_type = other DNA
atggcccacgccggcggcggcagcggcggcagcggggccggcggccctgctggccggggcctgagcggggcccgctggggccgcagcggcagcgctggccacgagaagctgcctgtgcacgtggaggatgccctgacctacctggaccaggtgaagatccgctttggaagtgaccctgccacctacaacggcttcctggagatcatgaaggagttcaagagccagagcattgacaccccaggagtcatccggcgggtgtcccagctgttccacgagcacccagacctgattgtgggcttcaatgccttcctgcccctgggctacagaattgacatccccaagaatggcaagctgaacatccagagccccctgaccagccaggagaacagccacaaccacggagatggagctgaggacttcaagcagcaggtgccctacaaggaggacaagccccaggtgcccctggagagtgacagcgtggagttcaacaatgccatctcctatgtgaacaagatcaagacccgcttcctggaccaccctgagatctaccgctccttcctggagatcctgcacacctaccagaaggagcagctgaacacccggggccggcccttccggggcatgtctgaggaggaggtgttcacagaggtggccaacctcttccggggccaggaggacctgctgtctgaatttggccagttcctgcctgaggccaagaggagcctcttcaccggaaatggcccctgtgagatgcacagcgtgcagaagaatgaacatgacaagaccccagagcacagcaggaagaggagccggcccagcctgctgcggcctgtgtctgccccagccaagaagaagatgaagctgcggggcaccaaggacctgagcattgctgctgtgggcaagtatggcaccctgcaggagttctccttctttgacaaggtgagaagagtgctgaagagccaggaggtgtatgagaacttcctgcgctgcatcgccctcttcaaccaggagctggtgtctggcagcgagctgctgcagctggtgagccccttcctgggcaagtttcctgagctgtttgcccagttcaagagcttcctgggcgtgaaggagctgagctttgccccacccatgtctgacagaagtggagatggcatcagccgggagattgattatgccagctgcaagagaattggcagcagctaccgggccctgcccaagacctaccagcagcccaagtgcagcggccgcacagccatctgcaaggaggtgctgaatgacacctgggtgtccttccccagctggagcgaggacagcacctttgtgagcagcaagaagaccccctatgaggagcagctgcaccgctgtgaagatgaaagatttgagctggatgtggtgctggagaccaacctggccaccatccgggtgctggagagcgtgcagaagaagctgagcaggatggcccctgaggaccaggagaagttccggctggatgacagcctgggcggcaccagcgaggtgatccagaggcgggccatctaccgcatctacggggacaaggcccctgagatcatcgagagcctgaagaagaaccctgtgacagctgtgcctgtggtgctgaagaggctgaaggccaaggaggaggagtggagggaggcccagcagggcttcaacaagatctggagggagcagtatgagaaggcctacctgaagagcctggaccaccaggccgtgaacttcaagcagaatgacaccaaggccctgcggagcaagagcctgctgaatgaaattgagagcgtgtatgatgagcaccaggagcagcacagcgagggccgcagcgcccccagcagcgagccccacctgatctttgtgtatgaagatcggcagatcctggaggatgctgctgccctgatctcctactacgtgaagaggcagcctgccatccagaaggaggaccagggcaccatccaccagctgctgcaccagtttgtgcccagcctcttcttcagccagcagctggacctgggcgccagcgaggagagcgcagatgaagatcgggacagcccccagggccagaccacagaccccagcgagaggaagaagccagcccctggcccccacagcagccccccagaggagaagggggcctttggagatgccccagccacagagcagccccccctgcccccaccagccccccacaagcccctggatgatgtgtacagcctcttctttgccaacaacaactggtacttcttcctgcggctgcaccagaccctgtgcagccggctgctgaagatctaccggcaggcccagaagcagctgctggagtacagaacagagaaggagcgggagaagctgctgtgtgagggcagaagagagaagggcagtgaccctgccatggagctgcggctgaagcagcccagcgaggtggagctggaggagtactacccagccttcctggacatggtgcgcagcctgctggagggcagcattgaccccacccagtatgaggacaccctgcgggagatgttcaccatccacgcctacgtgggcttcaccatggacaagctggtgcagaacatcgcccggcagctgcaccacctggtgtctgatgatgtgtgcctgaaggtggtggagctgtacctgaatgagaagaagagaggagctgctgggggcaacctgagcagccgctgtgtgcgggccgcccgggagaccagctaccagtggaaggccgagcgctgcatggctgatgagaactgcttcaaggtgatgttcctgcagaggaagggccaggtgatcatgaccatcgagctgctggacacagaggaggcccagacagaagatcctgtggaggtgcagcacctggcccgctacgtggagcagtatgtgggcacagaaggagccagcagcagccccacagagggcttcctgctgaagcctgtgttcctgcagaggaacctgaagaagttcagaagacgctggcagagcgagcaggcccgggccctgcggggggaggcccggagctcctggaagaggctggtgggcgtggagagcgcctgtgatgtggactgccgcttcaagctgagcacccacaagatggtgttcatcgtgaacagcgaggactacatgtacagaagaggcaccctgtgccgggccaagcaggtgcagcccctggtgctgctgcggcaccaccagcactttgaggagtggcacagccgctggctggaggacaacgtgacagtggaggccgccagcctggtgcaggactggctgatgggagaagaagatgaggacatggtgccctgcaagaccctgtgtgagaccgtgcacgtgcacggcctgcctgtgacccgctacagagtgcagtacagcagaagacctgccagcccctag

SEQ ID NO: 169824 - DNA, 3489 bp, synthetic construct
  misc_feature 1..3489: note = Description of Artificial Sequence: Synthetic coding sequence
  source 1..3489: mol_type = other DNA
atggcccacgccggcggcggcagcggcggcagcggggccggcggccctgctggccggggcctgagcggggcccgctggggccgcagcggcagcgctggccacgagaagctgcctgtgcacgtggaggatgccctgacctacctggaccaggtgaagatccgctttggaagtgaccctgccacctacaacggcttcctggagatcatgaaggagttcaagagccagagcattgacaccccaggagtcatccggcgggtgtcccagctgttccacgagcacccagacctgattgtgggcttcaatgccttcctgcccctgggctacagaattgacatccccaagaatggcaagctgaacatccagagccccctgaccagccaggagaacagccacaaccacggagatggagctgaggacttcaagcagcaggtgccctacaaggaggacaagccccaggtgcccctggagagtgacagcgtggagttcaacaatgccatctcctatgtgaacaagatcaagacccgcttcctggaccaccctgagatctaccgctccttcctggagatcctgcacacctaccagaaggagcagctgaacacccggggccggcccttccggggcatgtctgaggaggaggtgttcacagaggtggccaacctcttccggggccaggaggacctgctgtctgaatttggccagttcctgcctgaggccaagaggagcctcttcaccggaaatggcccctgtgagatgcacagcgtgcagaagaatgaacatgacaagaccccagagcacagcaggaagaggagccggcccagcctgctgcggcctgtgtctgccccagccaagaagaagatgaagctgcggggcaccaaggacctgagcattgctgctgtgggcaagtatggcaccctgcaggagttctccttctttgacaaggtgagaagagtgctgaagagccaggaggtgtatgagaacttcctgcgctgcatcgccctcttcaaccaggagctggtgtctggcagcgagctgctgcagctggtgagccccttcctgggcaagtttcctgagctgtttgcccagttcaagagcttcctgggcgtgaaggagctgagctttgccccacccatgtctgacagaagtggagatggcatcagccgggagattgattatgccagctgcaagagaattggcagcagctaccgggccctgcccaagacctaccagcagcccaagtgcagcggccgcacagccatctgcaaggagctggaccactggaccctgctgcagggctcctggacagatgactactgcatgagcaagttcaagaacacctgctggatccctggctacagcgctggggtgctgaatgacacctgggtgtccttccccagctggagcgaggacagcacctttgtgagcagcaagaagaccccctatgaggagcagctgcaccgctgtgaagatgaaagatttgagctggatgtggtgctggagaccaacctggccaccatccgggtgctggagagcgtgcagaagaagctgagcaggatggcccctgaggaccaggagaagttccggctggatgacagcctgggcggcaccagcgaggtgatccagaggcgggccatctaccgcatctacggggacaaggcccctgagatcatcgagagcctgaagaagaaccctgtgacagctgtgcctgtggtgctgaagaggctgaaggccaaggaggaggagtggagggaggcccagcagggcttcaacaagatctggagggagcagtatgagaaggcctacctgaagagcctggaccaccaggccgtgaacttcaagcagaatgacaccaaggccctgcggagcaagagcctgctgaatgaaattgagagcgtgtatgatgagcaccaggagcagcacagcgagggccgcagcgcccccagcagcgagccccacctgatctttgtgtatgaagatcggcagatcctggaggatgctgctgccctgatctcctactacgtgaagaggcagcctgccatccagaaggaggaccagggcaccatccaccagctgctgcaccagtttgtgcccagcctcttcttcagccagcagctggacctgggcgccagcgaggagagcgcagatgaagatcgggacagcccccagggccagaccacagaccccagcgagaggaagaagccagcccctggcccccacagcagccccccagaggagaagggggcctttggagatgccccagccacagagcagccccccctgcccccaccagccccccacaagcccctggatgatgtgtacagcctcttctttgccaacaacaactggtacttcttcctgcggctgcaccagaccctgtgcagccggctgctgaagatctaccggcaggcccagaagcagctgctggagtacagaacagagaaggagcgggagaagctgctgtgtgagggcagaagagagaagggcagtgaccctgccatggagctgcggctgaagcagcccagcgaggtggagctggaggagtactacccagccttcctggacatggtgcgcagcctgctggagggcagcattgaccccacccagtatgaggacaccctgcgggagatgttcaccatccacgcctacgtgggcttcaccatggacaagctggtgcagaacatcgcccggcagctgcaccacctggtgtctgatgatgtgtgcctgaaggtggtggagctgtacctgaatgagaagaagagaggagctgctgggggcaacctgagcagccgctgtgtgcgggccgcccgggagaccagctaccagtggaaggccgagcgctgcatggctgatgagaactgcttcaaggtgatgttcctgcagaggaagggccaggtgatcatgaccatcgagctgctggacacagaggaggcccagacagaagatcctgtggaggtgcagcacctggcccgctacgtggagcagtatgtgggcacagaaggagccagcagcagccccacagagggcttcctgctgaagcctgtgttcctgcagaggaacctgaagaagttcagaagacgctggcagagcgagcaggcccgggccctgcggggggaggcccggagctcctggaagaggctggtgggcgtggagagcgcctgtgatgtggactgccgcttcaagctgagcacccacaagatggtgttcatcgtgaacagcgaggactacatgtacagaagaggcaccctgtgccgggccaagcaggtgcagcccctggtgctgctgcggcaccaccagcactttgaggagtggcacagccgctggctggaggacaacgtgacagtggaggccgccagcctggtgcaggactggctgatgggagaagaagatgaggacatggtgccctgcaagaccctgtgtgagaccgtgcacgtgcacggcctgcctgtgacccgctacagagtgcagtacagcagaagacctgccagcccctag

SEQ ID NO: 169825 - DNA, 3171 bp, synthetic construct
  misc_feature 1..3171: note = Description of Artificial Sequence: Synthetic coding sequence
  source 1..3171: mol_type = other DNA
atgagcagccagcagttcccccggctgggcgcccccagcacaggcctgagccaggcccccagccagatcgccaacagcggcagcgctggcctcatcaacccagctgccaccgtgaatgatgagagcggccgggacagcgaggtgtctgcccgggagcacatgagcagcagcagcagcctgcagagccgggaggagaagcaggagcctgtggtggtgcggccctacccccaggtgcagatgctgagcacccaccacgctgtggccagcgccacccctgtggccgtgacagcccccccagcccacctgaccccagctgtgcccctgtccttcagcgagggcctgatgaagcccccacccaagcccaccatgcccagccggcccatcgccccagccccacccagcaccctgagcctgccccccaaggtgcccggccaggtgacagtgaccatggagagcagcatcccccaggccagcgccatccctgtggccaccatcagcggccagcagggccaccccagcaacctgcaccacatcatgaccaccaacgtgcagatgagcatcatccgcagcaatgcccctggcccccccctgcacatcggggccagccacctgcccagaggagctgctgctgctgctgtgatgagcagcagcaaggtgaccaccgtgctgcggcccaccagccagctgcccaatgctgccacagcccagcctgctgtgcagcacatcatccaccagcccatccagagcaggcctcctgtgaccaccagcaatgccatccccccagctgtggtggccaccgtgtctgccacccgggcccagagccctgtgatcaccaccacagctgcccacgccacagattctgccctgagccggcccaccctgagcatccagcaccccccatctgctgccatcagcatccagaggcctgcccagagcagagatgtgaccacccgcatcaccctgcccagccacccagccctgggcacccccaagcagcagctgcacaccatggcccagaagaccatcttcagcacaggcacccctgtggccgccgccaccgtggcccccatcctggccaccaacaccatccccagcgccaccacagctggctctgtgagccacacccaggcccccaccagcaccatcgtgaccatgacagtgcccagccacagcagccacgccacagctgtgaccaccagcaacatccctgtggccaaggtggtgccccagcagatcacccacaccagcccccgcatccagcctgactacccagctgagaggagcagcctcatccccatcagcggccaccgggccagccccaaccctgtggccatggagaccaggagtgacaaccggcccagcgtgcctgtgcagttccagtacttcctgcccacctacccaccttctgcctaccccctggccgcccacacctacacccccatcaccagctctgtgtccaccatccggcagtaccctgtgtctgcccaggcccccaacagcgccatcacagcccagacaggagtgggcgtggccagcacagtgcacctgaaccccatgcagctgatgacagtggatgccagccacgcccggcacatccagggcatccagcctgcccccatcagcacccagggcatccagcctgcccccatcggcaccccaggcatccagcctgcccccctgggcacccagggcatccacagcgccacccccatcaacacccagggcctgcagcctgcccccatgggcacccagcagccccagcctgagggcaagacctctgtggtgctggctgatggagccaccatcgtggccaaccccatcagcaaccccttctctgctgccccagctgccaccaccgtggtgcagacccacagccagagcgccagcaccaatgccccagcccagggcagcagcccccggcccagcatcctgaggaagaagccagccacagatggcatggctgtgaggaagaccctcatccccccccagcccccagatgtggccagcccccgggtggagagctccatgaggagcaccagcggcagccccaggcctgctggggccaagcccaagtctgagatccacgtgtccatggccacccctgtgacagtgtccatggagaccgtgagcaaccagaacaatgaccagcccaccatcgctgtgcccccaacagcccagcagcccccacccaccatccccaccatgattgctgctgccagcccccccagccagcctgctgtggccctgagcaccatccctggagctgtgcccatcaccccacccatcaccaccatcgctgctgcccccccacccagcgtgacagtgggcggcagcctgagctctgtgctgggcccccctgtgcctgagatcaaggtgaaggaggaggtggagcccatggacatcatgaggcctgtgtctgctgtgccccccctggccaccaacacagtgagccccagcctggccctgctggccaacaacctgtccatgcccaccagtgacctgcccccaggggccagccccaggaagaagcccaggaagcagcagcacgtgatcagcacagaggagggggacatgatggagaccaacagcacagatgatgagaagagcacagccaagagcctgctggtgaaggccgagaagaggaagagcccccccaaggagtacattgatgaggagggcgtgcgctacgtgcctgtgcggcccaggcctcccatcaccctgctgcggcactacagaaacccctggaaggccgcctaccaccacttccagcgctacagtgatgtgcgggtgaaggaggagaagaaggccatgctgcaggagatcgccaaccagaagggcgtgtcctgccgggcccagggctggaaggtgcacctgtgtgccgcccagctgctgcagctgaccaacctggagcatgatgtgtatgaaaggctgaccaacctgcaggagggcatcatccccaagaagaaggccgccacagatgatgacctgcaccgcatcaatgagctgatccagggcaacatgcagcgctgcaagctggtgatggaccagatcagcgaggcccgggacagcatgctgaaggtgctggaccacaaggacagagtgctgaagctgctgaacaagaatggaacagtgaagaaggtgtccaagctgaagaggaaggagaaggtgtag

SEQ ID NO: 169826 - DNA, 3147 bp, synthetic construct
  misc_feature 1..3147: note = Description of Artificial Sequence: Synthetic coding sequence
  source 1..3147: mol_type = other DNA
atgggccccccaagacacccccaggccggggagattgaggccggcggggccggcggcggccgccgcctgcaggtggagatgagcagccagcagttcccccggctgggcgcccccagcacaggcctgagccaggcccccagccagatcgccaacagcggcagcgctggcctcatcaacccagctgccaccgtgaatgatgagagcggccgggacagcgaggtgtctgcccgggagcacatgagcagcagcagcagcctgcagagccgggaggagaagcaggagcctgtggtggtgcggccctacccccaggtgcagatgctgagcacccaccacgctgtggccagcgccacccctgtggccgtgacagcccccccagcccacctgaccccagctgtgcccctgtccttcagcgagggcctgatgaagcccccacccaagcccaccatgcccagccggcccatcgccccagccccacccagcaccctgagcctgccccccaaggtgcccggccaggtgacagtgaccatggagagcagcatcccccaggccagcgccatccctgtggccaccatcagcggccagcagggccaccccagcaacctgcaccacatcatgaccaccaacgtgcagatgagcatcatccgcagcaatgcccctggcccccccctgcacatcggggccagccacctgcccagaggagctgctgctgctgctgtgatgagcagcagcaaggtgaccaccgtgctgcggcccaccagccagctgcccaatgctgccacagcccagcctgctgtgcagcacatcatccaccagcccatccagagcaggcctcctgtgaccaccagcaatgccatccccccagctgtggtggccaccgtgtctgccacccgggcccagagccctgtgatcaccaccacagctgcccacgccacagattctgccctgagccggcccaccctgagcatccagcaccccccatctgctgccatcagcatccagaggcctgcccagagcagagatgtgaccacccgcatcaccctgcccagccacccagccctgggcacccccaagcagcagctgcacaccatggcccagaagaccatcttcagcacaggcacccctgtggccgccgccaccgtggcccccatcctggccaccaacaccatccccagcgccaccacagctggctctgtgagccacacccaggcccccaccagcaccatcgtgaccatgacagtgcccagccacagcagccacgccacagctgtgaccaccagcaacatccctgtggccaaggtggtgccccagcagatcacccacaccagcccccgcatccagcctgactacccagctgagaggagcagcctcatccccatcagcggccaccgggccagccccaaccctgtggccatggagaccaggagtgacaaccggcccagcgtgcctgtgcagttccagtacttcctgcccacctacccaccttctgcctaccccctggccgcccacacctacacccccatcaccagctctgtgtccaccatccggcagtaccctgtgtctgcccaggcccccaacagcgccatcacagcccagacaggagtgggcgtggccagcacagtgcacctgaaccccatgcagctgatgacagtggatgccagccacgcccggcacatccagggcatccagcctgcccccatcagcacccagggcatccagcctgcccccatcggcaccccaggcatccagcctgcccccctgggcacccagggcatccacagcgccacccccatcaacacccagggcctgcagcctgcccccatgggcacccagcagccccagcctgagggcaagaccagcgctgtggtgctggctgatggagccaccatcgtggccaaccccatcagcaaccccttctctgctgccccagctgccaccaccgtggtgcagacccacagccagagcgccagcaccaatgccccagcccagggcagcagcccccggcccagcatcctgaggaagaagccagccacagatggagccaagcccaagtctgagatccacgtgtccatggccacccctgtgacagtgtccatggagaccgtgagcaaccagaacaatgaccagcccaccatcgctgtgcccccaacagcccagcagcccccacccaccatccccaccatgattgctgctgccagcccccccagccagcctgctgtggccctgagcaccatccctggagctgtgcccatcaccccacccatcaccaccatcgctgctgcccccccacccagcgtgacagtgggcggcagcctgagctctgtgctgggcccccctgtgcctgagatcaaggtgaaggaggaggtggagcccatggacatcatgaggcctgtgtctgctgtgccccccctggccaccaacacagtgagccccagcctggccctgctggccaacaacctgtccatgcccaccagtgacctgcccccaggggccagccccaggaagaagcccaggaagcagcagcacgtgatcagcacagaggagggggacatgatggagaccaacagcacagatgatgagaagagcacagccaagagcctgctggtgaaggccgagaagaggaagagcccccccaaggagtacattgatgaggagggcgtgcgctacgtgcctgtgcggcccaggcctcccatcaccctgctgcggcactacagaaacccctggaaggccgcctaccaccacttccagcgctacagtgatgtgcgggtgaaggaggagaagaaggccatgctgcaggagatcgccaaccagaagggcgtgtcctgccgggcccagggctggaaggtgcacctgtgtgccgcccagctgctgcagctgaccaacctggagcatgatgtgtatgaaaggctgaccaacctgcaggagggcatcatccccaagaagaaggccgccacagatgatgacctgcaccgcatcaatgagctgatccagggcaacatgcagcgctgcaagctggtgatggaccagatcagcgaggcccgggacagcatgctgaaggtgctggaccacaaggacagagtgctgaagctgctgaacaagaatggaacagtgaagaaggtgtccaagctgaagaggaaggagaaggtgtag

SEQ ID NO: 169827 - DNA, 3252 bp, synthetic construct
  misc_feature 1..3252: note = Description of Artificial Sequence: Synthetic coding sequence
  source 1..3252: mol_type = other DNA
atgggccccccaagacacccccaggccggggagattgaggccggcggggccggcggcggccgccgcctgcaggtggagatgagcagccagcagttcccccggctgggcgcccccagcacaggcctgagccaggcccccagccagatcgccaacagcggcagcgctggcctcatcaacccagctgccaccgtgaatgatgagagcggccgggacagcgaggtgtctgcccgggagcacatgagcagcagcagcagcctgcagagccgggaggagaagcaggagcctgtggtggtgcggccctacccccaggtgcagatgctgagcacccaccacgctgtggccagcgccacccctgtggccgtgacagcccccccagcccacctgaccccagctgtgcccctgtccttcagcgagggcctgatgaagcccccacccaagcccaccatgcccagccggcccatcgccccagccccacccagcaccctgagcctgccccccaaggtgcccggccaggtgacagtgaccatggagagcagcatcccccaggccagcgccatccctgtggccaccatcagcggccagcagggccaccccagcaacctgcaccacatcatgaccaccaacgtgcagatgagcatcatccgcagcaatgcccctggcccccccctgcacatcggggccagccacctgcccagaggagctgctgctgctgctgtgatgagcagcagcaaggtgaccaccgtgctgcggcccaccagccagctgcccaatgctgccacagcccagcctgctgtgcagcacatcatccaccagcccatccagagcaggcctcctgtgaccaccagcaatgccatccccccagctgtggtggccaccgtgtctgccacccgggcccagagccctgtgatcaccaccacagctgcccacgccacagattctgccctgagccggcccaccctgagcatccagcaccccccatctgctgccatcagcatccagaggcctgcccagagcagagatgtgaccacccgcatcaccctgcccagccacccagccctgggcacccccaagcagcagctgcacaccatggcccagaagaccatcttcagcacaggcacccctgtggccgccgccaccgtggcccccatcctggccaccaacaccatccccagcgccaccacagctggctctgtgagccacacccaggcccccaccagcaccatcgtgaccatgacagtgcccagccacagcagccacgccacagctgtgaccaccagcaacatccctgtggccaaggtggtgccccagcagatcacccacaccagcccccgcatccagcctgactacccagctgagaggagcagcctcatccccatcagcggccaccgggccagccccaaccctgtggccatggagaccaggagtgacaaccggcccagcgtgcctgtgcagttccagtacttcctgcccacctacccaccttctgcctaccccctggccgcccacacctacacccccatcaccagctctgtgtccaccatccggcagtaccctgtgtctgcccaggcccccaacagcgccatcacagcccagacaggagtgggcgtggccagcacagtgcacctgaaccccatgcagctgatgacagtggatgccagccacgcccggcacatccagggcatccagcctgcccccatcagcacccagggcatccagcctgcccccatcggcaccccaggcatccagcctgcccccctgggcacccagggcatccacagcgccacccccatcaacacccagggcctgcagcctgcccccatgggcacccagcagccccagcctgagggcaagaccagcgctgtggtgctggctgatggagccaccatcgtggccaaccccatcagcaaccccttctctgctgccccagctgccaccaccgtggtgcagacccacagccagagcgccagcaccaatgccccagcccagggcagcagcccccggcccagcatcctgaggaagaagccagccacagatggcatggctgtgaggaagaccctcatccccccccagcccccagatgtggccagcccccgggtggagagctccatgaggagcaccagcggcagccccaggcctgctggggccaagcccaagtctgagatccacgtgtccatggccacccctgtgacagtgtccatggagaccgtgagcaaccagaacaatgaccagcccaccatcgctgtgcccccaacagcccagcagcccccacccaccatccccaccatgattgctgctgccagcccccccagccagcctgctgtggccctgagcaccatccctggagctgtgcccatcaccccacccatcaccaccatcgccgccgcccctcctccttctgtgacagtgggcggcagcctgagctctgtgctgggcccccctgtgcctgagatcaaggtgaaggaggaggtggagcccatggacatcatgaggcctgtgtctgctgtgccccccctggccaccaacacagtgagccccagcctggccctgctggccaacaacctgtccatgcccaccagtgacctgcccccaggggccagccccaggaagaagcccaggaagcagcagcacgtgatcagcacagaggagggggacatgatggagaccaacagcacagatgatgagaagagcacagccaagagcctgctggtgaaggccgagaagaggaagagcccccccaaggagtacattgatgaggagggcgtgcgctacgtgcctgtgcggccccggccccccatcaccctgctgcggcactacagaaacccctggaaggccgcctaccaccacttccagcgctacagtgatgtgcgggtgaaggaggagaagaaggccatgctgcaggagatcgccaaccagaagggcgtgtcctgccgggcccagggctggaaggtgcacctgtgtgccgcccagctgctgcagctgaccaacctggagcatgatgtgtatgagcggctgaccaacctgcaggagggcatcatccccaagaagaaggccgccacagatgatgacctgcaccgcatcaatgaactcatccagggcaacatgcagcgctgcaagctggtgatggaccagatcagcgaggcccgggacagcatgctgaaggtgctggaccacaaggacagagtgctgaagctgctgaacaagaatggcaccgtgaagaaggtgtccaagctgaagaggaaggagaaggtgtag

SEQ ID NO: 169828 - DNA, 789 bp, synthetic construct
  misc_feature 1..789: note = Description of Artificial Sequence: Synthetic coding sequence
  source 1..789: mol_type = other DNA
atgagcagccagcagttcccccggctgggcgcccccagcacaggcctgagccaggcccccagccagatcgccaacagcggcagcgctggcctcatcaacccagctgccaccgtgaatgatgagagcggccgggacagcgaggtgtctgcccgggagcacatgagcagcagcagcagcctgcagagccgggaggagaagcaggagcctgtggtggtgcggccctacccccaggtgcagatgctgagcacccaccacgctgtggccagcgccacccctgtggccgtgacagcccccccagcccacctgaccccagctgtgcccctgtccttcagcgagggcctgatgaagcccccacccaagcccaccatgcccagccggcccatcgccccagccccacccagcaccctgagcctgccccccaaggtgcccggccaggtgacagtgaccatggagagcagcatcccccaggccagcgccatccctgtggccaccatcagcggccagcagggccaccccagcaacctgcaccacatcatgaccaccaacgtgcagatgagcatcatccgcagcaatgcccctggcccccccctgcacatcggggccagccacctgcccagaggagctgctgctgctgctgtgatgagcagcagcaaggtgaccaccgtgctgcggcccaccagccagctgcccaatgctgccacagcccagcctgctgtgcagcacatcatccaccagcccatccagagcaggcctcctgtgaccaccagcaatgccatccccccagcctag

SEQ ID NO: 169829 - DNA, 630 bp, synthetic construct
  misc_feature 1..630: note = Description of Artificial Sequence: Synthetic coding sequence
  source 1..630: mol_type = other DNA
atgaaccccagcatgaagcagaagcaggaggagatcaaggagaacatcaagaacagctctgtgcccaggaggaccctgaagatgatccagcccagcgccagcggcagcctggtgggcagagaaaatgagctgtctgctggcctgagcaagaggaagcacagaaatgaccacctgaccagcaccaccagcagccctggggtcatcgtgcctgagagcagcgagaacaagaacctgggcggcgtgacccaggagagctttgacctgatgatcaaggagaaccccagcagccagtactggaaggaggtggccgagaagaggaggaaggccctgtatgaggccctgaaggaaaatgagaagctgcacaaggagattgagcagaaggacaatgaaattgcccggctgaagaaggagaacaaggagctggccgaggtggccgagcacgtgcagtacatggccgagctgattgagcggctgaatggagagcccctggacaactttgagagcctggacaaccaggagtttgacagcgaggaggagaccgtggaggacagcctggtggaggacagcgagatcggcacctgtgccgagggcaccgtgagcagcagcacagatgccaagccctgcatctag

SEQ ID NO: 169830 - DNA, 2622 bp, synthetic construct
  misc_feature 1..2622: note = Description of Artificial Sequence: Synthetic coding sequence
  source 1..2622: mol_type = other DNA
atggccgagatggagaaggagggccggcccccagagaacaagaggagcaggaagccagcccaccctgtgaagcgggagatcaatgaggagatgaagaactttgctgagaacaccatgaatgagctgctgggctggtacggctatgacaaggtggagctgaaggatggagaagatattgagttccgcagctaccccacagatggagagagccggcagcacatctctgtgctgaaggagaacagcctgcccaagcccaagctgcctgaagattctgtcatcagcccctacaacatcagcacaggctacagcggcctggccactggaaatggcctgagtgacagccctgctggcagcaaggaccacggctctgtgcccatcatcgtgcccctcatccccccacccttcatcaagcccccagcagaagatgatgtgtccaatgtgcagatcatgtgtgcctggtgccagaaggtgggcatcaagcgctacagcctgtccatgggcagcgaggtgaagagcttctgcagcgagaagtgctttgctgcctgcagaagagcctacttcaagaggaacaaggccagagatgaagatggccatgctgagaacttcccccagcagcactacgccaaggagaccccccggctggccttcaagaacaactgtgagctgctggtgtgtgactggtgcaagcacatccgccacaccaaggagtacctggactttggagatggagagcggcggctgcagttctgcagcgccaagtgcctgaaccagtacaagatggacatcttctacaaggagacccaggccaacctgcctgctggcctgtgcagcaccctgcacccccccatggagaacaaggccgagggcaccggggtgcagctgctgaccccagacagctggaacatccccctgacagatgcccggaggaaggcccccagccctgtggccacagctggccagagccagggccctggccccagcgccagcaccaccgtgagccccagcgacacagccaactgcagcgtgaccaagatccccacccctgtgcccaagagcatccccatcagcgagacccccaacatcccccctgtgtctgtgcagcccccagccagcatcggcccccccctgggcgtgcccccaagaagcccccccatggtgatgaccaacagaggccctgtgcccctgcccatcttcatggagcagcagatcatgcagcagatccggccccccttcatccggggccccccccaccacgccagcaaccccaacagccccctgagcaaccccatgctgcccggcatcggccccccacctgggggccccaggaacctgggccccaccagcagccccatgcaccggcccatgctgagcccccacatccacccccccagcacccccaccatgcctggcaaccccccaggcctgctgcccccacctcctcctggggcccccctgcccagcctgcccttcccccctgtgtccatgatgcccaacggccccatgcctgtgccccagatgatgaactttggcctgcccagcctggcccccctggtgcccccacccaccctgctggtgccctaccctgtgattgtgcccctgcctgtgcccatccccatccccatccccatcccccacgtgtctgacagcaagcccccaaatggcttcagcagcaatggagagaacttcatccccaatgcccctggggacagcgctgctgctgggggcaagcccagcggccacagcctgagcccccgggacagcaagcagggcagcagcaagtctgctgacagccccccaggctgcagcggccaggccctgagcctggcccccaccccagctgagcacggccgctctgaggtggtggacctgaccaggagagctggcagccccccaggccccccaggggccggcggccagctgggcttccctggggtgctgcagggcccccaggatggagtcatcgacctgactgtgggccaccgggcccggctgcacaacgtcatccaccgggccctgcacgcccacgtgaaggccgagcgggagcccagcgctgctgagaggaggacctgtggcggctgcagagatggccactgcagccccccagctgctggggaccccggccctggggccccagctggccctgaggccgccgccgcctgcaatgtgattgtgaatggcaccagaggagctgctgctgagggcgccaagtctgctgagcccccacctgagcagcccccacctcctcctcctccagccccacccaagaagctgctgagccctgaggagcctgctgtgtctgagctggagagcgtgaaggagaacaactgtgccagcaactgccacctggatggagaggccgccaagaagctgatgggagaggaggccctggccggcggggacaagagtgaccccaacctgaacaacccagcagatgaggaccacgcctatgccctgaggatgctgcccaagacaggctgcgtcatccagcctgtgcccaagccagctgagaaggccgccatggccccctgcatcatcagcagccccatgctgtctgctggccctgaggacctggagccccccctgaagaggcgctgcctgcgcatccggaaccagaacaagtag

SEQ ID NO: 169831 - DNA, 1233 bp, synthetic construct
  misc_feature 1..1233: note = Description of Artificial Sequence: Synthetic coding sequence
  source 1..1233: mol_type = other DNA
atgcctggggtgtgtgaccgggccccagacttcctgagccccagcgaggaccaggtgctgcggcctgccctgggcagctctgtggccctgaactgcacagcctgggtggtgtctggcccccactgcagcctgcccagcgtgcagtggctgaaggatggcctgcccctgggcatcggcggccactacagcctgcacgagtacagctgggtgaaggccaacctgtctgaggtgctggtgtcctctgtgctgggcgtgaatgtgaccagcacagaggtgtatggagccttcacctgcagcatccagaacatctccttcagcagcttcaccctgcagagagctggccccaccagccacgtggccgctgtgctggccagcctgctggtgctgctggccctgctgctggccgccctgctgtatgtgaagtgccgcctgaatgtgctgctgtggtaccaggatgcctacggggaggtggagatcaatgatggcaagctgtatgatgcctacgtgtcctacagcgactgcccagaggacaggaagtttgtgaacttcatcctgaagccccagctggagcggcggcggggctacaagctgttcctggatgaccgggacctgctgcccagggctgagcccagcgctgacctgctggtgaacctgagccgctgccggcggctgattgtggtgctgagtgatgccttcctgagccgggcctggtgcagccacagcttccgggagggcctgtgccgcctgctggagctgacccggcggcccatcttcatcacctttgagggccagaggcgggaccctgcccacccagccctgcggctgctgcggcagcaccgccacctggtgaccctgctgctgtggaggcctggctctgtgacccccagcagtgacttctggaaggaggtgcagctggccctgcccaggaaggtgcagtacagacctgtggagggggacccccagacccagctgcaggatgacaaggaccccatgctgatcctgcggggccgggtgcctgagggccgggccctggacagcgaggtggaccctgaccctgagggggacctgggcgtgcggggccctgtgtttggagagcccagcgccccaccccacaccagcggcgtgtccctgggggagagccgcagcagcgaggtggatgtgtctgacctgggcagcaggaactacagcgccaggacagacttctactgcctggtgtccaaggatgacatgtag

SEQ ID NO: 169832 - DNA, 1515 bp, synthetic construct
  misc_feature 1..1515: note = Description of Artificial Sequence: Synthetic coding sequence
  source 1..1515: mol_type = other DNA
atgcctggggtgtgtgaccgggccccagacttcctgagccccagcgaggaccaggtgctgcggcctgccctgggcagctctgtggccctgaactgcacagcctgggtggtgtctggcccccactgcagcctgcccagcgtgcagtggctgaaggatggcctgcccctgggcatcggcggccactacagcctgcacgagtacagctgggtgaaggccaacctgtctgaggtgctggtgtcctctgtgctgggcgtgaatgtgaccagcacagaggtgtatggagccttcacctgcagcatccagaacatctccttcagcagcttcaccctgcagagagctggccccaccagccacgtggccgctgtgctggccagcctgctggtgctgctggccctgctgctggccgccctgctgtatgtgaagtgccgcctgaatgtgctgctgtggtaccaggatgcctacggggaggtggagatcaatgatggcaagctgtatgatgcctacgtgtcctacagcgactgcccagaggacaggaagtttgtgaacttcatcctgaagccccagctggagcggcggcggggctacaagctgttcctggatgaccgggacctgctgcccagggctgagcccagcgctgacctgctggtgaacctgagccgctgccggcggctgattgtggtgctgagtgatgccttcctgagccgggcctggtgcagccacagcttccgggagggcctgtgccgcctgctggagctgacccggcggcccatcttcatcacctttgagggccagaggcgggaccctgcccacccagccctgcggctgctgcggcagcaccgccacctggtgaccctgctgctgtggaggcctggctctgtgacccccagcagtgacttctggaaggaggtgcagctggccctgcccaggaaggtgcagtacagacctgtggagggggacccccagacccagctgcaggatgacaaggaccccatgctgatcctgcggggccgggtgcctgagggccgggccctggacagcgaggtggaccctgaccctgagggggacctgggcatgcctgcccagccccacagccccaccggggaggcccagcacagagctgagtggggccaggcccagggcactggacctggaggagcccctggggtggaggacagcagccgccaccgggagcccctgcacggcctgtgccctgggggcgcccggcccagcgtgtgcctgggcacctcctgggccagccaggccatcacagctggaggagagcagggccagcccctggccgtgggcctgggccagggctgcggctggccaccccaggccagccgcagcccccacccccgctgccctggggcctgcctgtggagggccatcagcagcacagcccaccagtggggcctggccggccgggagcctgagcagaggagcggccgcctgggcagccggctggccaagctgcagtgcccccaccggctgctgctgcccggggtgcagggctag

SEQ ID NO: 169833 - DNA, 1233 bp, synthetic construct; identical to SEQ ID NO: 169831
  misc_feature 1..1233: note = Description of Artificial Sequence: Synthetic coding sequence
  source 1..1233: mol_type = other DNA

SEQ ID NO: 169834 - DNA, 1233 bp, synthetic construct; identical to SEQ ID NO: 169831
  misc_feature 1..1233: note = Description of Artificial Sequence: Synthetic coding sequence
  source 1..1233: mol_type = other DNA

SEQ ID NO: 169835 - DNA, 1515 bp, synthetic construct; identical to SEQ ID NO: 169832
  misc_feature 1..1515: note = Description of Artificial Sequence: Synthetic coding sequence
  source 1..1515: mol_type = other DNA

SEQ ID NO: 169836 - DNA, 1107 bp, synthetic construct
  misc_feature 1..1107: note = Description of Artificial Sequence: Synthetic coding sequence
  source 1..1107: mol_type = other DNA
atgtttgccaagggcaagggcagcgctgtgcccagtgatggccaggcccgggagaagctggccctgtatgtgtatgagtacctgctgcacgtgggcgcccagaagagcgcccagaccttcctgtctgagatccgctgggagaagaacatcaccctgggggagcccccaggcttcctgcacagctggtggtgtgtgttctgggacctgtactgtgccgcccctgagcggcgggacacctgtgagcacagcagcgaggccaaggccttccatgactacagcgctgctgctgcccccagccctgtgctgggcaacatccccccaaatgatggcatgcctgggggccccatccccccaggcttcttccagggccccccaggcagccagcccagcccccacgcccagcccccaccccacaaccccagctccatgatgggcccccacagccagcccccaggaggagtgcccggcacccagcccctgctgcccaacagcatggaccccacccggcagcagggccaccccaacatgggcggctccatgcagaggatgaaccccccccggggcatgggccccatgggccctggcccccagaactacggcagcggcatgaggcccccacccaacagcctgggccctgccatgcctggcatcaacatgggccctggagctggccggccctggcccaaccccaacagcgccaacagcatcccctacagcagcagcagccctggcacctacgtgggccccccaggcggcggcggccccccaggcacccccatcatgcccagccctgctgacagcaccaacagcagtgacaacatctacaccatgatcaaccctgtgcccccaggcggcagccgcagcaacttccccatgggccctggcagtgatggccccatgggcggcatgggcggcatggagccccaccacatgaatggcagcctgggcagcggggacattgatggcctgcccaagaacagccccaacaacatcagcggcatcagcaaccccccaggcaccccaagagatgatggagagctgggcggcaacttcctgcacagcttccagaatgacaactacagccccagcatgaccatgtctgtgtag

SEQ ID NO: 169837 - DNA, 1086 bp, synthetic construct
  misc_feature 1..1086: note = Description of Artificial Sequence: Synthetic coding sequence
  source 1..1086: mol_type = other DNA
atgtttgccaagggcaagggcagcgctgtgcccagtgatggccaggcccgggagaagctggccctgtatgtgtatgagtacctgctgcacgtgggcgcccagaagagcgcccagaccttcctgtctgagatccgctgggagaagaacatcaccctgggggagcccccaggcttcctgcacagctggtggtgtgtgttctgggacctgtactgtgccgcccctgagcggcgggacacctgtgagcacagcagcgaggccaaggccttccatgactacagcgctgctgctgcccccagccctgtgctgggcaacatccccccaaatgatggcatgcctgggggccccatccccccaggcttcttccagcccttcatgagccccaggtatgctgggggccccaggcctcccatccgcatgggcaaccagcccccaggcggcgtgcccggcacccagcccctgctgcccaacagcatggaccccacccggcagcagggccaccccaacatgggcggctccatgcagaggatgaaccccccccggggcatgggccccatgggccctggcccccagaactacggcagcggcatgaggcccccacccaacagcctgggccctgccatgcctggcatcaacatgggccctggggccggccggccctggcccaaccccaacagcgccaacagcatcccctacagcagcagcagccctggcacctacgtgggccccccaggcggcggcggccccccaggcacccccatcatgcccagccctgctgacagcaccaacagcagtgacaacatctacaccatgatcaaccctgtgcccccaggcggcagccgcagcaacttccccatgggccctggcagtgatggccccatgggcggcatgggcggcatggagccccaccacatgaatggcagcctgggcagcggggacattgatggcctgcccaagaacagccccaacaacatcagcggcatcagcaaccccccaggcaccccaagagatgatggagagctgggcggcaacttcctgcacagcttccagaatgacaactacagccccagcatgaccatgtctgtgtag

SEQ ID NO: 169838 - DNA, 1167 bp, synthetic construct
  misc_feature 1..1167: note = Description of Artificial Sequence: Synthetic coding sequence
  source 1..1167: mol_type = other DNA
atgtttgccaagggcaagggcagcgctgtgcccagtgatggccaggcccgggagaagctggccctgtatgtgtatgagtacctgctgcacgtgggcgcccagaagagcgcccagaccttcctgtctgagatccgctgggagaagaacatcaccctgggggagcccccaggcttcctgcacagctggtggtgtgtgttctgggacctgtactgtgccgcccctgagcggcgggacacctgtgagcacagcagcgaggccaaggccttccatgactacagcgctgctgctgcccccagccctgtgctgggcaacatccccccaaatgatggcatgcctgggggccccatccccccaggcttcttccagggccccccaggcagccagcccagcccccacgcccagcccccaccccacaaccccagctccatgatgggcccccacagccagcccttcatgagccccaggtatgccggcggcccccggccccccatccgcatgggcaaccagcccccaggaggagtgcccggcacccagcccctgctgcccaacagcatggaccccacccggcagcagggccaccccaacatgggcggctccatgcagaggatgaaccccccccggggcatgggccccatgggccctggcccccagaactacggcagcggcatgaggcccccacccaacagcctgggccctgccatgcctggcatcaacatgggccctggagctggccggccctggcccaaccccaacagcgccaacagcatcccctacagcagcagcagccctggcacctacgtgggccccccaggcggcggcggccccccaggcacccccatcatgcccagccctgctgacagcaccaacagcagtgacaacatctacaccatgatcaaccctgtgcccccaggcggcagccgcagcaacttccccatgggccctggcagtgatggccccatgggcggcatgggcggcatggagccccaccacatgaatggcagcctgggcagcggggacattgatggcctgcccaagaacagccccaacaacatcagcggcatcagcaaccccccaggcaccccaagagatgatggagagctgggcggcaacttcctgcacagcttccagaatgacaactacagccccagcatgaccatgtctgtgtag

SEQ ID NO: 169839 - DNA, 837 bp, synthetic construct
  misc_feature 1..837: note = Description of Artificial Sequence: Synthetic coding sequence
  source 1..837: mol_type = other DNA
atgcctgggggccccatccccccaggcttcttccagggccccccaggcagccagcccagcccccacgcccagcccccaccccacaaccccagctccatgatgggcccccacagccagcccttcatgagccccaggtatgccggcggcccccggccccccatccgcatgggcaaccagcccccaggaggagtgcccggcacccagcccctgctgcccaacagcatggaccccacccggcagcagggccaccccaacatgggcggctccatgcagaggatgaaccccccccggggcatgggccccatgggccctggcccccagaactacggcagcggcatgaggcccccacccaacagcctgggccctgccatgcctggcatcaacatgggccctggagctggccggccctggcccaaccccaacagcgccaacagcatcccctacagcagcagcagccctggcacctacgtgggccccccaggcggcggcggccccccaggcacccccatcatgcccagccctgctgacagcaccaacagcagtgacaacatctacaccatgatcaaccctgtgcccccaggcggcagccgcagcaacttccccatgggccctggcagtgatggccccatgggcggcatgggcggcatggagccccaccacatgaatggcagcctgggcagcggggacattgatggcctgcccaagaacagccccaacaacatcagcggcatcagcaaccccccaggcaccccaagagatgatggagagctgggcggcaacttcctgcacagcttccagaatgacaactacagccccagcatgaccatgtctgtgtag

SEQ ID NO: 169840 - DNA, 471 bp, synthetic construct
  misc_feature 1..471: note = Description of Artificial Sequence: Synthetic coding sequence
  source 1..471: mol_type = other DNA
cctcctgggggcgtgcccggcacccagcccctgctgcccaacagcatggaccccacccggcagcagggccaccccaacatgggcggctccatgcagaggatgaaccccccccggggcatgggccccatgggccctggcccccagaactacggcagcggcatgaggcccccacccaacagcctgggccctgccatgcctggcatcaacatgggccctggggccggccggccctggcccaaccccaacagcgccaacagcatcccctacagcagcagcagccctggcacctacgtgggccccccaggcggcggcggccccccaggcacccccatcatgcccagccctgctgacagcaccaacagcagtgacaacatctacaccatgatcaaccctgtgcccccaggcggcagccgcagcaatgtgtccctgctgagcaacaacctgcacatccgccaccacaacaagagctag

SEQ ID NO: 169841 - DNA, 1158 bp, synthetic construct
  misc_feature 1..1158: note = Description of Artificial Sequence: Synthetic coding sequence
  source 1..1158: mol_type = other DNA
atgtatgccaagggcggcaaaggatctgctgtgcccagcgacagccaggcccgggagaagctggccctgtatgtgtatgagtacctgctgcacatcggggcccagaagagcgcccagaccttcctgtctgagatccgctgggagaagaacatcaccctgggggagcccccaggcttcctgcacagctggtggtgtgtgttctgggacctgtactgtgccgccccagacagaagagaggcctgtgagcacagcggggaggccaaggccttccaggactacagcgctgctgctgcccccagccctgtgatgggctccatggcccctggggacaccatggccgccggctccatggctgctggcttcttccagggccccccaggcagccagcccagcccccacaaccccaatgcccccatgatgggcccccacggccagcccttcatgagcccccgcttccctgggggcccccggcccaccctgaggatgcccagccagcccccagctggcctgcccggcagccagcccctgctgcccggggccatggagcccagcccccgggcccagggccaccccagcatgggcggccccatgcagagggtgaccccaccccggggcatggcctctgtgggcccccagagctatggaggcggcatgaggcccccacccaacagcctggccggccctggcctgcctgccatgaacatgggccctggggtgcggggcccctgggccagccccagcggcaacagcatcccctacagcagcagcagccctggcagctacacaggccccccaggcggcggcggccccccaggcacccccatcatgcccagccctggggacagcaccaacagcagcgagaacatgtacaccatcatgaaccccatcggccagggcgccggccgggccaacttccccctgggccctggccctgagggccccatggccgccatgtctgccatggagccccaccacgtgaatggcagcctgggcagcggggacatggatggcctgcccaagagcagccctggagctgtggccggcctgagcaatgcccctggcaccccaagagatgatggagagatggctgctgctggcaccttcctgcaccccttccccagcgagagctacagccctggcatgaccatgtctgtgtag

SEQ ID NO: 169842 - DNA, 1092 bp, synthetic construct
  misc_feature 1..1092: note = Description of Artificial Sequence: Synthetic coding sequence
  source 1..1092: mol_type = other DNA
atgtatgccaagggcggcaaaggatctgctgtgcccagcgacagccaggcccgggagaagctggccctgtatgtgtatgagtacctgctgcacatcggggcccagaagagcgcccagaccttcctgtctgagatccgctgggagaagaacatcaccctgggggagcccccaggcttcctgcacagctggtggtgtgtgttctgggacctgtactgtgccgccccagacagaagagaggcctgtgagcacagcggggaggccaaggccttccaggactacagcgctgctgctgcccccagccctgtgatgggctccatggcccctggggacaccatggccgccggctccatggctgctggcttcttccagcccttcatgagcccccgcttccctgggggcccccggcccaccctgaggatgcccagccagcccccagctggcctgcccggcagccagcccctgctgcccggggccatggagcccagcccccgggcccagggccaccccagcatgggcggccccatgcagagggtgaccccaccccggggcatggcctctgtgggcccccagagctatggaggcggcatgaggcccccacccaacagcctggccggccctggcctgcctgccatgaacatgggccctggggtgcggggcccctgggccagccccagcggcaacagcatcccctacagcagcagcagccctggcagctacacaggccccccaggcggcggcggccccccaggcacccccatcatgcccagccctggggacagcaccaacagcagcgagaacatgtacaccatcatgaaccccatcggccagggcgccggccgggccaacttccccctgggccctggccctgagggccccatggccgccatgtctgccatggagccccaccacgtgaatggcagcctgggcagcggggacatggatggcctgcccaagagcagccctggagctgtggccggcctgagcaatgcccctggcaccccaagagatgatggagagatggctgctgctggcaccttcctgcaccccttccccagcgagagctacagccctggcatgaccatgtctgtgtag

SEQ ID NO: 169843 - DNA, 2301 bp, synthetic construct
  misc_feature 1..2301: note = Description of Artificial Sequence: Synthetic coding sequence
  source 1..2301: mol_type = other DNA
atgaaggagaagagcaagaatgctgcccggacccggcgggagaaggagaacagcgagttctatgagctggccaagctgctgcccctgcccagcgccatcaccagccagctggacaaggccagcatcatccggctgaccaccagctacctgaagatgagggtggtgtttcctgagggcctgggggaggcctggggccacagcagcaggaccagccccctggacaacgtgggccgggagctgggcagccacctgctgcagaccctggatggcttcatctttgtggtggccccagatggcaagatcatgtacatcagcgagacagcctctgtgcacctgggcctgagccaggtggagctgaccggcaacagcatctatgagtacatccaccctgctgaccatgatgagatgacagctgtgctgacagcccaccagccctaccacagccactttgtgcaggagtatgaaattgaaagaagcttcttcctgaggatgaagtgtgtgctggccaagagaaatgccggcctgacctgtggcggctacaaggtgatccactgcagcggctacctgaagatccggcagtacagcctggacatgagcccctttgatggctgctaccagaatgtgggcctggtggccgtgggccacagcctgccccccagcgctgtgacagagatcaagctgcacagcaacatgttcatgttccgggccagcctggacatgaagctgatcttcctggacagccgggtggccgagctgaccggctatgagccccaggacctgattgagaagaccctgtaccaccacgtgcacggctgtgacaccttccacctgcgctgtgcccaccacctgctgctggtgaagggccaggtgaccaccaagtactaccgcttcctggccaagcatggaggctgggtgtgggtgcagagctatgccaccatcgtgcacaacagccgcagcagccggccccactgcatcgtgtctgtgaactacgtgctgacagacacagagtacaagggcctgcagctgagcctggaccagatcagcgccagcaagccagccttctcctacaccagcagcagcacccccaccatgacagacaacagaaaaggagccaagagccggctgagcagcagcaagagcaagagcaggaccagcccctacccccagtacagcggcttccacacagagaggtctgagagtgaccatgacagccagtggggcggcagccccctgacagacacagccagcccccagctgctggaccctgctgaccggcccggcagccagcatgatgccagctgtgcctaccggcagttcagtgacaggagcagcctgtgctacggctttgccctggaccacagccggctggtggaggagcggcacttccacacccaggcctgtgagggcggccgctgtgaggccggccgctacttcctgggcaccccccaggccggccgggagccctggtggggcagccgggccgccctgcccctgaccaaggccagccctgagagccgggaggcctatgagaacagcatgccccacatcgcctctgtgcaccgcatccacggccggggccactgggatgaggacagcgtggtgagcagcccagaccccggcagcgccagcgagagcggggaccgctacagaacagagcagtaccagagcagcccccatgagcccagcaagattgagaccctcatccgggccacccagcagatgatcaaggaggaggagaaccggctgcagctgaggaaggcccccagcgaccagctggccagcatcaacggggccggcaagaagcacagcctgtgctttgccaactaccagcagcccccacccactggagaggtgtgccacggcagcgccctggccaacaccagcccctgtgaccacatccagcagcgggagggcaagatgctgagcccccatgaaaatgactatgacaacagccccacagccctgagccgcatcagcagccccaacagcgaccgcatcagcaagagcagcctcatcctggccaaggactacctgcacagcgacatcagcccccaccagacagctggggaccaccccaccgtgagccccaactgcttcggcagccaccggcagtactttgacaagcacgcctacaccctgaccggctacgccctggagcacctgtatgacagcgagaccatccggaactacagcctgggctgcaatggcagccactttgatgtgaccagccacctgaggatgcagcctgaccctgcccagggccacaagggcaccagcgtcatcatcaccaacggcagctag

SEQ ID NO: 169844 - DNA, 2301 bp, synthetic construct; identical to SEQ ID NO: 169843
  misc_feature 1..2301: note = Description of Artificial Sequence: Synthetic coding sequence
  source 1..2301: mol_type = other DNA

SEQ ID NO: 169845 - DNA, 2004 bp, synthetic construct
  misc_feature 1..2004: note = Description of Artificial Sequence: Synthetic coding sequence
  source 1..2004: mol_type = other DNA
atgaaggagaagagcaagaatgctgccaagacccggcgggagaaggaaaatggagagttctatgagctggccaagctgctgcccctgcccagcgccatcaccagccagctggacaaggccagcatcatccggctgaccaccagctacctgaagatgagagctgtgtttcctgagggcctgggagatgcctggggccagcccagccgggccggccccctggatggagtggccaaggagctgggcagccacctgctgcagaccctggatggctttgtgtttgtggtggccagtgatggcaagatcatgtacatcagcgagacagcctctgtgcacctgggcctgagccaggtggagctgaccggcaacagcatctatgagtacatccaccccagcgaccatgatgagatgacagctgtgctgacagcccaccagcccctgcaccaccacctgctgcaggagtatgaaattgaaagaagcttcttcctgaggatgaagtgtgtgctggccaagagaaatgccggcctgacctgcagcggctacaaggtgatccactgcagcggctacctgaagatccggcagtacatgctggacatgagcctgtatgacagctgctaccagatcgtgggcctggtggccgtgggccagagcctgccccccagcgccatcacagagatcaagctgtacagcaacatgttcatgttccgggccagcctggacctgaagctgatcttcctggacagccgggtgacagaggtgacaggctatgagccccaggacctgattgagaagaccctgtaccaccacgtgcacggctgtgatgtgttccacctgcgctatgcccaccacctgctgctggtgaagggccaggtgaccaccaagtactaccgcctgctgagcaagaggggcggctgggtgtgggtgcagagctatgccaccgtggtgcacaacagccgcagcagccggccccactgcatcgtgtctgtgaactacgtgctgacagaaattgagtacaaggagctgcagctgagcctggagcaggtgtccacagccaagagccaggacagctggaggacagccctgagcaccagccaggagaccaggaagctggtgaagcccaagaacaccaagatgaagaccaagctgcggaccaacccctacccaccccagcagtacagcagcttccagatggacaagctggagtgtggccagctgggcaactggagggccagccccccagccagcgctgctgcccctcctgagctgcagccccacagcgagagcagtgacctgctgtacacccccagctacagcctgcccttctcctaccactacggccacttccccctggacagccacgtgttcagcagcaagaagcccatgctgcctgccaagtttggccagccccagggcagcccctgtgaggtggcccgcttcttcctgagcaccctgcctgccagcggggagtgccagtggcactacgccaaccccctggtgcccagcagcagcagccctgccaagaaccccccagagcccccagccaacacagcccggcacagcctggtgcccagctatgaggccccagctgctgctgtgagaagatttggagaggacacagccccacccagcttccccagctgtggccactaccgggaggagcccgccctgggccctgccaaggccgcccggcaggccgccagagatggagcccggctggccctggcccgggccgcccctgagtgctgtgccccacccaccccagaggcccctggggccccagcccagctgccctttgtgctgctgaactaccaccgggtgctggcccggcggggccccctgggcggggccgccccagctgccagcggcctggcctgtgcccctgggggccctgaggccgccactggagccctgcggctgcggcaccccagccctgctgccaccagccccccaggggcccccctgccccactacctgggcgccagcgtcatcatcaccaatggaagatag

SEQ ID NO: 169846 - DNA, 1713 bp, synthetic construct
  misc_feature 1..1713: note = Description of Artificial Sequence: Synthetic coding sequence
  source 1..1713: mol_type = other DNA
atgaaggagaagagcaagaatgctgccaagacccggcgggagaaggaaaatggagagttctatgagctggccaagctgctgcccctgcccagcgccatcaccagccagctggacaaggccagcatcatccggctgaccaccagctacctgaagatgagagctgtgtttcctgagggcctgggagatgcctggggccagcccagccgggccggccccctggatggagtggccaaggagctgggcagccacctgctgcagaccctggatggctttgtgtttgtggtggccagtgatggcaagatcatgtacatcagcgagacagcctctgtgcacctgggcctgagccaggtggagctgaccggcaacagcatctatgagtacatccaccccagcgaccatgatgagatgacagctgtgctgacagcccaccagcccctgcaccaccacctgctgcaggagtatgaaattgaaagaagcttcttcctgaggatgaagtgtgtgctggccaagagaaatgccggcctgacctgcagcggctacaaggtgatccactgcagcggctacctgaagatccggcagtacatgctggacatgagcctgtatgacagctgctaccagatcgtgggcctggtggccgtgggccagagcctgccccccagcgccatcacagagatcaagctgtacagcaacatgttcatgttccgggccagcctggacctgaagctgatcttcctggacagccgggtgacagaggtgacaggctatgagccccaggacctgattgagaagaccctgtaccaccacgtgcacggctgtgatgtgttccacctgcgctatgcccaccacctgctgctggtgaagggccaggtgaccaccaagtactaccgcctgctgagcaagaggggcggctgggtgtgggtgcagagctatgccaccgtggtgcacaacagccgcagcagccggccccactgcatcgtgtctgtgaactacgtgctgacagaaattgagtacaaggagctgcagctgagcctggagcaggtgtccacagccaagagccaggacagctggaggacagccctgagcaccagccaggagaccaggaagctggtgaagcccaagaacaccaagatgaagaccaagctgcggaccaacccctacccaccccagcagtacagcagcttccagatggacaagctggagtgtggccagctgggcaactggagggccagccccccagccagcgctgctgcccctcctgagctgcagccccacagcgagagcagtgacctgctgtacacccccagctacagcctgcccttctcctaccactacggccacttccccctggacagccacgtgttcagcagcaagaagcccatgctgcctgccaagtttggccagccccagggcagcccctgtgaggtggcccgcttcttcctgagcaccctgcctgccagcggggagtgccagtggcactacgccaaccccctggtgcccagcagcagcagccctgccaagaaccccccagagcccccagccaacacagcccggcacagcctggtgcccagctatgagggcggcagcggcctgctggtgggcaaggtgggcggcctgaggacagctggcagccgcagcagccatggaggcggctggcagatggagacagagcccagccgcttcggccagacctgccccctgagcgccagcaagtag

SEQ ID NO: 169847 - DNA, 447 bp, synthetic construct
  misc_feature 1..447: note = Description of Artificial Sequence: Synthetic coding sequence
  source 1..447: mol_type = other DNA
atgttcagaagacctgtgctgcaggtgctgcggcagtttgtgagacatgagagcgagaccaccaccagcctggtgctggagaggagcctgaacagagtgcacctgctgggccgggtgggccaggaccctgtgctgcggcaggtggagggcaagaaccctgtgaccatcttcagcctggccaccaatgagatgtggaggtctggggacagcgaggtgtaccagctgggagatgtgtcccagaagaccacctggcaccgcatcagcgtcttccggcccggcctgagagatgtggcctaccagtatgtgaagaagggcagccgcatctacctggagggcaagattgattatggagagtacatggacaagaacaacgtgcggcggcaggccaccaccatcatcgctgacaacatcatcttcctgagtgaccagaccaaggagaaggagtag

SEQ ID NO: 169848 - DNA, 366 bp, synthetic construct
  misc_feature 1..366: note = Description of Artificial Sequence: Synthetic coding sequence
  source 1..366: mol_type = other DNA
atgttcagaagacctgtgctgcaggtgctgcggcagtttgtgagacatgagagcgagaccaccaccagcctggtgctggagaggagcctgaacagagtgcacctgctgggccgggtgggccaggaccctgtgctgcggcaggtggagggcaagaaccctgtgaccatcttcagcctggccaccaatgagatgtggaggtctggggacagcgaggtgtaccagctgggagatgtgtcccagaagaccacctggcaccgcatcagcgtcttccggcccggcctgagagatgtggcctaccagtatgtgaagaagggcagccgcatctacctggagggcaagattgattatggagagtacatggactag

SEQ ID NO: 169849 - DNA, 447 bp, synthetic construct; identical to SEQ ID NO: 169847
  misc_feature 1..447: note = Description of Artificial Sequence: Synthetic coding sequence
  source 1..447: mol_type = other DNA

SEQ ID NO: 169850 - DNA, 408 bp, synthetic construct
  misc_feature 1..408: note = Description of Artificial Sequence: Synthetic coding sequence
  source 1..408: mol_type = other DNA
atgttcagaagacctgtgctgcaggtgctgcggcagtttgtgagacatgagagcgagaccaccaccagcctggtgctggagaggagcctgaacagagtgcacctgctgggccgggtgggccaggaccctgtgctgcggcaggtggagggcaagaaccctgtgaccatcttcagcctggccaccaatgagatgtggaggtctggggacagcgaggtgtaccagctgggagatgtgtcccagaagaccacctggcaccgcatcagcgtcttccggcccggcctgagagatgtggcctaccagtatgtgaagaagggcagccgcatctacctggagggcaagattgattatggagagtacatggacaagaacaacgtgcggcggcaggccaccaccatcatcgctgactag

SEQ ID NO: 169851 - DNA, 87 bp, synthetic construct
  misc_feature 1..87: note = Description of Artificial Sequence: Synthetic coding sequence
  source 1..87: mol_type = other DNA
atgttcagaagacctgtgctgcaggtgctgcggcagtttgtgagacatgagagcgagaccaccaccagcctggtgctggagaggtag

SEQ ID NO: 169852 - DNA, 447 bp, synthetic construct; identical to SEQ ID NO: 169847
  misc_feature 1..447: note = Description of Artificial Sequence: Synthetic coding sequence
  source 1..447: mol_type = other DNA

SEQ ID NO: 169853 - DNA, 447 bp, synthetic construct; identical to SEQ ID NO: 169847
  misc_feature 1..447: note = Description of Artificial Sequence: Synthetic coding sequence
  source 1..447: mol_type = other DNA

SEQ ID NO: 169854 - DNA, 447 bp, synthetic construct; identical to SEQ ID NO: 169847
  misc_feature 1..447: note = Description of Artificial Sequence: Synthetic coding sequence
  source 1..447: mol_type = other DNA

SEQ ID NO: 169855 - DNA, 1086 bp, synthetic construct
  misc_feature 1..1086: note = Description of Artificial Sequence: Synthetic coding sequence
  source 1..1086: mol_type = other DNA
atgtatggcaagggcaagagcaacagcagcgctgtgcccagcgacagccaggcccgggagaagctggccctgtatgtgtatgagtacctgctgcacgtgggcgcccagaagagcgcccagaccttcctgtctgagatccgctgggagaagaacatcaccctgggggagcccccaggcttcctgcacagctggtggtgtgtgttctgggacctgtactgtgccgcccctgagcggcgggagacctgtgagcacagcagcgaggccaaggccttccatgactacagcgctgctgctgcccccagccctgtgctgggcaacatccccccaggagatggcatgcctgtgggccctgtgcccccaggcttcttccagcccttcatgagcccccgctacccaggcggccccaggcctcccctgcgcatccccaaccaggccctgggcggcgtgcccggcagccagcccctgctgcccagcggcatggaccccacccggcagcagggccaccccaacatgggcggccccatgcagaggatgaccccaccccggggcatggtgcccctgggcccccagaactacggcggggccatgaggcctcccctgaatgccctgggcggccctggcatgcctggcatgaacatgggccctgggggcggccggccctggcccaaccccaccaatgccaacagcatcccctacagcagcgccagccctggcaactacgtgggccccccaggcggcggcggccccccaggcacccccatcatgcccagccctgctgacagcaccaacagcggggacaacatgtacaccctgatgaatgctgtgcccccaggccccaaccggcccaacttccccatgggccctggcagtgatggccccatgggcggcctgggcggcatggagagccaccacatgaatggcagcctgggcagcggggacatggacagcatcagcaagaacagccccaacaacatgagcctgagcaaccagcccggcaccccaagagatgatggagagatgggcggcaacttcctgaaccccttccagagcgagagctacagccccagcatgaccatgtctgtgtag

SEQ ID NO: 169856 - DNA, 945 bp, synthetic construct
  misc_feature 1..945: note = Description of Artificial Sequence: Synthetic coding sequence
  source 1..945: mol_type = other DNA
atgggcaagaacatcaccctgggggagcccccaggcttcctgcacagctggtggtgtgtgttctgggacctgtactgtgccgcccctgagcggcgggagacctgtgagcacagcagcgaggccaaggccttccatgactacagcgctgctgctgcccccagccctgtgctgggcaacatccccccaggagatggcatgcctgtgggccctgtgcccccaggcttcttccagcccttcatgagcccccgctacccaggcggcccccggccccccctgcgcatccccaaccaggccctgggcggcgtgcccggcagccagcccctgctgcccagcggcatggaccccacccggcagcagggccaccccaacatgggcggccccatgcagaggatgaccccaccccggggcatggtgcccctgggcccccagaactatggaggagccatgaggcctcccctgaatgccctgggcggccctggcatgcctggcatgaacatgggccctgggggcggccggccctggcccaaccccaccaatgccaacagcatcccctacagcagcgccagccctggcaactacgtgggccccccaggcggcggcggccccccaggcacccccatcatgcccagccctgctgacagcaccaacagcggggacaacatgtacaccctgatgaatgctgtgcccccaggccccaaccggcccaacttccccatgggccctggcagtgatggccccatgggcggcctgggcggcatggagagccaccacatgaatggcagcctgggcagcggggacatggacagcatcagcaagaacagccccaacaacatgagcctgagcaaccagcccggcaccccaagagatgatggagagatgggcggcaacttcctgaaccccttccagagcgagagctacagccccagcatgaccatgtctgtgtag

SEQ ID NO: 169857 - DNA, 1026 bp, synthetic construct
  misc_feature 1..1026: note = Description of Artificial Sequence: Synthetic coding sequence
  source 1..1026: mol_type = other DNA
atgtatggcaagggcaagagcaacagcagcgctgtgcccagcgacagccaggcccgggagaagctggccctgtatgtgtatgagtacctgctgcacgtgggcgcccagaagagcgcccagaccttcctgtctgagatccgctgggagaagaacatcaccctgggggagcccccaggcttcctgcacagctggtggtgtgtgttctgggacctgtactgtgccgcccctgagcggcgggagacctgtgagcacagcagcgaggccaaggccttccatgactacagcgctgctgctgcccccagccctgtgctgggcaacatccccccaggagatggcatgcctgtgggccctgtgcccccaggcttcttccaggccctgggcggcgtgcccggcagccagcccctgctgcccagcggcatggaccccacccggcagcagggccaccccaacatgggcggccccatgcagaggatgaccccaccccggggcatggtgcccctgggcccccagaactacggcggggccatgaggcctcccctgaatgccctgggcggccctggcatgcctggcatgaacatgggccctgggggcggccggccctggcccaaccccaccaatgccaacagcatcccctacagcagcgccagccctggcaactacgtgggccccccaggcggcggcggccccccaggcacccccatcatgcccagccctgctgacagcaccaacagcggggacaacatgtacaccctgatgaatgctgtgcccccaggccccaaccggcccaacttccccatgggccctggcagtgatggccccatgggcggcctgggcggcatggagagccaccacatgaatggcagcctgggcagcggggacatggacagcatcagcaagaacagccccaacaacatgagcctgagcaaccagcccggcaccccaagagatgatggagagatgggcggcaacttcctgaaccccttccagagcgagagctacagccccagcatgaccatgtctgtgtag

SEQ ID NO: 169858 - DNA, 1200 bp, synthetic construct
  misc_feature 1..1200: note = Description of Artificial Sequence: Synthetic coding sequence
  source 1..1200: mol_type = other DNA
atggccttctggggctggagggctgctgctgccctgcggctgtggggccgggtggtggagcgggtggaggccggcggcggcgtgggccccttccaggcctgtggctgccgcctggtgctgggcggcagagatgatgtgtctgctggcctgcggggcagccacggggcccggggggagcccctggaccctgcccggcccctgcagaggcctcccaggcctgaggtgccccgggccttccggcggcagcccagggctgctgcccccagcttcttcttcagcagcatcaagggcggcagaagaagcatctccttctctgtgggcgccagctctgtggtgggcagcggcggcagcagtgacaagggcaagctgagcctgcaggatgtggccgagctgatccgggcccgggcctgccagagggtggtggtgatggtgggcgccggcatcagcacccccagcggcatcccagacttccgcagccctggcagcggcctgtacagcaacctgcagcagtatgacctgccctacccagaggccatctttgagctgcccttcttcttccacaaccccaagcccttcttcaccctggccaaggagctgtacccaggcaactacaagcccaacgtgacccactacttcctgcggctgctgcatgacaagggcctgctgctgcggctgtacacccagaacattgatggcctggagcgggtgtctggcatcccagccagcaagctggtggaggcccacggcacctttgccagcgccacctgcaccgtgtgccagaggcccttccctggagaggacatccgggcagatgtgatggctgacagagtgccccgctgccctgtgtgcaccggggtggtgaagccagacatcgtgttcttcggggagcccctgccccagcgcttcctgctgcacgtggtggacttccccatggctgacctgctgctgatcctgggcaccagcctggaggtggagccctttgccagcctgacagaagctgtgcgcagctctgtgccccggctgctgatcaacagagacctggtgggccccctggcctggcaccccaggagcagagatgtggcccagctgggagatgtggtgcacggcgtggagagcctggtggagctgctgggctggacagaggagatgagggacctggtgcagcgggagaccgggaagctggatggccctgacaagtag

SEQ ID NO: 169859 - DNA, 957 bp, synthetic construct
  misc_feature 1..957: note = Description of Artificial Sequence: Synthetic coding sequence
  source 1..957: mol_type = other DNA
atggccttctggggctggagggctgctgctgccctgcggctgtggggccgggtggtggagcgggtggaggccggcggcggcgtgggccccttccaggcctgtggctgccgcctggtgctgggcggcagagatgatgatgtggccgagctgatccgggcccgggcctgccagagggtggtggtgatggtgggcgccggcatcagcaccccatctggcatcccagacttccgcagccctggcagcggcctgtacagcaacctgcagcagtatgacctgccctacccagaggccatctttgagctgcccttcttcttccacaaccccaagcccttcttcaccctggccaaggagctgtacccaggcaactacaagcccaacgtgacccactacttcctgcggctgctgcatgacaagggcctgctgctgcggctgtacacccagaacattgatggcctggagcgggtgtctggcatcccagccagcaagctggtggaggcccacggcacctttgccagcgccacctgcaccgtgtgccagaggcccttccctggagaggacatccgggcagatgtgatggctgacagagtgccccgctgccctgtgtgcacaggagtggtgaagccagacatcgtgttctttggagagcccctgccccagcgcttcctgctgcacgtggtggacttccccatggctgacctgctgctgatcctgggcaccagcctggaggtggagccctttgccagcctgacagaggccgtgcgcagctctgtgccccggctgctgatcaacagagacctggtgggccccctggcctggcaccccaggagcagagatgtggcccagctgggagatgtggtgcatggagtggagagcctggtggagctgctgggctggacagaggagatgagggacctggtgcagcgggagaccgggaagctggatggccctgacaagtag

SEQ ID NO: 169860 - DNA, 774 bp, synthetic construct
  misc_feature 1..774: note = Description of Artificial Sequence: Synthetic coding sequence
  source 1..774: mol_type = other DNA
atggtgggcgccggcatcagcacccccagcggcatcccagacttccgcagccctggcagcggcctgtacagcaacctgcagcagtatgacctgccctacccagaggccatctttgagctgcccttcttcttccacaaccccaagcccttcttcaccctggccaaggagctgtacccaggcaactacaagcccaacgtgacccactacttcctgcggctgctgcatgacaagggcctgctgctgcggctgtacacccagaacattgatggcctggagcgggtgtctggcatcccagccagcaagctggtggaggcccacggcacctttgccagcgccacctgcaccgtgtgccagaggcccttccctggagaggacatccgggcagatgtgatggctgacagagtgccccgctgccctgtgtgcaccggggtggtgaagccagacatcgtgttcttcggggagcccctgccccagcgcttcctgctgcacgtggtggacttccccatggctgacctgctgctgatcctgggcaccagcctggaggtggagccctttgccagcctgacagaagctgtgcgcagctctgtgccccggctgctgatcaacagagacctggtgggccccctggcctggcaccccaggagcagagatgtggcccagctgggagatgtggtgcacggcgtggagagcctggtggagctgctgggctggacagaggagatgagggacctggtgcagcgggagaccgggaagctggatggccctgacaagtag

SEQ ID NO: 169861 - DNA, 945 bp, synthetic construct
  misc_feature 1..945: note = Description of Artificial Sequence: Synthetic coding sequence
  source 1..945: mol_type = other DNA
atgaagatgagctttgccctgaccttccgcagcgccaagggccgctggatcgccaaccccagccagccctgcagcaaggccagcatcggcctgtttgtgcctgccagcccccccctggaccctgagaaggtgaaggagctgcagcgcttcatcaccctgagcaagaggctgctggtgatgactggagctggcatcagcacagaaagtggcatcccagactacagaagtgagaaggtgggcctgtatgccaggacagacagaagacccatccagcacggggactttgtgcgcagcgcccccatccggcagcgctactgggccaggaactttgtgggctggccccagttcagcagccaccagcccaacccagcccactgggccctgagcacctgggagaagctgggcaagctgtactggctggtgacccagaatgtggatgccctgcacaccaaggccggcagccggcggctgacagagctgcacggctgcatggacagagtgctgtgcctggactgtggggagcagaccccccggggcgtgctgcaggagcgcttccaggtgctgaaccccacctggagcgctgaggcccacggcctggccccagatggagatgtgttcctgtctgaggagcaggtgcgctccttccaggtgcccacctgtgtgcagtgtggcggccacctgaagccagatgtggtgttcttcggggacacagtgaacccagacaaggtggactttgtgcacaagagggtgaaggaggccgacagcctgctggtggtgggcagcagcctgcaggtgtacagcggctaccgcttcatcctgacagcctgggagaagaagctgcccatcgccatcctgaacatcggccccaccaggagtgatgacctggcctgcctgaagctgaacagccgctgtggggagctgctgcccctgattgacccctgctag

SEQ ID NO: 169862 - DNA, 879 bp, synthetic construct
  misc_feature 1..879: note = Description of Artificial Sequence: Synthetic coding sequence
  source 1..879: mol_type = other DNA
atgaggcccctgcagatcgtgcccagccgcctcatcagccagctgtactgcggcctgaagcccccagccagcaccaggaaccagatctgcctgaagatggcccggcccagcagctccatggctgacttcaggaagttctttgccaaggccaagcacatcgtcatcatctctggagctggggtgtctgctgagagcggcgtgcccaccttcagaggagctgggggctactggaggaagtggcaggcccaggacctggccacccccctggcctttgcccacaaccccagccgggtgtgggagttctaccactacagaagagaggtgatgggcagcaaggagcccaatgccggccaccgggccatcgcagaatgtgagacccggctgggcaagcagggcagaagagtggtggtgatcacccagaacattgatgagctgcacaggaaggccggcaccaagaacctgctggagatccacggcagcctcttcaagacccgctgcaccagctgtggggtggtggccgagaactacaagagccccatctgcccagccctgagcggcaagggctgtgaggaggccggctgcggcggcctgctgcggccccacgtggtgtggtttggagagaacctggaccctgccatcctggaggaggtggaccgggagctggcccactgtgacctgtgcctggtggtgggcaccagctctgtggtgtacccagctgccatgtttgccccccaggtggccgcccggggcgtgcctgtggccgagttcaacacagagaccaccccagccaccaaccgcttccgcttccacttccagggcccctgtggcaccaccctgcctgaggccctggcctgccatgaaaatgagaccgtgtcctag

SEQ ID NO: 169863 - DNA, 933 bp, synthetic construct
  misc_feature 1..933: note = Description of Artificial Sequence: Synthetic coding sequence
  source 1..933: mol_type = other DNA
atgaggcccctgcagatcgtgcccagccgcctcatcagccagctgtactgcggcctgaagcccccagccagcaccaggaaccagatctgcctgaagatggcccggcccagcagctccatggctgacttcaggaagttctttgccaaggccaagcacatcgtcatcatctctggagctggggtgtctgctgagagcggcgtgcccaccttcagaggagctgggggctactggaggaagtggcaggcccaggacctggccacccccctggcctttgcccacaaccccagccgggtgtgggagttctaccactacagaagagaggtgatgggcagcaaggagcccaatgccggccaccgggccatcgcagaatgtgagacccggctgggcaagcagggcagaagagtggtggtgatcacccagaacattgatgagctgcacaggaaggccggcaccaagaacctgctggagatccacggcagcctcttcaagacccgctgcaccagctgtggggtggtggccgagaactacaagagccccatctgcccagccctgtctggaaaaggagcccctgagcccggcacccaggatgccagcatccctgtggagaagctgccccgctgtgaggaggccggctgcggcggcctgctgcggccccacgtggtgtggtttggagagaacctggaccctgccatcctggaggaggtggaccgggagctggcccactgtgacctgtgcctggtggtgggcaccagctctgtggtgtacccagctgccatgtttgccccccaggtggccgcccggggcgtgcctgtggccgagttcaacacagagaccaccccagccaccaaccgcttccgcttccacttccagggcccctgtggcaccaccctgcctgaggccctggcctgccatgaaaatgagaccgtgtcctag

SEQ ID NO: 169864 - DNA, 900 bp, synthetic construct
  misc_feature 1..900: note = Description of Artificial Sequence: Synthetic coding sequence
  source 1..900: mol_type = other DNA
atgaggcccctgcagatcgtgcccagccgcctcatcagccagctgtactgcggcctgaagcccccagccagcaccaggaaccagatctgcctgaagatggcccggcccagcagctccatggctgacttcaggaagttctttgccaaggccaagcacatcgtcatcatctctggagctggggtgtctgctgagagcggcgtgcccaccttcagaggagctgggggctactggaggaagtggcaggcccaggacctggccacccccctggcctttgcccacaaccccagccgggtgtgggagttctaccactacagaagagaggtgatgggcagcaaggagcccaatgccggccaccgggccatcgcagaatgtgagacccggctgggcaagcagggcagaagagtggtggtgatcacccagaacattgatgagctgcacaggaaggccggcaccaagaacctgctggagatccacggcagcctcttcaagacccgctgcaccagctgtggggtggtggccgagaactacaagagccccatctgcccagccctgtctggaaaaggagcccctgagcccggcacccaggatgccagcatccctgtggagaagctgccccgctgtgaggaggccggctgcggcggcctgctgcggccccacgtggtgtggtttggagagaacctggaccctgccatcctggaggaggtggaccgggagctggcccactgtgacctgtgcctggtggtgggcaccagctctgtggtgtacccagctgccatgtttgccccccaggtggccgcccggggcgtgcctgtggccgagttcaacacagagaccaccccagccaccaaccgcttcagccacctgatcagcatcagcagcctcatcatcatcaagaactag

SEQ ID NO: 169865 - DNA, 609 bp, synthetic construct
  misc_feature 1..609: note = Description of Artificial Sequence: Synthetic coding sequence
  source 1..609: mol_type = other DNA
atgggcagcaaggagcccaatgccggccaccgggccatcgcagaatgtgagacccggctgggcaagcagggcagaagagtggtggtgatcacccagaacattgatgagctgcacaggaaggccggcaccaagaacctgctggagatccacggcagcctcttcaagacccgctgcaccagctgtggggtggtggccgagaactacaagagccccatctgcccagccctgtctggaaaaggagcccctgagcccggcacccaggatgccagcatccctgtggagaagctgccccgctgtgaggaggccggctgcggcggcctgctgcggccccacgtggtgtggtttggagagaacctggaccctgccatcctggaggaggtggaccgggagctggcccactgtgacctgtgcctggtggtgggcaccagctctgtggtgtacccagctgccatgtttgccccccaggtggccgcccggggcgtgcctgtggccgagttcaacacagagaccaccccagccaccaaccgcttccgcttccacttccagggcccctgtggcaccaccctgcctgaggccctggcctgccatgaaaatgagaccgtgtcctag

SEQ ID NO: 169866 - DNA, 1203 bp, synthetic construct
  misc_feature 1..1203: note = Description of Artificial Sequence: Synthetic coding sequence
  source 1..1203: mol_type = other DNA
atggctgctgggggcctgagccgctctgagaggaaggctgctgagcgggtgcggcggctgcgggaggagcagcagcgggagcggctgcggcaggtgagccgcatcctgaggaaggctgctgctgagaggtctgctgaggagggccgcctgctggccgagagcgctgacctggtgacagagctgcagggccgcagcagaagaagagagggcctgaagaggcggcaggaggaggtgtgtgatgatcctgaggagctgcggggcaaggtgcgggagctggccagcgctgtgagaaatgccaagtacctggtggtgtacaccggggccggcatcagcacagctgccagcatcccagactaccggggccccaatggagtgtggaccctgctgcagaagggccgctctgtgtctgctgctgacctgtctgaggccgagcccaccctgacccacatgagcatcacccggctgcacgagcagaagctggtgcagcacgtggtgtcccagaactgtgatggcctgcacctgcggagcggcctgcccaggacagccatcagcgagctgcacggcaacatgtacatcgaggtgtgcaccagctgtgtgcccaaccgggagtatgtgcgggtgtttgatgtgacagagaggacagccctgcaccgccaccagacaggccgcacctgccacaagtgtggcacccagctgcgggacaccatcgtgcactttggagagcggggcaccctgggccagcccctgaactgggaggccgccacagaagctgccagcagagctgacaccatcctgtgcctgggcagcagcctgaaggtgctgaagaagtacccccggctgtggtgcatgaccaagccacccagcagaagacccaagctgtacatcgtgaacctgcagtggacccccaaggatgactgggccgccctgaagctgcacggcaaatgtgatgatgtgatgaggctgctgatggccgagctgggcctggagatcccagcctacagccgctggcaggaccccatcttcagcctggccacccccctgcgggccggggaggagggcagccacagcaggaagagcctgtgccgcagccgggaggaggcccctcctggggacagaggagcccccctgagcagcgcccccatcctgggcggctggtttggccggggctgcaccaagaggaccaagaggaagaaggtgacctag

SEQ ID NO: 169867 - DNA, 963 bp, synthetic construct
  misc_feature 1..963: note = Description of Artificial Sequence: Synthetic coding sequence
  source 1..963: mol_type = other DNA
atgcctggcccccggcggcgcagccccagcgcctgcccccaggtgagccgcatcctgaggaaggctgctgctgagaggtctgctgaggagggccgcctgctggccgagagcgctgacctggtgacagagctgcagggccgcagcagaagaagagagggcctgaagaggcggcaggaggaggtgtgtgatgatcctgaggagctgcggggcaaggtgcgggagctggccagcgctgtgagaaatgccaagtacctggtggtgtacacaggagctggcatcagcacagctgccagcatcccagactaccggggccccaacggggtgtggaccctgctgcagaagggccgctctgtgtctgctgctgacctgtctgaggccgagcccaccctgacccacatgagcatcacccggctgcacgagcagaagctggtgcagcacgtggtgtcccagaactgtgatggcctgcacctgcggagcggcctgcccaggacagccatcagcgagctgcacggcaacatgtacatcgaggtgtgcaccagctgtgtgcccaaccgggagtatgtgcgggtgtttgatgtgacagagaggacagccctgcaccgccaccagacaggccgcacctgccacaagtgtggcacccagctgcgggacaccatcgtgcactttggagagcggggcaccctgggccagcccctgaactgggaggccgccacagaggccgccagcagagctgacaccatcctgtgcctgggcagcagcctgaaggtgctgaagaagtacccccggctgtggtgcatgaccaagccacccagccggcggcccaagctgtacatcgtgaacctgcagtggacccccaaggatgactgggccgccctgaagctgcatggaaaatgtgatgatgtgatgaggctgctgatggccgagctgggcctggagatcccagcctacagccgggtgctgtag

SEQ ID NO: 169868 - DNA, 855 bp, synthetic construct
  misc_feature 1..855: note = Description of Artificial Sequence: Synthetic coding sequence
  source 1..855: mol_type = other DNA
atgtccatgctgcccagctttggcttcacccaggagcaggtggcctgtgtgtgtgaggtgctgcagcagggcggcaacctggagcggctgggccgcttcctgtggagcctgcctgcctgtgaccacctgcacaagaatgaatctgtgctgaaggccaaggctgtggtggccttccaccggggcaacttccgggagctgtacaagatcctggagagccaccagttcagcccccacaaccaccccaagctgcagcagctgtggctgaaggcccactacgtggaggccgagaagctgcggggccggcccctgggcgctgtgggcaagtacagagtgcggaggaagttccccctgcccaggaccatctgggatggagaggagaccagctactgcttcaaggagaagagcagaggagtgctgcgggagtggtacgcccacaacccctaccccagcccccgggagaagcgggagctggccgaggccaccggcctgaccaccacccaggtgagcaactggttcaagaacagacggcagagggacagagctgctgaggccaaggagcgggagaacacagagaacaacaacagcagcagcaacaagcagaaccagctgagccccctggagggcggcaagcccctgatgagcagcagcgaggaggagttcagccccccccagagcccagaccagaacagcgtgctgctgctgcagggcaacatgggccacgcccggagcagcaactacagcctgcccggcctgacagccagccagcccagccacggcctgcagacccaccagcaccagctgcaggacagcctgctgggccccctgaccagcagcctggtggacctgggcagctag

SEQ ID NO: 169869 - DNA, 876 bp, synthetic construct
  misc_feature 1..876: note = Description of Artificial Sequence: Synthetic coding sequence
  source 1..876: mol_type = other DNA
atgtccatgctgcccaccttcggcttcacccaggagcaggtggcctgtgtgtgtgaggtgctgcagcagggcggcaacatcgagcggctgggccgcttcctgtggagcctgcctgcctgtgagcacctgcacaagaatgaatctgtgctgaaggccaaggctgtggtggccttccaccggggcaacttccgggagctgtacaagatcctggagagccaccagttcagcccccacaaccacgccaagctgcagcagctgtggctgaaggcccactacattgaagctgagaagctgcggggccggcccctgggcgctgtgggcaagtacagagtgcggaggaagttccccctgcccaggagcatctgggatggagaggagaccagctactgcttcaaggagaagagccgctctgtgctgcgggagtggtacgcccacaacccctaccccagcccccgggagaagcgggagctggccgaggccaccggcctgaccaccacccaggtgagcaactggttcaagaacagacggcagagggacagagctgctgaggccaaggagcgggagaacaatgaaaacagcaacagcaacagccacaaccccctgaatggcagcggcaagtctgtgctgggcagcagtgaagatgagaagaccccatctggcaccccagaccacagcagcagcagccctgccctgctgctgagccccccacctcctggcctgcccagcctgcacagcctgggccaccccccaggccccagcgctgtgcctgtgcctgtgcctgggggcggcggcgctgaccccctgcagcaccaccacggcctgcaggacagcatcctgaaccccatgtctgccaacctggtggacctgggcagctag

SEQ ID NO: 169870 - DNA, 999 bp, synthetic construct
  misc_feature 1..999: note = Description of Artificial Sequence: Synthetic coding sequence
  source 1..999: mol_type = other DNA
atggtgttccgcagccccctggacctgtacagcagccacttcctgctgcccaactttgctgacagccaccacaggagcatcctgctggccagcagcggcggcggcaatggagctgggggcggcggcggggccggcggcggcagcggcggcggcaatggagctgggggcggcggggccggcggggccggcggcggcggcggcggcggcagccgggcccctcctgaggagctgtccatgttccagctgcccaccctgaacttcagccctgagcaggtggcctctgtgtgtgagaccctggaggagaccggggacatcgagcggctgggccgcttcctgtggagcctgcctgtggcccctggggcctgtgaggccatcaacaagcatgagagcatcctgcgggcccgggctgtggtggccttccacacaggcaacttccgggacctgtaccacatcctggagaaccacaagttcaccaaggagagccacggcaagctgcaggccatgtggctggaggcccactaccaggaggccgagaagctgcggggccggcccctgggccctgtggacaagtacagagtgaggaagaagttccccctgcccaggaccatctgggatggagagcagaagacccactgcttcaaggagaggaccaggagcctgctgcgggagtggtacctgcaggacccctaccccaaccccagcaagaagcgggagctggcccaggccaccggcctgacccccacccaggtgggcaactggttcaagaacagacggcagagggacagagctgctgctgccaagaaccggctgcagcaccaggccatcggccccagcggcatgaggagcctggccgagcccggctgccccacccacggcagcgctgagagccccagcacagctgccagccccaccacctctgtgagcagcctgacagaaagagctgacaccggcaccagcatcctgtctgtgaccagcagtgacagtgaatgtgatgtgtag

SEQ ID NO: 169871 - DNA, 1020 bp, synthetic construct; identical to SEQ ID NO: 149700
  misc_feature 1..1020: note = Description of Artificial Sequence: Synthetic coding sequence
  source 1..1020: mol_type = other DNA

SEQ ID NO: 169872 - DNA, 2220 bp, synthetic construct
  misc_feature 1..2220: note = Description of Artificial Sequence: Synthetic coding sequence
  source 1..2220: mol_type = other DNA
atggccaccctgcctgctgagcccagcgctggccctgctgctggaggagaggccgtggccgctgctgctgccacagaggaggaggaggaggaggcccggcagctgctgcagaccctgcaggccgctgagggggaggccgctgctgctgctggggccggggccggggctgctgctgctggagctgagggccctggcagccctggggtgcccggcagccccccagaggccgccagcgagccccccaccggcctgcgcttcagccctgagcaggtggcctgtgtgtgtgaggccctgctgcaggccggccacgccggccgcctgagccgcttcctgggcgccctgcccccagctgagcggctgcggggcagtgaccctgtgctgcgggcccgggccctggtggccttccagagaggagaatatgcagagctgtaccgcctgctggagagccggcccttccctgctgcccaccacgccttcctgcaggacctgtacctgcgggcccgctaccacgaggccgagcgggcccggggccgggccctgggcgctgtggacaagtaccgcctgaggaagaagttccccctgcccaagaccatctgggatggagaggagaccgtgtactgcttcaaggagaggagccgggccgccctgaaggcctgctaccggggcaaccgctaccccaccccagatgagaagaggcggctggccaccctgaccggcctgagcctgacccaggtgagcaactggttcaagaacagacggcagagggacagaactggagctgggggcggggccccctgcaagtctgagagtgatggcaaccccaccacagaagatgagagcagccgcagccctgaggacctggagagaggagctgcccctgtgtctgctgaggccgccgcccagggcagcatcttcctggccggcactggacctccagccccctgcccagccagcagcagcatcctggtgaatggcagcttcctggccgccagcggcagccctgctgtgctgctgaatggaggccctgtgatcatcaatggcctggccctgggggaggccagcagcctgggccccctgctgctgaccggcggcggcggggcccccccaccccagcccagcccccagggcgccagcgagaccaagaccagcctggtgctggacccccagacaggagaggtgcggctggaggaggcccagagcgaggcccctgagaccaagggggcccaggtggccgcccctggccctgccctgggggaggaggtgctgggccccctggcccaggtggtgcccggccccccaacagctgccaccttccccctgcccccaggccctgtgcctgctgtggccgccccccaggtggtgcccctgagccccccacctggctaccccaccggcctgagccccaccagccccctgctgaacctgccccaggtggtgcccaccagccaggtggtgaccctgccccaggccgtgggccccctgcagctgctggccgccggccctggcagccctgtgaaggtggccgctgctgctggccctgccaacgtgcacctgatcaacagcggcgtgggcgtgacagccctgcagctgcccagcgccacagcccctggcaacttcctgctggccaaccctgtgtctggcagccccatcgtgactggagtggccctgcagcagggcaagatcatcctgacagccaccttccccacctccatgctggtgtcccaggtgctgcccccagcccctggcctggccctgcccctgaagccagagacagccatctctgtgcctgagggcggcctgcctgtggcccccagccctgccctgcctgaggcccacgccctgggcaccctgagcgcccagcagcccccacctgctgctgccaccaccagcagcaccagcctgcccttctccccagacagccctggcctgctgcccaacttccctgcccctcctcctgagggcctgatgctgagccctgctgctgtgcctgtgtggagcgctggcctggagctgtctgctggaacagagggcctgctggaggccgagaagggcctgggcacccaggccccccacacagtgctgcggctgcctgaccctgaccctgagggcctgctgctgggcgccacagctggaggagaggtggatgagggcctggaggccgaggccaaggtgctgacccagctgcagagcgtgcctgtggaggagcccctggagctgtag

SEQ ID NO: 169873 - DNA, 741 bp, synthetic construct
  misc_feature 1..741: note = Description of Artificial Sequence: Synthetic coding sequence
  source 1..741: mol_type = other DNA
atgttccagctgcccatcctgaacttcagcccccagcaggtggccggcgtgtgtgagaccctggaggagagcggagatgtggagcggctgggccgcttcctgtggagcctgcctgtggccccagctgcctgtgaggccctgaacaagaatgaatctgtgctgcgggcccgggccatcgtggccttccatggaggcaactaccgggagctgtaccacatcctggagaaccacaagttcaccaaggagagccacgccaagctgcaggccctgtggctggaggcccactaccaggaggccgagaagctgcggggccggcccctgggccctgtggacaagtacagagtgaggaagaagttccccctgcccaggaccatctgggatggagagcagaagacccactgcttcaaggagaggaccaggcacctgctgcgggagtggtacctgcaggacccctaccccaaccccagcaagaagcgggagctggcccaggccaccggcctgacccccacccaggtgggcaactggttcaagaacagacggcagagggacagagctgctgctgccaagaaccggctgcagcagcaggtgctgagccagggcagcggccgggccctgcgggcagaaggagatggcaccccagaggtgctgggcgtggccaccagccctgctgccagcctgagcagcaaggccgccaccagcgccatcagcatcaccagcagtgacagtgaatgtgacatctag

SEQ ID NO: 169874 - DNA, 360 bp, synthetic construct
  misc_feature 1..360: note = Description of Artificial Sequence: Synthetic coding sequence
  source 1..360: mol_type = other DNA
atgacccagcagggcgccgccctgcagaactacaacaatgagctggtgaagtgcatcgaggagctgtgccagaagcgggaggagctgtgccggcagatccaggaggaggaggatgagaagcagaggctgcagaatgaggtgcggcagctgacagagaagctggcccgggtgaatgaaaacctggccaggaagatcgccagcagaaatgaatttgacaggaccatcgccgagacagaggccgcctacctgaagatcctggagagcagccagaccctgctgtctgtgctgaagcgggaggccggcaacctgaccaaggccacagccccagaccagaagagcagcggcggccgggacagctag

SEQ ID NO: 169875 - DNA, 666 bp, synthetic construct
  misc_feature 1..666: note = Description of Artificial Sequence: Synthetic coding sequence
  source 1..666: mol_type = other DNA
atgctgtggctgttccagagcctgctgtttgtgttctgcttcggccctggccagctgaggaacatccaggtgaccaaccacagccagctgttccagaacatgacctgtgagctgcacctgacctgcagcgtggaggatgctgatgacaacgtgtccttccgctgggaggccctgggcaacaccctgagcagccagcccaacctgactgtgtcctgggacccccgcatcagcagcgagcaggactacacctgcatcgcagaaaatgctgtgagcaacctgtccttctctgtgtctgcccagaagctgtgtgaagatgtgaagatccagtacacagacaccaagatgatcctcttcatggtgtctggcatctgcatcgtgtttggcttcatcatcctgctgctgctggtgctgaggaagaggcgggacagcctgagcctgagcacccagaggacccagggccctgctgagagcgccaggaacctggagtatgtgtctgtgagccccaccaacaacacagtgtatgcctctgtgacccacagcaaccgggagacagagatctggaccccaagagaaaatgacaccatcaccatctacagcaccatcaaccacagcaaggagagcaagcccaccttcagccgggccacagccctggacaacgtggtgtag

SEQ ID NO: 169876 - DNA, 999 bp, synthetic construct
  misc_feature 1..999: note = Description of Artificial Sequence: Synthetic coding sequence
  source 1..999: mol_type = other DNA
atgctgtggctgttccagagcctgctgtttgtgttctgcttcggccctggaaatgtggtgtcccagagcagcctgacccccctgatggtgaatggcatcctgggggagagcgtgaccctgcccctggagttccctgctggggagaaggtgaacttcatcacctggctgttcaatgagaccagcctggccttcatcgtgccccatgagaccaagagccctgagatccacgtgaccaaccccaagcagggcaagaggctgaacttcacccagagctacagcctgcagctgagcaacctgaagatggaggacaccggcagctaccgggcccagatcagcaccaagaccagcgccaagctgagcagctacaccctgcgcatcctgcggcagctgaggaacatccaggtgaccaaccacagccagctgttccagaacatgacctgtgagctgcacctgacctgcagcgtggaggatgctgatgacaacgtgtccttccgctgggaggccctgggcaacaccctgagcagccagcccaacctgactgtgtcctgggacccccgcatcagcagcgagcaggactacacctgcatcgccgagaatgctgtgagcaacctgtccttctctgtgtctgcccagaagctgtgtgaagatgtgaagatccagtacacagacaccaagatgatcctcttcatggtgtctggcatctgcatcgtgtttggcttcatcatcctgctgctgctggtgctgaggaagagaagagacagcctgagcctgagcacccagaggacccagggccctgctgagagcgccaggaacctggagtatgtgtctgtgagccccaccaacaacacagtgtatgcctctgtgacccacagcaaccgggagacagagatctggaccccccgggagaatgacaccatcaccatctacagcaccatcaaccacagcaaggagagcaagcccaccttcagccgggccacagccctggacaacgtggtgtag

SEQ ID NO: 169877 - DNA, 996 bp, synthetic construct
  misc_feature 1..996: note = Description of Artificial Sequence: Synthetic coding sequence
  source 1..996: mol_type = other DNA
atgctgtggctgttccagagcctgctgtttgtgttctgcttcggccctggaaatgtggtgtcccagagcagcctgacccccctgatggtgaatggcatcctgggggagagcgtgaccctgcccctggagttccctgctggggagaaggtgaacttcatcacctggctgttcaatgagaccagcctggccttcatcgtgccccatgagaccaagagccctgagatccacgtgaccaaccccaagcagggcaagaggctgaacttcacccagagctacagcctgcagctgagcaacctgaagatggaggacaccggcagctaccgggcccagatcagcaccaagaccagcgccaagctgagcagctacaccctgcgcatcctgcggcagctgaggaacatccaggtgaccaaccacagccagctgttccagaacatgacctgtgagctgcacctgacctgcagcgtggaggatgctgatgacaacgtgtccttccgctgggaggccctgggcaacaccctgagcagccagcccaacctgactgtgtcctgggacccccgcatcagcagcgagcaggactacacctgcatcgccgagaatgctgtgagcaacctgtccttctctgtgtctgcccagaagctgtgtgaagatgtgaagatccagtacacagacaccaagatgatcctcttcatggtgtctggcatctgcatcgtgtttggcttcatcatcctgctgctgctggtgctgaggaagagaagagacagcctgagcctgagcacccagaggacccagggccctgagagcgccaggaacctggagtatgtgtctgtgagccccaccaacaacacagtgtatgcctctgtgacccacagcaaccgggagacagagatctggaccccaagagaaaatgacaccatcaccatctacagcaccatcaaccacagcaaggagagcaagcccaccttcagccgggccacagccctggacaacgtggtgtag

SEQ ID NO: 169878 - DNA, 891 bp, synthetic construct
  misc_feature 1..891: note = Description of Artificial Sequence: Synthetic coding sequence
  source 1..891: mol_type = other DNA
atggccggcagccccacctgcctgaccctcatctacatcctgtggcagctgaccggcagcgctgccagcggccctgtgaaggagctggtgggctctgtgggcggcgctgtgaccttccccctgaagagcaaggtgaagcaggtggacagcatcgtgtggaccttcaacaccacccccctggtgaccatccagcctgagggcggcaccatcatcgtgacccagaacagaaaccgggagcgggtggacttcccagatggcggctacagcctgaagctgagcaagctgaagaagaatgacagcggcatctactacgtgggcatctacagcagcagcctgcagcagcccagcacccaggagtatgtgctgcacgtgtatgagcacctgagcaagcccaaggtgaccatgggcctgcagagcaacaagaatggcacctgtgtgaccaacctgacctgctgcatggagcacggggaggaggatgtgatctacacctggaaggccctgggccaggccgccaatgaaagccacaacggcagcatcctgcccatctcctggcgctggggcgagagtgacatgaccttcatctgtgtggccaggaaccctgtgtccaggaacttcagcagccccatcctggccaggaagctgtgtgagggcgctgctgatgatcctgacagctccatggtgctgctgtgcctgctgctggtgcccctgctgctgagcctgtttgtgctgggcctcttcctgtggttcctgaagcgggagcggcaggaggagaacaaccccaagggccgcagcagcaaatatggcctgctgcactgcggcaacacagagaaggatggcaagagccccctgacagcccatgatgcccggcacaccaaggccatctgcctgtag

SEQ ID NO: 169879 - DNA, 687 bp, synthetic construct
  misc_feature 1..687: note = Description of Artificial Sequence: Synthetic coding sequence
  source 1..687: mol_type = other DNA
atggccggcagccccacctgcctgaccctcatctacatcctgtggcagctgacagagcacctgagcaagcccaaggtgaccatgggcctgcagagcaacaagaatggcacctgtgtgaccaacctgacctgctgcatggagcacggggaggaggatgtgatctacacctggaaggccctgggccaggccgccaatgaaagccacaacggcagcatcctgcccatctcctggcgctggggcgagagtgacatgaccttcatctgtgtggccagaaatcctgtgtccaggaacttcagcagccccatcctggccaggaagctgtgtgagggcgctgctgatgatcctgacagctccatggtgctgctgtgcctgctgctggtgcccctgctgctgagcctgtttgtgctgggcctcttcctgtggttcctgaagcgggagcggcaggaggagtacatcgaggagaagaagagggtggacatctgccgggagacccccaacatctgcccccacagcggagaaaatacagaatatgacaccatcccccacaccaacagaaccatcctgaaggaggaccctgccaacacagtgtacagcacagtggagatccccaagaagatggagaacccccacagcctgctgaccatgccagacaccccccggctgtttgcctatgaaaatgtcatctag

SEQ ID NO: 169880 - DNA, 1008 bp, synthetic construct
  misc_feature 1..1008: note = Description of Artificial Sequence: Synthetic coding sequence
  source 1..1008: mol_type = other DNA
atggccggcagccccacctgcctgaccctcatctacatcctgtggcagctgaccggcagcgctgccagcggccctgtgaaggagctggtgggctctgtgggcggcgctgtgaccttccccctgaagagcaaggtgaagcaggtggacagcatcgtgtggaccttcaacaccacccccctggtgaccatccagcctgagggcggcaccatcatcgtgacccagaacagaaaccgggagcgggtggacttcccagatggcggctacagcctgaagctgagcaagctgaagaagaatgacagcggcatctactacgtgggcatctacagcagcagcctgcagcagcccagcacccaggagtatgtgctgcacgtgtatgagcacctgagcaagcccaaggtgaccatgggcctgcagagcaacaagaatggcacctgtgtgaccaacctgacctgctgcatggagcacggggaggaggatgtgatctacacctggaaggccctgggccaggccgccaatgaaagccacaacggcagcatcctgcccatctcctggcgctggggcgagagtgacatgaccttcatctgtgtggccaggaaccctgtgtccaggaacttcagcagccccatcctggccaggaagctgtgtgagggcgctgctgatgatcctgacagctccatggtgctgctgtgcctgctgctggtgcccctgctgctgagcctgtttgtgctgggcctcttcctgtggttcctgaagcgggagcggcaggaggagtacatcgaggagaagaagagggtggacatctgccgggagacccccaacatctgcccccacagcggggagaacacagaatatgacaccatcccccacaccaacagaaccatcctgaaggaggaccctgccaacacagtgtacagcacagtggagatccccaagaagatggagaacccccacagcctgctgaccatgccagacaccccccggctgtttgcctatgaaaatgtcatctag

SEQ ID NO: 169881 - DNA, 615 bp, synthetic construct
  misc_feature 1..615: note = Description of Artificial Sequence: Synthetic coding sequence
  source 1..615: mol_type = other DNA
atggccggcagccccacctgcctgaccctcatctacatcctgtggcagctgaccggcagcgctgccagcggccctgtgaaggagctggtgggctctgtgggcggcgctgtgaccttccccctgaagagcaaggtgaagcaggtggacagcatcgtgtggaccttcaacaccacccccctggtgaccatccagcctgagggcggcaccatcatcgtgacccagaacagaaaccgggagcgggtggacttcccagatggcggctacagcctgaagctgagcaagctgaagaagaatgacagcggcatctactacgtgggcatctacagcagcagcctgcagcagcccagcacccaggagtatgtgctgcacgtgtatgagtacatcgaggagaagaagagggtggacatctgccgggagacccccaacatctgcccccacagcggagaaaatacagaatatgacaccatcccccacaccaacagaaccatcctgaaggaggaccctgccaacacagtgtacagcacagtggagatccccaagaagatggagaacccccacagcctgctgaccatgccagacaccccccggctgtttgcctatgaaaatgtcatctag

SEQ ID NO: 169882 - DNA, 498 bp, synthetic construct
  misc_feature 1..498: note = Description of Artificial Sequence: Synthetic coding sequence
  source 1..498: mol_type = other DNA
atggccggcagccccacctgcctgaccctcatctacatcctgtggcagctgaccggcagcgctgccagcggccctgtgaaggagctggtgggctctgtgggcggcgctgtgaccttccccctgaagagcaaggtgaagcaggtggacagcatcgtgtggaccttcaacaccacccccctggtgaccatccagcctgagggcggcaccatcatcgtgacccagaacagaaaccgggagcgggtggacttcccagatggcggctacagcctgaagctgagcaagctgaagaagaatgacagcggcatctactacgtgggcatctacagcagcagcctgcagcagcccagcacccaggagtatgtgctgcacgtgtatgagaacaaccccaagggccgcagcagcaaatatggcctgctgcactgcggcaacacagagaaggatggcaagagccccctgacagcccatgatgcccggcacaccaaggccatctgcctgtag

SEQ ID NO: 169883 - DNA, 450 bp, synthetic construct
  misc_feature 1..450: note = Description of Artificial Sequence: Synthetic coding sequence
  source 1..450: mol_type = other DNA
atggccggcagccccacctgcctgaccctcatctacatcctgtggcagctgacagagcacctgagcaagcccaaggtgaccatgggcctgcagagcaacaagaatggcacctgtgtgaccaacctgacctgctgcatggagcacggggaggaggatgtgatctacacctggaaggccctgggccaggccgccaatgaaagccacaacggcagcatcctgcccatctcctggcgctggggcgagagtgacatgaccttcatctgtgtggccagaaatcctgtgtccaggaacttcagcagccccatcctggccaggaagctgtgtgaggagaacaaccccaagggccgcagcagcaaatatggcctgctgcactgcggcaacacagagaaggatggcaagagccccctgacagcccatgatgcccggcacaccaaggccatctgcctgtag

SEQ ID NO: 169884 - DNA, 567 bp, synthetic construct
  misc_feature 1..567: note = Description of Artificial Sequence: Synthetic coding sequence
  source 1..567: mol_type = other DNA
atggccggcagccccacctgcctgaccctcatctacatcctgtggcagctgacagagcacctgagcaagcccaaggtgaccatgggcctgcagagcaacaagaatggcacctgtgtgaccaacctgacctgctgcatggagcacggggaggaggatgtgatctacacctggaaggccctgggccaggccgccaatgaaagccacaacggcagcatcctgcccatctcctggcgctggggcgagagtgacatgaccttcatctgtgtggccagaaatcctgtgtccaggaacttcagcagccccatcctggccaggaagctgtgtgaggagtacatcgaggagaagaagagggtggacatctgccgggagacccccaacatctgcccccacagcggagaaaatacagaatatgacaccatcccccacaccaacagaaccatcctgaaggaggaccctgccaacacagtgtacagcacagtggagatccccaagaagatggagaacccccacagcctgctgaccatgccagacaccccccggctgtttgcctatgaaaatgtcatctag

SEQ ID NO: 169885 - DNA, 858 bp, synthetic construct
  misc_feature 1..858: note = Description of Artificial Sequence: Synthetic coding sequence
  source 1..858: mol_type = other DNA
atggtgatgaggcccctgtggagcctgctgctgtgggaggccctgctgcccatcaccgtgactggagcccaggtgctgagcaaggtgggcggctctgtgctgctggtggccgcccggcccccaggcttccaggtgcgggaggccatctggaggagcctgtggcccagcgaggagctgctggccaccttcttccggggcagcctggagaccctgtaccacagccgcttcctgggccgggcccagctgcacagcaacctgagcctggagctgggccccctggagagcggggacagcggcaacttctctgtgctgatggtggacacccggggccagccctggacccagaccctgcagctgaaggtgtatgatgctgtgcccaggcctgtggtgcaggtgttcatcgctgtggagagagatgcccagcccagcaagacctgccaggtgttcctgagctgctgggcccccaacatcagcgagatcacctacagctggaggcgggagaccaccatggactttggcatggagccccacagcctcttcacagatggccaggtgctgagcatcagcctgggccctggggacagagatgtggcctacagctgcatcgtgagcaaccctgtgtcctgggacctggccaccgtgaccccctgggacagctgccaccacgaggccgcccctgggaaggccagctacaaggatgtgctgctggtggtggtgcctgtgtccctgctgctgatgctggtgaccctcttcagcgcctggcactggtgcccctgcagcggcaagaagaagaaggatgtgcatgctgacagagtgggccctgagacagagaaccccctggtgcaggacctgccctag

SEQ ID NO: 169886 - DNA, 531 bp, synthetic construct
  misc_feature 1..531: note = Description of Artificial Sequence: Synthetic coding sequence
  source 1..531: mol_type = other DNA
atggtgatgaggcccctgtggagcctgctgctgtgggaggatgctgtgcccaggcctgtggtgcaggtgttcatcgctgtggagagagatgcccagcccagcaagacctgccaggtgttcctgagctgctgggcccccaacatcagcgagatcacctacagctggaggcgggagaccaccatggactttggcatggagccccacagcctcttcacagatggccaggtgctgagcatcagcctgggccctggggacagagatgtggcctacagctgcatcgtgagcaaccctgtgtcctgggacctggccaccgtgaccccctgggacagctgccaccatgaagctgcccctgggaaggccagctacaaggatgtgctgctggtggtggtgcctgtgtccctgctgctgatgctggtgaccctcttcagcgcctggcactggtgcccctgcagcggcaagaagaagaaggatgtgcacgccgacagagtgggccctgagacagagaaccccctggtgcaggacctgccctag

SEQ ID NO: 169887 - DNA, 444 bp, synthetic construct
  misc_feature 1..444: note = Description of Artificial Sequence: Synthetic coding sequence
  source 1..444: mol_type = other DNA
atgggcggccgccaccacctgcagaggcaggtgtctgagagcatgtctgccctcttccaggccgtgcggctggagagcgcctgggccgacagagtgcgctacatggtggtggtgtacagcagcggccggcaggacacagaggagaacatcctgctgggcgtggacttcagcagcaaggagagcggcttctctgtgtccacagctggccgcatgcacatcttcaagcctgtgtctgtgcaggccatgtggagcgccctgcaggtgctgcacaaggcctgtgaggtggcccggcggcacaactacttccctggaggagtggccctgatctgggccacctactatgagagctgcatcagcagcgagcagagctgcatcaatgagtggaatgccatgcaggacctggagagcaccaggccagacagccctgccctgtttgtggactag

SEQ ID NO: 169888 - DNA, 2112 bp, synthetic construct
  misc_feature 1..2112: note = Description of Artificial Sequence: Synthetic coding sequence
  source 1..2112: mol_type = other DNA
atggcccgggccaggagagctgtggtgggctctgtgagagatgtgtccacagctgccaccaacctcttctacttcacagacttctgcatcttcctgcagcccacccactgcttctgctgcccagaggtgagcagcagcaactacctgtctgagagcttcttcatggtgaagggagctgccctcttcctgcagcagggcagcagcccccagggccagaggagcctgcagcacccccacaagcacgccggggacctgccccagcacctgcaggtgatgatcaacctgctgcgctgtgaagatcgcatcaagctggccgtgcggctggagagcgcctgggccgacagagtgcgctacatggtggtggtgtacagcagcggccggcaggacacagaggagaacatcctgctgggcgtggacttcagcagcaaggagagcaagagctgcaccatcggcatggtgctgcggctgtggagcgacaccaagatccacctggatggagatggcggcttctctgtgtccacagctggccgcatgcacatcttcaagcctgtgtctgtgcaggccatgtggagcgccctgcaggtgctgcacaaggcctgtgaggtggcccggcggcacaactacttccctgggggcgtggccctgatctgggccacctactatgagagctgcatcagcagcgagcagagctgcatcaatgagtggaatgccatgcaggacctggagagcaccaggccagacagccctgccctgtttgtggacaagcccacagaaggagagaggacagagcggctcatcaaggccaagctgcggagcatcatgatgagccaggacctggagaatgtgaccagcaaggagatcagaaatgagctggagaagcagatgaactgcaacctgaaggagctgaaggagttcatcgacaatgagatgctgctgatcctgggccagatggacaagcccagcctcatctttgaccacctgtacctgggcagcgagtggaatgccagcaacctggaggagctgcagggcagcggcgtggactacatcctgaatgtgacccgggagattgacaacttcttccctggcctgtttgcctaccacaacatccgggtgtatgatgaggagaccacagacctgctggcccactggaatgaggcctaccacttcatcaacaaggccaagaggaaccacagcaagtgcctggtgcactgcaagatgggcgtgagccgcagcgccagcaccgtcatcgcctatgccatgaaggagtttggctggcccctggagaaggcctacaactacgtgaagcagaagaggagcatcacccggcccaatgccggcttcatgaggcagctgtctgaatatgagggcatcctggatgccagcaagcagaggcacaacaagctgtggaggcagcagacagacagcagcctgcagcagcctgtggatgatcctgctggccctggggacttcctgcctgagaccccagatggcaccccagagagccagctgcccttcctggatgatgctgcccagcccggcctgggcccccccctgccctgctgcttccggcggctgagtgaccccctgctgcccagcccagaagatgaaacaggcagcctggtgcacctggaggaccctgagcgggaggccctgctggaggaggccgcccctcctgctgaggtgcacaggcctgcccggcagccccagcagggcagcggcctgtgtgagaaggatgtgaagaagaagctggagtttggcagccccaagggccgcagcggcagcctgctgcaggtggaggagacagagcgggaggagggcctgggcgccggccgctggggccagctgcccacccagctggaccagaacctgctgaacagcgagaacctgaacaacaacagcaagaggagctgccccaacggcatggaggtgggccgggcccggcctgctggctggcacacccccagcctgcccagccacagcaactggcccaccagcgcctctgtggtgggcaccaccggcaccaggcaccacacccagctgatcttcttctactgcctgctgtgggcccccagcagccacctgcagggccctgagggcagcttcaccggctag

SEQ ID NO: 169889 - DNA, 3150 bp, synthetic construct
  misc_feature 1..3150: note = Description of Artificial Sequence: Synthetic coding sequence
  source 1..3150: mol_type = other DNA
atggccctggtgaccctgcagaggagccccaccccatctgctgccagcagcagcgccagcaacagcgagctggaggccggcagcgaggaggacaggaagctgaacctgagcctgtctgagagcttcttcatggtgaagggggccgccctcttcctgcagcagggcagcagcccccagggccagaggagcctgcagcacccccacaagcatgctggggacctgccccagcacctgcaggtgatgatcaacctgctgcgctgtgaggaccgcatcaagctggccgtgcggctggagagcgcctgggccgacagagtgcgctacatggtggtggtgtacagcagcggccggcaggacacagaggagaacatcctgctgggcgtggacttcagcagcaaggagagcaagagctgcaccatcggcatggtgctgcggctgtggagcgacaccaagatccacctggatggagatggcggcttctctgtgtccacagctggccgcatgcacatcttcaagcctgtgtctgtgcaggccatgtggagcgccctgcaggtgctgcacaaggcctgtgaggtggcccggcggcacaactacttccctggaggagtggccctgatctgggccacctactatgagagctgcatcagcagcgagcagagctgcatcaatgagtggaatgccatgcaggacctggagagcaccaggccagacagccctgccctgtttgtggacaagcccacagaaggagagaggacagagcggctcatcaaggccaagctgcggagcatcatgatgagccaggacctggagaatgtgaccagcaaggagatcagaaatgagctggagaagcagatgaactgcaacctgaaggagctgaaggagttcatcgacaatgagatgctgctgatcctgggccagatggacaagcccagcctcatctttgaccacctgtacctgggcagcgagtggaatgccagcaacctggaggagctgcagggcagcggcgtggactacatcctgaatgtgacccgggagattgacaacttcttccctggcctgtttgcctaccacaacatccgggtgtatgatgaggagaccacagacctgctggcccactggaatgaggcctaccacttcatcaacaaggccaagaggaaccacagcaagtgcctggtgcactgcaagatgggcgtgagccgcagcgccagcacagtgattgcctatgccatgaaggagtttggctggcccctggagaaggcctacaactacgtgaagcagaagaggagcatcacccggcccaatgccggcttcatgaggcagctgtctgaatatgagggcatcctggatgccagcaagcagaggcacaacaagctgtggaggcagcagacagacagcagcctgcagcagcctgtggatgatcctgctggccctggggacttcctgcctgagaccccagatggcaccccagagagccagctgcccttcctggatgatgctgcccagcccggcctgggcccccccctgccctgctgcttccggcggctgagtgaccccctgctgcccagcccagaagatgagaccggcagcctggtgcacctggaggaccctgagcgggaggccctgctggaggaggccgcccccccagctgaggtgcacaggcctgcccggcagccccagcagggcagcggcctgtgtgagaaggatgtgaagaagaagctggagtttggcagccccaagggccgcagcggcagcctgctgcaggtggaggagacagagcgggaggagggcctgggcgccggccgctggggccagctgcccacccagctggaccagaacctgctgaacagcgagaacctgaacaacaacagcaagaggagctgccccaacggcatggaggatgatgccatcttcggcatcctgaacaaggtgaagcccagctacaagagctgtgccgactgcatgtaccccacagccagcggggcccctgaggccagccgggagcgctgtgaggaccccaatgccccagccatctgcacccagcctgccttcctgccccacatcaccagcagccctgtggcccacctggccagccgcagccgggtgcctgagaagccagccagcggccccacagagcccccacccttcctgcccccagctggcagcagaagagctgacaccagcggccctggggccggggccgccctggagcccccagccagcctgctggagcccagccgggagacccccaaggtgctgcccaagagcctgctgctgaagaacagccactgtgacaagaacccccccagcacagaggtggtgatcaaggaggagagcagccccaagaaggacatgaagccagccaaggacctgcggctgctcttcagcaatgaaagtgagaagcccaccaccaacagctacctgatgcagcaccaggagagcatcatccagctgcagaaggccggcctggtgaggaagcacaccaaggagctggagcggctgaagtctgtgcctgctgaccctgccccacccagcagagatggccctgccagccggctggaggccagcatccctgaggagagccaggaccctgctgccctgcacgagctgggccccctggtgatgcccagccaggccggcagtgatgagaagtctgaggccgccccagccagcctggagggcggcagcctgaagagccccccacccttcttctaccgcctggaccacaccagcagcttcagcaaggacttcctgaagaccatctgctacacccccaccagcagctccatgagcagcaacctgaccaggagcagcagcagtgacagcatccacagcgtgcggggcaagccaggcctggtgaagcagaggacccaggagattgagacccggctgcggctggccggcctgactgtgagcagccccctgaagaggagccacagcctggccaagctgggcagcctgaccttcagcacagaggacctgagcagcgaggccgaccccagcacagtggccgacagccaggacaccaccctgtctgagagcagcttcctgcacgagccccagggcaccccccgggaccctgctgccaccagcaagcccagcggcaagccagcccctgagaacctgaagagccccagctggatgagcaagagctag

SEQ ID NO: 169890 - DNA, 2214 bp, synthetic construct
  misc_feature 1..2214: note = Description of Artificial Sequence: Synthetic coding sequence
  source 1..2214: mol_type = other DNA
atgcgctgctacctgtcctgggaccgctggaccagcccccccctgagcagcatcatcttcatctctgtggactacatcctgaatgtgacccgggagattgacaacttcttccctggcctgtttgcctaccacaacatccgggtgtatgatgaggagaccacagacctgctggcccactggaatgaggcctaccacttcatcaacaaggccaagaggaaccacagcaagtgcctggtgcactgcaagatgggcgtgagccgcagcgccagcacagtgattgcctatgccatgaaggagtttggctggcccctggagaaggcctacaactacgtgaagcagaagaggagcatcacccggcccaatgccggcttcatgaggcagctgtctgaatatgagggcatcctggatgccagcaagcagaggcacaacaagctgtggaggcagcagacagacagcagcctgcagcagcctgtggatgatcctgctggccctggggacttcctgcctgagaccccagatggcaccccagagagccagctgcccttcctggatgatgctgcccagcccggcctgggcccccccctgccctgctgcttccggcggctgagtgaccccctgctgcccagcccagaagatgagaccggcagcctggtgcacctggaggaccctgagcgggaggccctgctggaggaggccgcccccccagctgaggtgcacaggcctgcccggcagccccagcagggcagcggcctgtgtgagaaggatgtgaagaagaagctggagtttggcagccccaagggccgcagcggcagcctgctgcaggtggaggagacagagcgggaggagggcctgggcgccggccgctggggccagctgcccacccagctggaccagaacctgctgaacagcgagaacctgaacaacaacagcaagaggagctgccccaacggcatggaggatgatgccatcttcggcatcctgaacaaggtgaagcccagctacaagagctgtgccgactgcatgtaccccacagccagcggggcccctgaggccagccgggagcgctgtgaggaccccaatgccccagccatctgcacccagcctgccttcctgccccacatcaccagcagccctgtggcccacctggccagccgcagccgggtgcctgagaagccagccagcggccccacagagcccccacccttcctgcccccagctggcagcagaagagctgacaccagcggccctggggccggggccgccctggagcccccagccagcctgctggagcccagccgggagacccccaaggtgctgcccaagagcctgctgctgaagaacagccactgtgacaagaacccccccagcacagaggtggtgatcaaggaggagagcagccccaagaaggacatgaagccagccaaggacctgcggctgctcttcagcaatgaaagtgagaagcccaccaccaacagctacctgatgcagcaccaggagagcatcatccagctgcagaaggccggcctggtgaggaagcacaccaaggagctggagcggctgaagtctgtgcctgctgaccctgccccacccagcagagatggccctgccagccggctggaggccagcatccctgaggagagccaggaccctgctgccctgcacgagctgggccccctggtgatgcccagccaggccggcagtgatgagaagtctgaggccgccccagccagcctggagggcggcagcctgaagagccccccacccttcttctaccgcctggaccacaccagcagcttcagcaaggacttcctgaagaccatctgctacacccccaccagcagctccatgagcagcaacctgaccaggagcagcagcagtgacagcatccacagcgtgcggggcaagccaggcctggtgaagcagaggacccaggagattgagacccggctgcggctggccggcctgactgtgagcagccccctgaagaggagccacagcctggccaagctgggcagcctgaccttcagcacagaggacctgagcagcgaggccgaccccagcacagtggccgacagccaggacaccaccctgtctgagagcagcttcctgcacgagccccagggcaccccccgggaccctgctgccaccagcaagcccagcggcaagccagcccctgagaacctgaagagccccagctggatgagcaagagctag

SEQ ID NO: 169891 - DNA, 2079 bp, synthetic construct
  misc_feature 1..2079: note = Description of Artificial Sequence: Synthetic coding sequence
  source 1..2079: mol_type = other DNA
atggccctggtgaccctgcagaggagccccaccccatctgctgccagcagcagcgccagcaacagcgagctggaggccggcagcgaggaggacaggaagctgaacctgagcctgtctgagagcttcttcatggtgaagggggccgccctcttcctgcagcagggcagcagcccccagggccagaggagcctgcagcacccccacaagcatgctggggacctgccccagcacctgcaggtgatgatcaacctgctgcgctgtgaggaccgcatcaagctggccgtgcggctggagagcgcctgggccgacagagtgcgctacatggtggtggtgtacagcagcggccggcaggacacagaggagaacatcctgctgggcgtggacttcagcagcaaggagagcaagagctgcaccatcggcatggtgctgcggctgtggagcgacaccaagatccacctggatggagatggcggcttctctgtgtccacagctggccgcatgcacatcttcaagcctgtgtctgtgcaggccatgtggagcgccctgcaggtgctgcacaaggcctgtgaggtggcccggcggcacaactacttccctggaggagtggccctgatctgggccacctactatgagagctgcatcagcagcgagcagagctgcatcaatgagtggaatgccatgcaggacctggagagcaccaggccagacagccctgccctgtttgtggacaagcccacagaaggagagaggacagagcggctcatcaaggccaagctgcggagcatcatgatgagccaggacctggagaatgtgaccagcaaggagatcagaaatgagctggagaagcagatgaactgcaacctgaaggagctgaaggagttcatcgacaatgagatgctgctgatcctgggccagatggacaagcccagcctcatctttgaccacctgtacctgggcagcgagtggaatgccagcaacctggaggagctgcagggcagcggcgtggactacatcctgaatgtgacccgggagattgacaacttcttccctggcctgtttgcctaccacaacatccgggtgtatgatgaggagaccacagacctgctggcccactggaatgaggcctaccacttcatcaacaaggccaagaggaaccacagcaagtgcctggtgcactgcaagatgggcgtgagccgcagcgccagcacagtgattgcctatgccatgaaggagtttggctggcccctggagaaggcctacaactacgtgaagcagaagaggagcatcacccggcccaatgccggcttcatgaggcagctgtctgaatatgagggcatcctggatgccagcaagcagaggcacaacaagctgtggaggcagcagacagacagcagcctgcagcagcctgtggatgatcctgctggccctggggacttcctgcctgagaccccagatggcaccccagagagccagctgcccttcctggatgatgctgcccagcccggcctgggcccccccctgccctgctgcttccggcggctgagtgaccccctgctgcccagcccagaagatgagaccggcagcctggtgcacctggaggaccctgagcgggaggccctgctggaggaggccgcccccccagctgaggtgcacaggcctgcccggcagccccagcagggcagcggcctgtgtgagaaggatgtgaagaagaagctggagtttggcagccccaagggccgcagcggcagcctgctgcaggtggaggagacagagcgggaggagggcctgggcgccggccgctggggccagctgcccacccagctggaccagaacctgctgaacagcgagaacctgaacaacaacagcaagaggagctgccccaacggcatggaggtgggccgggcccggcctgctggctggcacacccccagcctgcccagccacagcaactggcccaccagcgcctctgtggtgggcaccaccggcaccaggcaccacacccagctgatcttcttctactgcctgctgtgggcccccagcagccacctgcagggccctgagggcagcttcaccggctag

SEQ ID NO: 169892 - DNA, 4272 bp, synthetic construct
  misc_feature 1..4272: note = Description of Artificial Sequence: Synthetic coding sequence
  source 1..4272: mol_type = other DNA
atggccctggtgacagtgcagaggagccccacccccagcaccaccagcagcccctgtgccagcgaggccgacagcggggaggaggagtgccgcagccagcccaggagcatcagcgagagcttcctgactgtgaagggagctgccctcttcctgcccagaggaaatggcagcagcaccccccgcatcagccacagaagaaacaagcacgccggggacctgcagcagcacctgcaggccatgttcatcctgctgcggcctgaggacaacatccggctggccgtgcggctggagagcacctaccagaacagaacccgctacatggtggtggtgtccaccaacggccggcaggacacagaggagagcatcgtgctgggcatggacttcagcagcaatgacagcagcacctgcaccatgggcctggtgctgcccctgtggagcgacaccctcatccacctggatggagatggcggcttctctgtgtccacagacaacagagtgcacatcttcaagcctgtgtctgtgcaggccatgtggagcgccctgcagagcctgcacaaggcctgtgaggtggcccgggcccacaactactacccaggcagcctcttcctgacctgggtgtcctactatgagagccacatcaacagcgaccagagctctgtgaatgagtggaatgccatgcaggatgtgcagagccacaggccagacagccctgccctcttcacagacatccccacagagcgggagaggacagagcggctcatcaagaccaagctgcgggagatcatgatgcagaaggacctggagaacatcaccagcaaggagatcagaacagagctggagatgcagatggtgtgcaacctgcgggagttcaaggagttcatcgacaatgagatgatcgtcatcctgggccagatggacagccccacccagatctttgagcacgtgttcctgggcagcgagtggaatgccagcaacctggaggacctgcagaacagaggagtgcgctacatcctgaatgtgacccgggagattgacaacttcttccctggggtgtttgagtaccacaacatccgggtgtatgatgaggaggccacagacctgctggcctactggaatgacacctacaagttcatcagcaaggccaagaagcacggcagcaagtgcctggtgcactgcaagatgggcgtgagccgcagcgccagcaccgtcatcgcctatgccatgaaggagtatggctggaacctggaccgggcctatgactatgtgaaggagaggagaacagtgaccaagcccaaccccagcttcatgaggcagctggaggagtaccagggcatcctgctggccagcaagcagaggcacaacaagctgtggaggagccacagcgacagcgacctgagtgaccaccacgagcccatctgcaagccaggcctggagctgaacaagaaggacatcaccaccagcgctgaccagattgctgaggtgaagaccatggagagccacccccccatcccccctgtgtttgtggagcacatggtgccccaggatgccaaccagaagggcctgtgcaccaaggagaggatgatctgcctggagttcaccagccgggagttccacgccggccagattgaagatgagctgaacctgaatgacatcaatggctgcagcagcggctgctgcctgaatgaaagcaagttccccctggacaactgccacgccagcaaggccctgatccagcccggccacgtgcctgagatggccaacaagttcccagacctgactgtggaggacctggagacagatgccctgaaggctgacatgaatgtgcacctgctgcccatggaggagctgaccagccccctgaaggacccccccatgagcccagaccctgagagccccagcccccagcccagctgccagacagagatcagtgacttcagcacagacagaattgacttcttcagcgccctggagaagtttgtggagctgagccaggagaccaggagccgctccttcagccacagcaggatggaggagctgggcggcggcagaaatgaaagctgccgcctgtctgtggtggaggtggcccccagcaaggtgacagcagatgaccagaggagcagcagcctgagcaacaccccccacgccagcgaggagagctccatggatgaggagcagagcaaggccatcagcgagctggtgtccccagacatcttcatgcagagccacagtgaaaatgccatctctgtgaaggagatcgtgacagaaattgagagcatcagccagggcgtgggccagatccagctgaagggggacatcctgcccaacccctgccacacccccaagaagaacagcatccacgagctgctgctggagcgggcccagaccccagagaacaagccaggccacatggagcaggatgaggacagctgcacagcccagcctgagctggccaaggacagcggcatgtgcaaccctgagggctgcctgaccacccacagcagcattgctgacctggaggagggggagcctgctgagggggagcaggagctgcagggcagcggcatgcaccctggggccaagtggtacccaggctctgtgagaagagccaccctggagtttgaggagcggctgcggcaggagcaggagcaccacggggccgcccccacctgcaccagcctgagcaccaggaagaacagcaagaatgacagctctgtggccgacctggcccccaagggcaagagtgatgaggcccctcctgagcacagctttgtgctgaaggagcctgagatgagcaagggcaagggcaagtacagcggcagcgaggccggcagcctgagccacagcgagcagaatgccaccgtgcctgccccccgggtgctggagtttgaccacctgcctgacccccaggagggccctggcagtgacaccggcacccagcaggagggcgtgctgaaggacctgaggacagtcatcccctaccaggagagcgagacccaggccgtgcccctgcccctgcccaagagggtggagatcatcgagtacacccacatcgtgaccagccccaaccacacaggccctggcagcgagatcgccaccagcgagaagagcggggagcagggcctgaggaaggtgaacatggagaagtctgtgacagtgctgtgcaccctggatgagaacctgaacagaaccctggaccccaaccaggtgtccctgcacccccaggtgctgcccctgccccacagcagcagccctgagcacaaccggcccacagaccaccccaccagcatcctgagcagcccagaagatcggggcagcagcctgagcacagccctggagacagctgccccctttgtgagccacaccacccacctgctgagcgccagcctggactacctgcacccccagaccatggtgcacctggagggcttcacagagcagagcagcaccacagatgagcccagcgctgagcaggtgtcctgggaggagagccaggagagccccctgagcagcggcagcgaggtgccctacaaggacagccagctgagcagcgctgacctgagcctcatcagcaagctgggggacaacacaggagagctgcaggagaagatggaccccctgcctgtggcctgccgcctgccccacagcagcagcagcgagaacatcaagagcctgagccacagccctggggtggtgaaggagcgggccaaggagattgagagccgggtggtgttccaggccggcctgaccaagcccagccagatgagaagaagtgccagcctggccaagctgggctacctggacctgtgcaaggactgcctgcctgagcgggagcccgccagctgtgagagcccccacctgaagctgctgcagcccttcctgaggacagattctggcatgcacgccatggaggaccaggagagcctggagaaccctggggccccccacaaccctgagcccaccaagagctttgtggagcagctgaccaccacagaatgtattgtgcagagcaagcctgtggagcggcccctggtgcagtatgccaaggagtttggcagcagccagcagtacctgctgcccagggctggcctggagctgaccagcagcgagggcggcctgcctgtgctgcagacccagggcctgcagtgtgcctgcccagcccctggcctggccgtggccccccggcagcagcacggccgcacccaccccctgcggcggctgaagaaggccaatgacaagaagaggaccaccaaccccttctacaacaccatgtag

SEQ ID NO: 169893 - DNA, 609 bp, synthetic construct
  misc_feature 1..609: note = Description of Artificial Sequence: Synthetic coding sequence
  source 1..609: mol_type = other DNA
atgaccctgagcaccctggccaggaagaggaaggcccccctggcctgcacctgcagcctgggcggccctgacatgatcccctacttcagcgccaatgctgtgatcagccagaatgccatcaaccagctgatcagcgagagcttcctgactgtgaagggggccgccctcttcctgcccagaggaaatggcagcagcaccccccgcatcagccacagaagaaacaagcatgctggggacctgcagcagcacctgcaggccatgttcatcctgctgcggcctgaggacaacatccggctggccgtgcggctggagagcacctaccagaacagaacccgctacatggtggtggtgtccaccaacggccggcaggacacagaggagagcatcgtgctgggcatggacttcagcagcaatgacagcagcacctgcaccatgggcctggtgctgcccctgtggagcgacaccctcatccacctggatggagatggcggcttctctgtgtccacagacaacagagtgcacatcttcaagcctgtgtctgtgcaggccatgtgggtggaccgggacagcaggaacaagcactgtgatgtgctgctggtggaggagtag

SEQ ID NO: 169894 - DNA, 1350 bp, synthetic construct
  misc_feature 1..1350: note = Description of Artificial Sequence: Synthetic coding sequence
  source 1..1350: mol_type = other DNA
atggccctggtgacagtgcagaggagccccacccccagcaccaccagcagcccctgtgccagcgaggccgacagcggggaggaggagtgccgcagccagcccaggagcatcagcgagagcttcctgactgtgaagggagctgccctcttcctgcccagaggaaatggcagcagcaccccccgcatcagccacagaagaaacaagcacgccggggacctgcagcagcacctgcaggccatgttcatcctgctgcggcctgaggacaacatccggctggccgtgcggctggagagcacctaccagaacagaacccgctacatggtggtggtgtccaccaacggccggcaggacacagaggagagcatcgtgctgggcatggacttcagcagcaatgacagcagcacctgcaccatgggcctggtgctgcccctgtggagcgacaccctcatccacctggatggagatggcggcttctctgtgtccacagacaacagagtgcacatcttcaagcctgtgtctgtgcaggccatgtggagcgccctgcagagcctgcacaaggcctgtgaggtggcccgggcccacaactactacccaggcagcctcttcctgacctgggtgtcctactatgagagccacatcaacagcgaccagagctctgtgaatgagtggaatgccatgcaggatgtgcagagccacaggccagacagccctgccctcttcacagacatccccacagagcgggagaggacagagcggctcatcaagaccaagctgcgggagatcatgatgcagaaggacctggagaacatcaccagcaaggagatcagaacagagctggagatgcagatggtgtgcaacctgcgggagttcaaggagttcatcgacaatgagatgatcgtcatcctgggccagatggacagccccacccagatctttgagcacgtgttcctgggcagcgagtggaatgccagcaacctggaggacctgcagaacagaggagtgcgctacatcctgaatgtgacccgggagattgacaacttcttccctggggtgtttgagtaccacaacatccgggtgtatgatgaggaggccacagacctgctggcctactggaatgacacctacaagttcatcagcaaggccaagaagcacggcagcaagtgcctggtgcactgcaagatgggcgtgagccgcagcgccagcaccgtcatcgcctatgccatgaaggagtatggctggaacctggaccgggcctatgactatgtgaaggagaggagaacagtgaccaagcccaaccccagcttcatgaggcagctggaggagtaccagggcatcctgctggccaggtag

SEQ ID NO: 169895 - DNA, 4353 bp, synthetic construct
  misc_feature 1..4353: note = Description of Artificial Sequence: Synthetic coding sequence
  source 1..4353: mol_type = other DNA
atggccctggtgacagtgcagaggagccccacccccagcaccaccagcagcccctgtgccagcagcagccacctggaggacagcgagagcgctgccctgctgtgctgtgaatgtgaggagagcgagatcttcacagacagcaatgaggccgacagcggggaggaggagtgccgcagccagcccaggagcatcagcgagagcttcctgactgtgaagggggccgccctcttcctgcccagaggaaatggcagcagcaccccccgcatcagccacagaagaaacaagcatgctggggacctgcagcagcacctgcaggccatgttcatcctgctgcggcctgaggacaacatccggctggccgtgcggctggagagcacctaccagaacagaacccgctacatggtggtggtgtccaccaacggccggcaggacacagaggagagcatcgtgctgggcatggacttcagcagcaatgacagcagcacctgcaccatgggcctggtgctgcccctgtggagcgacaccctcatccacctggatggagatggcggcttctctgtgtccacagacaacagagtgcacatcttcaagcctgtgtctgtgcaggccatgtggagcgccctgcagagcctgcacaaggcctgtgaggtggcccgggcccacaactactacccaggcagcctcttcctgacctgggtgtcctactatgagagccacatcaacagcgaccagagctctgtgaatgagtggaatgccatgcaggatgtgcagagccacaggccagacagccctgccctcttcacagacatccccacagagcgggagaggacagagcggctcatcaagaccaagctgcgggagatcatgatgcagaaggacctggagaacatcaccagcaaggagatcagaacagagctggagatgcagatggtgtgcaacctgcgggagttcaaggagttcatcgacaatgagatgatcgtcatcctgggccagatggacagccccacccagatctttgaacatgtgttcctgggcagcgagtggaatgccagcaacctggaggacctgcagaacagaggagtgcgctacatcctgaatgtgacccgggagattgacaacttcttccctggggtgtttgagtaccacaacatccgggtgtatgatgaggaggccacagacctgctggcctactggaatgacacctacaagttcatcagcaaggccaagaagcacggcagcaagtgcctggtgcactgcaagatgggcgtgagccgcagcgccagcacagtgattgcctatgccatgaaggagtatggctggaacctggaccgggcctatgactatgtgaaggagaggagaacagtgaccaagcccaaccccagcttcatgaggcagctggaggagtaccagggcatcctgctggccagcaagcagaggcacaacaagctgtggaggagccacagcgacagcgacctgagtgaccaccacgagcccatctgcaagccaggcctggagctgaacaagaaggacatcaccaccagcgctgaccagattgctgaggtgaagaccatggagagccacccccccatcccccctgtgtttgtggagcacatggtgccccaggatgccaaccagaagggcctgtgcaccaaggagaggatgatctgcctggagttcaccagccgggagttccacgccggccagattgaagatgagctgaacctgaatgacatcaatggctgcagcagcggctgctgcctgaatgaaagcaagttccccctggacaactgccacgccagcaaggccctgatccagcccggccacgtgcctgagatggccaacaagttcccagacctgactgtggaggacctggagacagatgccctgaaggctgacatgaatgtgcacctgctgcccatggaggagctgaccagccccctgaaggacccccccatgagcccagaccctgagagccccagcccccagcccagctgccagacagagatcagtgacttcagcacagacagaattgacttcttcagcgccctggagaagtttgtggagctgagccaggagaccaggagccgctccttcagccacagcaggatggaggagctgggcggcggcagaaatgaaagctgccgcctgtctgtggtggaggtggcccccagcaaggtgacagcagatgaccagaggagcagcagcctgagcaacacccctcatgccagcgaggagagctccatggatgaggagcagagcaaggccatcagcgagctggtgtccccagacatcttcatgcagagccacagtgaaaatgccatctctgtgaaggagatcgtgacagaaattgagagcatcagccagggcgtgggccagatccagctgaagggggacatcctgcccaacccctgccacacccccaagaagaacagcatccacgagctgctgctggagcgggcccagaccccagagaacaagccaggccacatggagcaggatgaggacagctgcacagcccagcctgagctggccaaggacagcggcatgtgcaaccctgagggctgcctgaccacccacagcagcattgctgacctggaggagggggagcctgctgagggggagcaggagctgcagggcagcggcatgcaccctggggccaagtggtacccaggctctgtgcggcgggccaccctggagtttgaggagcggctgcggcaggagcaggagcaccacggggccgcccccacctgcaccagcctgagcaccaggaagaacagcaagaatgacagctctgtggccgacctggcccccaagggcaagagtgatgaggcccctcctgagcacagctttgtgctgaaggagcctgagatgagcaagggcaagggcaagtacagcggcagcgaggccggcagcctgagccacagcgagcagaatgccaccgtgcctgccccccgggtgctggagtttgaccacctgcctgacccccaggagggccctggcagtgacaccggcacccagcaggagggcgtgctgaaggacctgaggacagtcatcccctaccaggagagcgagacccaggccgtgcccctgcccctgcccaagagggtggagatcatcgagtacacccacatcgtgaccagccccaaccacactggacctggcagcgagatcgccaccagcgagaagtctggagagcagggcctgaggaaggtgaacatggagaagtctgtgacagtgctgtgcaccctggatgagaacctgaacagaaccctggaccccaaccaggtgtccctgcacccccaggtgctgcccctgccccacagcagcagccctgagcacaaccggcccacagaccaccccaccagcatcctgagcagccctgaggaccggggcagcagcctgagcacagccctggagacagctgccccctttgtgagccacaccacccacctgctgagcgccagcctggactacctgcacccccagaccatggtgcacctggagggcttcacagagcagagcagcaccacagatgagcccagcgctgagcaggtgtcctgggaggagagccaggagagccccctgagcagcggcagcgaggtgccctacaaggacagccagctgagcagcgctgacctgagcctcatcagcaagctgggggacaacacaggagagctgcaggagaagatggaccccctgcctgtggcctgccgcctgccccacagcagcagcagcgagaacatcaagagcctgagccacagccctggggtggtgaaggagcgggccaaggagattgagagccgggtggtgttccaggccggcctgaccaagcccagccagatgagaagaagtgccagcctggccaagctgggctacctggacctgtgcaaggactgcctgcctgagcgggagcccgccagctgtgagagcccccacctgaagctgctgcagcccttcctgaggacagacagcggcatgcacgccatggaggaccaggagagcctggagaaccctggggccccccacaaccctgagcccaccaagagctttgtggagcagctgaccaccacagagtgcatcgtgcagagcaagcctgtggagcggcccctggtgcagtatgccaaggagtttggcagcagccagcagtacctgctgccccgggccggcctggagctgaccagcagcgagggcggcctgcctgtgctgcagacccagggcctgcagtgtgcctgcccagcccctggcctggccgtggccccccggcagcagcacggccgcacccaccccctgcggcggctgaagaaggccaatgacaagaagaggaccaccaaccccttctacaacaccatgtag

SEQ ID NO: 169896 - DNA, 1980 bp, synthetic construct
  misc_feature 1..1980: note = Description of Artificial Sequence: Synthetic coding sequence
  source 1..1980: mol_type = other DNA
atggccctggtgacagtgagccgcagccccccaggcagcggggccagcacccctgtgggcccctgggaccaggccgtgcagaggaggagccggctgcagaggcggcagagctttgctgtgctgcggggagctgtgctgggcctgcaggacggcggggacaatgatgatgctgctgaggccagcagcgagcccacagagaaggcccccagcgaggaggagctgcatggagaccagacagactttggccagggcagccagagcccccagaagcaggaggagcagaggcagcacctgcacctgatggtgcagctgctgcggccccaggatgacatccggctggccgcccagctggaggccccccggcccccccggctgcgctacctgctggtggtgtccacccgggagggggagggcctgagccaggatgagaccgtgctgctgggcgtggacttcccagacagcagcagccccagctgcaccctgggcctggtgctgcccctgtggagcgacacccaggtgtacctggatggagatggcggcttctctgtgaccagcggcggccagagccgcatcttcaagcccatcagcatccagaccatgtgggccaccctgcaggtgctgcaccaggcctgtgaggccgccctgggcagcggcctggtgcctgggggcagcgccctgacctgggccagccactaccaggagcggctgaacagcgagcagagctgcctgaatgagtggacagccatggctgacctggagagcctgcggcccccatctgctgagcccggcggcagcagcgagcaggagcagatggagcaggccatccgggcagagctgtggaaggtgctggatgtgtctgacctggagagcgtgaccagcaaggagatccggcaggccctggagctgcggctgggcctgcccctgcagcagtacagagacttcatcgacaaccagatgctgctgctggtggcccagagggaccgggccagccgcatcttcccccacctgtacctgggcagcgagtggaatgctgccaacctggaggagctgcagaggaacagagtgacccacatcctgaacatggcccgggagattgacaacttctacccagagcgcttcacctaccacaacgtgcggctgtgggatgaggagagcgcccagctgctgccccactggaaggagacccaccgcttcattgaagctgcccgggcccagggcacccacgtgctggtgcactgcaagatgggcgtgagccgctctgctgccaccgtgctggcctatgccatgaagcagtatgaatgttccctggagcaggccctgcggcacgtgcaggagctgcggcccatcgcccggcccaaccctggcttcctgcggcagctgcagatctaccagggcatcctgacagccagccggcagagccacgtgtgggagcagaaggtgggcggcgtgtccccagaggagcacccagcccctgaggtgtccacccccttcccccccctgcccccagagcctgagggcggcggggaggagaaggtggtgggcatggaggagagccaggccgcccccaaggaggagcccggcccccggccccgcatcaacctgcggggcgtgatgaggagcatcagcctgctggagcccagcctggagctggagagcaccagcgagaccagtgacatgcctgaggtgttcagcagccatgagagcagccatgaggagcccctgcagcccttcccccagctggcccggaccaagggcggccagcaggtggaccggggcccccagcctgccctgaagagccggcagagcgtggtgaccctgcagggcagcgctgtggtggccaacagaacccaggccttccaggagcaggagcagggccagggccagggccagggcgagccctgcatcagcagcaccccccgcttcaggaaggtggtgcggcaggcctctgtgcatgattctggagaggagggggaggcctag

SEQ ID NO: 169897 - DNA, 2091 bp, synthetic construct
  misc_feature 1..2091: note = Description of Artificial Sequence: Synthetic coding sequence
  source 1..2091: mol_type = other DNA
atgctgctgtggatcctgctgctggagaccagcctgtgctttgctgctggaaatgtgactggagatgtgtgcaaggagaagatctgcagctgcaatgaaattgaaggagacctgcacgtggactgtgagaagaagggcttcaccagcctgcagcgcttcaccgcccccaccagccagttctaccacctgttcctgcacggcaacagcctgaccaggctcttccccaatgaatttgccaacttctacaatgctgtgtccctgcacatggagaacaacggcctgcatgaaattgtgcctggggccttcctgggcctgcagctggtgaagaggctgcacatcaacaacaacaagatcaagagcttcaggaagcagaccttcctgggcctggatgacctggagtacctgcaggccgacttcaacctgctgcgggacattgatcctggggccttccaggacctgaacaagctggaggtgctgatcctgaatgacaacctgatcagcaccctgcctgccaacgtgttccagtatgtgcccatcacccacctggacctgcggggcaaccggctgaagaccctgccctatgaggaggtgctggagcagatccctggcattgctgagatcctgctggaggacaacccctgggactgcacctgtgacctgctgagcctgaaggagtggctggagaacatccccaagaatgccctgattggccgggtggtgtgtgaggcccccacccggctgcagggcaaggacctgaatgagaccacagagcaggacctgtgccccctgaagaacagagtggacagcagcctgcctgcccccccagcccaggaggagacctttgcccctggccccctgcccacccccttcaagaccaacggccaggaggaccacgccaccccaggcagcgcccccaacggcggcaccaagatccctggcaactggcagatcaagatccggcccacagctgccatcgccaccggcagcagcaggaacaagcccctggccaacagcctgccctgccctgggggctgcagctgtgaccacatccctggcagcggcctgaagatgaactgcaacaacagaaatgtgagcagcctggccgacctgaagcccaagctgagcaatgtgcaggagctgttcctgcgggacaacaagatccacagcatcaggaagagccactttgtggactacaagaacctgatcctgctggacctgggcaacaacaacatcgccaccgtggagaacaacaccttcaagaacctgctggacctgcgctggctgtacatggacagcaactacctggacaccctgagccgggagaagtttgctggcctgcagaacctggagtacctgaatgtggagtacaatgccatccagctgatcctgcccggcaccttcaatgccatgcccaagctgcgcatcctgatcctgaacaacaacctgctgcggagcctgcctgtggatgtgtttgctggggtgtccctgagcaagctgagcctgcacaacaactacttcatgtacctgcctgtggccggcgtgctggaccagctgaccagcatcatccagattgacctgcacggcaacccctgggagtgcagctgcaccatcgtgcccttcaagcagtgggccgagcggctgggcagcgaggtgctgatgtctgacctgaagtgtgagacccctgtgaacttcttcaggaaggacttcatgctgctgagcaatgatgagatctgcccccagctgtatgcccgcatcagccccaccctgaccagccacagcaagaacagcacaggcctggccgagaccggcacccacagcaacagctacctggacaccagccgggtgtccatctctgtgctggtgcccggcctgctgctggtgtttgtgaccagcgccttcaccgtggtgggcatgctggtgttcatcctgaggaacaggaagaggagcaagagaagagatgccaacagcagcgccagcgagatcaacagcctgcagacagtgtgtgacagcagctactggcacaacggcccctacaatgctgatggagcccaccgggtgtatgactgtggcagccacagcctgagtgactag

SEQ ID NO: 169898 - DNA, 2175 bp, synthetic construct
  misc_feature 1..2175: note = Description of Artificial Sequence: Synthetic coding sequence
  source 1..2175: mol_type = other DNA
atgctgtctggagtgtggttcctgtctgtgctgactgtggccggcatcctgcagacagagagcaggaagacagccaaggacatctgcaagatccgctgcctgtgtgaggagaaggaaaatgtgctgaacatcaactgtgaaaataaaggcttcaccaccgtgtccctgctgcagcccccccagtaccgcatctaccagctgttcctgaatggaaacctgctgacccggctgtacccaaatgaatttgtgaactacagcaatgctgtgaccctgcacctgggcaacaacggcctgcaggagatcagaactggagccttcagcggcctgaagaccctgaagaggctgcacctgaacaacaacaagctggagatcctgcgggaggacaccttcctgggcctggagagcctggagtacctgcaggccgactacaactacatcagcgccattgaagctggggccttcagcaagctgaacaagctgaaggtgctgatcctgaatgacaacctgctgctgagcctgcccagcaatgtgttccgctttgtgctgctgacccacctggacctgcggggcaaccggctgaaggtgatgccctttgctggggtgctggagcacatcggcggcatcatggagatccagctggaggagaacccctggaactgcacctgtgacctgctgcccctgaaggcctggctggacaccatcaccgtgtttgtgggggagatcgtgtgtgagacccccttccggctgcacggcaaggatgtgacccagctgacccggcaggacctgtgccccaggaagagcgccagtgacagcagccagaggggcagccacgccgacacccacgtgcagaggctgagccccaccatgaacccagccctgaaccccacccgggcccccaaggccagccggccccccaagatgaggaaccggcccaccccccgggtgacagtgtccaaggaccggcagagctttggccccatcatggtgtaccagaccaagagccctgtgcccctgacctgccccagcagctgtgtgtgcaccagccagagcagtgacaatggcctgaatgtgaactgccaggagaggaagttcaccaacatcagtgacctgcagcccaagcccaccagccccaagaagctgtacctgactggaaactacctgcagacagtgtacaagaatgacctgctggagtacagcagcctggacctgctgcacctgggcaacaacagaattgctgtgatccaggagggcgccttcaccaacctgaccagcctgcggcggctgtacctgaatggaaactacctggaggtgctgtaccccagcatgtttgatggcctgcagagcctgcagtacctgtacctggagtacaacgtcatcaaggagatcaagcccctgacctttgatgccctgatcaacctgcagctgctcttcctgaacaacaacctgctgcggagcctgcctgacaacatctttggaggaacagccctgacccggctgaacctgaggaacaaccacttcagccacctgcctgtgaagggcgtgctggaccagctgcctgccttcatccagattgacctgcaggagaacccctgggactgcacctgtgacatcatgggcctgaaggactggacagagcacgccaacagccctgtgatcatcaatgaggtgacctgtgagagccctgccaagcatgctggggagatcctgaagttcctgggccgggaggccatctgcccagacagccccaacctgagtgatggcaccgtgctgtccatgaaccacaacacagacacccccaggagcctgtctgtgagccccagcagctacccagagctgcacacagaggtgcccctgtctgtgctgatcctgggcctgctggtggtgttcatcctgtctgtgtgctttggagctggcctgtttgtgtttgtgctgaagaggaggaagggcgtgcccagcgtgcccaggaacaccaacaacctggatgtgagcagcttccagctgcagtatggcagctacaacacagagacccatgacaagacagatggccacgtgtacaactacatccccccacctgtgggccagatgtgccagaaccccatctacatgcagaaggagggggaccctgtggcctactacagaaacctgcaggagttctcctacagcaacctggagtag

SEQ ID NO: 169899 - DNA, 2538 bp, synthetic construct
  misc_feature 1..2538: note = Description of Artificial Sequence: Synthetic coding sequence
  source 1..2538: mol_type = other DNA
atgctgtctggagtgtggttcctgtctgtgctgactgtggccggcatcctgcagacagagagcaggaagacagccaaggacatctgcaagatccgctgcctgtgtgaggagaaggaaaatgtgctgaacatcaactgtgaaaataaaggcttcaccaccgtgtccctgctgcagcccccccagtaccgcatctaccagctgttcctgaatggaaacctgctgacccggctgtacccaaatgaatttgtgaactacagcaatgctgtgaccctgcacctgggcaacaacggcctgcaggagatcagaactggagccttcagcggcctgaagaccctgaagaggctgcacctgaacaacaacaagctggagatcctgcgggaggacaccttcctgggcctggagagcctggagtacctgcaggccgactacaactacatcagcgccattgaagctggggccttcagcaagctgaacaagctgaaggtgctgatcctgaatgacaacctgctgctgagcctgcccagcaatgtgttccgctttgtgctgctgacccacctggacctgcggggcaaccggctgaaggtgatgccctttgctggggtgctggagcacatcggcggcatcatggagatccagctggaggagaacccctggaactgcacctgtgacctgctgcccctgaaggcctggctggacaccatcaccgtgtttgtgggggagatcgtgtgtgagacccccttccggctgcacggcaaggatgtgacccagctgacccggcaggacctgtgccccaggaagagcgccagtgacagcagccagaggggcagccacgccgacacccacgtgcagaggctgagccccaccatgaacccagccctgaaccccacccgggcccccaaggccagccggccccccaagatgaggaaccggcccaccccccgggtgacagtgtccaaggaccggcagagctttggccccatcatggtgtaccagaccaagagccctgtgcccctgacctgccccagcagctgtgtgtgcaccagccagagcagtgacaatggcctgaatgtgaactgccaggagaggaagttcaccaacatcagtgacctgcagcccaagcccaccagccccaagaagctgtacctgactggaaactacctgcagacagtgtacaagaatgacctgctggagtacagcagcctggacctgctgcacctgggcaacaacagaattgctgtgatccaggagggcgccttcaccaacctgaccagcctgcggcggctgtacctgaatggaaactacctggaggtgctgtaccccagcatgtttgatggcctgcagagcctgcagtacctgtacctggagtacaacgtcatcaaggagatcaagcccctgacctttgatgccctgatcaacctgcagctgctcttcctgaacaacaacctgctgcggagcctgcctgacaacatctttggaggaacagccctgacccggctgaacctgaggaacaaccacttcagccacctgcctgtgaagggcgtgctggaccagctgcctgccttcatccagattgacctgcaggagaacccctgggactgcacctgtgacatcatgggcctgaaggactggacagagcacgccaacagccctgtgatcatcaatgaggtgacctgtgagagccctgccaagcatgctggggagatcctgaagttcctgggccgggaggccatctgcccagacagccccaacctgagtgatggcaccgtgctgtccatgaaccacaacacagacacccccaggagcctgtctgtgagccccagcagctacccagagctgcacacagaggtgcccctgtctgtgctgatcctgggcctgctggtggtgttcatcctgtctgtgtgctttggagctggcctgtttgtgtttgtgctgaagaggaggaagggcgtgcccagcgtgcccaggaacaccaacaacctggatgtgagcagcttccagctgcagtatggcagctacaacacagagacccatgacaagacagatggccacgtgtacaactacatccccccacctgtgggccagatgtgccagaaccccatctacatgcagaaggagggggaccctgtggcctactacagaaacctgcaggagttctcctacagcaacctggaggagaagaaggaggagcccgccaccccagcctacaccatcagcgccacagagctgctggagaagcaggccaccccccgggagcctgagctgctgtaccagaacattgctgagcgggtgaaggagctgcccagcgctggcctggtgcactacaacttctgcaccctgcccaagaggcagtttgcccccagctatgagagccggcggcagaaccaggaccgcatcaacaagacagtgctgtatggcacccccaggaaatgttttgtgggccagagcaagcccaaccaccccctgctgcaggccaagccccagagcgagccagactacctggaggtgctggagaagcagacagccatcagccagctgtag

SEQ ID NO: 169900 - DNA, 2538 bp, synthetic construct; identical to SEQ ID NO: 169899
  misc_feature 1..2538: note = Description of Artificial Sequence: Synthetic coding sequence
  source 1..2538: mol_type = other DNA

SEQ ID NO: 169901 - DNA, 2538 bp, synthetic construct; identical to SEQ ID NO: 169899
  misc_feature 1..2538: note = Description of Artificial Sequence: Synthetic coding sequence
  source 1..2538: mol_type = other DNA

SEQ ID NO: 169902 - DNA, 2538 bp, synthetic construct; identical to SEQ ID NO: 169899
  misc_feature 1..2538: note = Description of Artificial Sequence: Synthetic coding sequence
  source 1..2538: mol_type = other DNA

SEQ ID NO: 169903 - DNA, 2538 bp, synthetic construct; identical to SEQ ID NO: 169899
  misc_feature 1..2538: note = Description of Artificial Sequence: Synthetic coding sequence
  source 1..2538: mol_type = other DNA

SEQ ID NO: 169904 - DNA, 2934 bp, synthetic construct
  misc_feature 1..2934: note = Description of Artificial Sequence: Synthetic coding sequence
  source 1..2934: mol_type = other DNA
atgaagcccagcattgctgagatgctgcaccggggccgcatgctgtggatcatcctgctgagcaccatcgccctgggctggaccacccccatccccctgattgaagattctgaggagattgatgagccctgctttgacccctgctactgtgaggtgaaggagagcctcttccacatccactgtgacagcaagggcttcaccaacatcagccagatcacagagttctggagccggcccttcaagctgtacctgcagaggaacagcatgaggaagctgtacaccaacagcttcctgcacctgaacaatgctgtgtccatcaacctgggcaacaatgccctgcaggacatccagacaggagccttcaacggcctgaagatcctgaagaggctgtacctgcacgagaacaagctggatgtgttcagaaatgacaccttcctgggcctggagagcctggagtacctgcaggccgactacaacgtcatcaagagaattgagagcggggccttcaggaacctgagcaagctgcgggtgctgatcctgaatgacaacctgatccccatgctgcccaccaacctcttcaaggctgtgtccctgacccacctggacctgcggggcaaccggctgaaggtgctcttctaccggggcatgctggaccacatcggccgcagcctgatggagctgcagctggaggagaacccctggaactgcacctgtgagatcgtgcagctgaagtcctggctggagcgcatcccctacacagccctggtgggggacatcacctgtgagacccccttccacttccacggcaaggacctgcgggagatcaggaagacagagctgtgccccctgctgagtgacagcgaggtggaggccagcctgggcatcccccacagcagcagcagcaaagaaaatgcctggcccaccaagcccagctccatgctgagctctgtgcacttcaccgccagctctgtggagtacaagagcagcaacaagcagcccaagcccaccaagcagcccaggaccccccggccccccagcaccagccaggccctgtacccaggccccaaccagccccccatcgccccctaccagaccaggcctcccatccccatcatctgccccaccggctgcacctgcaacctgcacatcaatgacctgggcctgactgtgaactgcaaggagcggggcttcaacaacatcagcgagctgctgccccggcccctgaatgccaagaagctgtacctgagcagcaacctgatccagaagatctacagaagtgacttctggaacttcagcagcctggacctgctgcacctgggcaacaaccgcatctcctatgtgcaggatggagccttcatcaacctgcccaacctgaagagcctcttcctgaatggaaatgacatcgagaagctgaccccaggcatgttccggggcctgcagagcctgcactacctgtactttgagttcaacgtcatccgggagatccagcctgctgccttcagcctgatgcccaacctgaagctgctcttcctgaacaacaacctgctgcggaccctgcccacagatgcctttgctggcaccagcctggcccggctgaacctgaggaagaactacttcctgtacctgcctgtggccggcgtgctggagcacctgaatgccatcgtgcagattgacctgaatgaaaacccctgggactgcacctgtgacctggtgcccttcaagcagtggattgagaccatcagctctgtgtctgtggtgggagatgtgctgtgccgcagccctgagaacctgacccacagagatgtgaggaccatcgagctggaggtgctgtgcccagagatgctgcacgtggccccagctggggagagccctgcccagcccggggacagccacctgattggagcccccaccagcgccagcccctatgagttcagccccccaggcggccctgtgcccctgtctgtgctgatcctgagcctgctggtgctcttcttctctgctgtgtttgtggccgccggcctgtttgcctacgtgctgcggcggcggaggaagaagctgcccttccgcagcaagaggcaggagggcgtggacctgaccggcatccagatgcagtgccaccggctgtttgaagatggcggcggcggcggcggcggcagcggcggcggcggccggcccaccctgagcagccctgagaaggcccctcctgtgggccacgtgtatgagtacatcccccaccctgtgacccagatgtgcaacaaccccatctacaagccccgggaggaggaggaggtggccgtgagcagcgcccaggaggccggcagcgctgagcggggcggccctggcacccagcccccaggcatgggagaggccctgctgggcagcgagcagtttgctgagacccccaaggagaaccacagcaactaccgcaccctgctggagaaggagaaggagtgggccctggccgtgagcagcagccagctgaacaccatcgtgacagtgaaccaccaccacccccaccaccctgctgtgggcggcgtgtctggagtggtgggcggcactggaggagacctggccggcttccgccaccacgagaagaatggaggagtggtgctcttccccccaggcggcggctgcggcagcggctccatgctgctggaccgggagcggccccagcctgccccctgcaccgtgggctttgtggactgcctgtatggcaccgtgcccaagctgaaggagctgcacgtgcaccccccaggcatgcagtacccagacctgcagcaggatgcccggctgaaggagaccctgctcttctctgctgggaagggcttcacagaccaccagacccagaagagtgactacctggagctgcgggccaagctgcagaccaagccagactacctggaggtgctggagaagaccacctaccgcttctag

SEQ ID NO: 169905 - DNA, 2934 bp, synthetic construct; identical to SEQ ID NO: 169904
  misc_feature 1..2934: note = Description of Artificial Sequence: Synthetic coding sequence
  source 1..2934: mol_type = other DNA

SEQ ID NO: 169906 - DNA, 492 bp, synthetic construct
  misc_feature 1..492: note = Description of Artificial Sequence: Synthetic coding sequence
  source 1..492: mol_type = other DNA
atgaagcccagcattgctgagatgctgcaccggggccgcatgctgtggatcatcctgctgagcaccatcgccctgggctggaccacccccatccccctgattgaagattctgaggagattgatgagccctgctttgacccctgctactgtgaggtgaaggagagcctcttccacatccactgtgacagcaagggcttcaccaacatcagccagatcacagagttctggagccggcccttcaagctgtacctgcagaggaacagcatgaggaagctgtacaccaacagcttcctgcacctgaacaatgctgtgtccatcaacctgggcaacaatgccctgcaggacatccagacaggagccttcaacggcctgaagatcctgaagaggctgtacctgcacgagaacaagctggatgtgttcagaaatgacaccttcctgggcctggagagcctggagtacctgcaggccgactacaacgtcatcaagaggtag

SEQ ID NO: 169907 - DNA, 2514 bp, synthetic construct
  misc_feature 1..2514: note = Description of Artificial Sequence: Synthetic coding sequence
  source 1..2514: mol_type = other DNA
atgttcctgtggctgttcctgatcctgagcgccctgatcagcagcaccaatgctgacagcgacatctctgtggagatctgcaatgtgtgcagctgtgtgtctgtggagaatgtgctgtatgtgaactgtgagaaggtgtctgtgtaccggcccaaccagctgaagccaccctggagcaacttctaccacctgaacttccagaacaacttcctgaacatcctgtaccccaacaccttcctgaacttcagccatgctgtgtccctgcacctgggcaacaacaagctgcagaacatcgagggcggggccttcctgggcctgagcgccctgaagcagctgcacctgaacaacaatgagctgaagatcctgcgggctgacaccttcctgggcatcgagaacctggagtacctgcaggccgactacaacctgatcaagtacatcgagcggggggccttcaacaagctgcacaagctgaaggtgctgatcctgaatgacaacctgatctccttcctgcctgacaacatcttccgctttgccagcctgacccacctggacatccggggcaaccgcatccagaagctgccctacatcggcgtgctggagcacatcggccgggtggtggagctgcagctggaggacaacccctggaactgcagctgtgacctgctgcccctgaaggcctggctggagaacatgccctacaacatctacatcggggaggccatctgtgagacccccagcgacctgtatggccgcctgctgaaggagaccaacaagcaggagctgtgccccatgggcaccggcagtgactttgatgtgcgcatcctgccccccagccagctggagaatggctacaccacccccaacggccacaccacccagaccagcctgcaccggctggtgaccaagccacccaagaccaccaaccccagcaagatctctggaattgtggccggcaaggccctgagcaacagaaacctgagccagatcgtgtcctaccagaccagggtgccccccctgaccccctgcccagccccctgcttctgcaagacccaccccagcgacctgggcctgtctgtgaactgccaggagaagaacatccagagcatgtctgagctgatccccaagcccctgaatgccaagaagctgcacgtgaatggaaacagcatcaaggatgtggatgtgtctgacttcacagactttgagggcctggacctgctgcacctgggcagcaaccagatcaccgtcatcaagggagatgtgttccacaacctgaccaacctgcggcggctgtacctgaatggaaaccagatcgagcggctgtacccagagatcttcagcggcctgcacaacctgcagtacctgtacctggagtacaacctgatcaaggagatctctgctggcacctttgacagcatgcccaacctgcagctgctgtacctgaacaacaacctgctgaagagcctgcctgtgtacatcttcagcggggcccccctggcccggctgaacctgaggaacaacaagttcatgtacctgcctgtgtctggagtgctggaccagctgcagagcctgacccagattgacctggagggcaacccctgggactgcacctgtgacctggtggccctgaagctgtgggtggagaagctgagtgatggcatcgtggtgaaggagctgaagtgtgagacccctgtgcagtttgccaacatcgagctgaagagcctgaagaatgagatcctgtgccccaagctgctgaacaagcccagcgcccccttcaccagccctgccccagccatcaccttcaccacccccctgggccccatccgcagccccccaggcggccctgtgcccctgagcatcctgatcctgagcatcctggtggtgctgatcctgactgtgtttgtggccttctgcctgctggtgtttgtgctgcggaggaacaagaagcccaccgtgaagcatgagggcctgggcaacccagactgtggctccatgcagctgcagctgaggaagcatgaccacaagaccaacaagaaggatggcctgagcacagaggccttcatcccccagaccatcgagcagatgagcaagagccacacctgtggcctgaaggagagcgagaccggcttcatgttcagtgaccccccaggccagaaggtggtgatgagaaatgtggccgacaaggagaaggacctgctgcacgtggacaccaggaagaggctgagcaccattgatgagctggatgagctgttccccagccgggacagcaatgtgttcatccagaacttcctggagagcaagaaggagtacaacagcattggagtgtctggctttgagatccgctacccagagaagcagcctgacaagaagagcaagaagagcctgattggaggcaaccacagcaagatcgtggtggagcagaggaagtctgagtactttgagctgaaggccaagctgcagagcagcccagactacctgcaggtgctggaggagcagacagccctgaacaagatctag

SEQ ID NO: 169908 - DNA, 2514 bp, synthetic construct; identical to SEQ ID NO: 169907
  misc_feature 1..2514: note = Description of Artificial Sequence: Synthetic coding sequence
  source 1..2514: mol_type = other DNA

SEQ ID NO: 169909 - DNA, 2514 bp, synthetic construct; identical to SEQ ID NO: 169907
  misc_feature 1..2514: note = Description of Artificial Sequence: Synthetic coding sequence
  source 1..2514: mol_type = other DNA

SEQ ID NO: 169910 - DNA, 2877 bp, synthetic construct
  misc_feature 1..2877: note = Description of Artificial Sequence: Synthetic coding sequence
  source 1..2877: mol_type = other DNA
atgcacacctgctgcccccctgtgaccctggagcaggacctgcacaggaagatgcacagctggatgctgcagaccctggcctttgctgtgaccagcctggtgctgagctgtgccgagaccatcgactactacggggagatctgtgacaatgcctgcccctgtgaggagaaggatggcatcctgactgtgtcctgtgagaacagaggcatcatcagcctgtctgagatcagccccccacgcttccccatctaccacctgctgctgagcggcaacctgctgaaccggctgtacccaaatgaatttgtgaactacacaggagccagcatcctgcacctgggcagcaatgtcatccaggacatcgagaccggggccttccacggcctgcggggcctgcggcggctgcacctgaacaacaacaagctggagctgctgagagatgacaccttcctgggcctggagaacctggagtacctgcaggtggactacaactacatcagcgtcatcgagcccaatgccttcggcaagctgcacctgctgcaggtgctgatcctgaatgacaacctgctgagcagcctgcccaacaacctcttccgctttgtgcccctgacccacctggacctgcggggcaaccggctgaagctgctgccctacgtgggcctgctgcagcacatggacaaggtggtggagctgcagctggaggagaacccctggaactgcagctgtgagctgatcagcctgaaggactggctggacagcatctcctacagcgccctggtgggagatgtggtgtgtgagacccccttccggctgcacggccgggacctggatgaggtgtccaagcaggagctgtgcccccggcggctcatcagtgactatgagatgaggccccagacccccctgagcaccaccggctacctgcacaccaccccagcctctgtgaacagcgtggccaccagcagcagcgctgtgtacaagccacccctgaagccacccaagggcacccggcagcccaacaagccccgggtgcggcccaccagccggcagcccagcaaggacctgggctacagcaactacggccccagcatcgcctaccagaccaagagccctgtgcccctggagtgccccacagcctgcagctgcaacctgcagatcagtgacctgggcctgaatgtgaactgccaggagaggaagattgagagcattgctgagctgcagcccaagccctacaaccccaagaagatgtacctgacagagaactacatcgctgtggtgagaagaacagacttcctggaggccaccggcctggacctgctgcacctgggcaacaaccgcatctccatgatccaggaccgggcctttggagacctgaccaacctgcggcggctgtacctgaatggaaacagaattgagcggctgagccctgagctgttctacggcctgcagagcctgcagtacctgttcctgcagtacaacctgatccgggagatccagagcggcacctttgatcctgtgcccaacctgcagctgctcttcctgaacaacaacctgctgcaggccatgcccagcggggtcttcagcggcctgaccctgctgcggctgaacctgcggagcaaccacttcaccagcctgcctgtgtctggagtgctggaccagctgaagagcctcatccagattgacctgcatgacaacccctgggactgcacctgtgacatcgtgggcatgaagctgtgggtggagcagctgaaggtgggcgtgctggtggatgaggtgatctgcaaggcccccaagaagtttgctgagacagacatgaggagcatcaagtctgagctgctgtgcccagactacagtgatgtggtggtgtccacccccacccccagcagcatccaggtgcctgcccggaccagcgctgtgaccccagctgtgcggctgaacagcactggagccccagccagcctgggcgctgggggcggggccagctctgtgcccctgtctgtgctgatcctgagcctgctgctggtgttcatcatgtctgtgtttgtggccgccggcctgtttgtgctggtgatgaagaggaggaagaagaaccagagcgaccacaccagcaccaacaacagtgatgtgtcctccttcaacatgcagtacagcgtgtatggaggcggcggcggcactggaggccacccccacgcccacgtgcaccaccggggccctgccctgcccaaggtgaagaccccagctggccacgtgtatgagtacatcccccaccccctgggccacatgtgcaagaaccccatctaccgcagccgggagggcaacagcgtggaggactacaaggacctgcacgagctgaaggtgacctacagcagcaaccaccacctgcagcagcagcagcagcccccacctccaccccagcagccccagcagcagcccccaccccagctgcagctgcagcctggagaggaggagcggcgggagagccaccacctgcggagccctgcctacagcgtgtccaccatcgagccccgggaggacctgctgagccctgtgcaggatgctgaccgcttctaccggggcatcctggagccagacaagcactgcagcaccaccccagctggcaacagcctgcctgagtaccccaagttcccctgcagccctgctgcctacaccttcagccccaactatgacctgcggcggccccaccagtacctgcaccctggggccggggacagccggctgcgggagcctgtgctgtacagccccccatctgctgtgtttgtggagcccaacagaaatgagtacctggagctgaaggccaagctgaatgtggagccagactacctggaggtgctggagaagcagaccaccttcagccagttctag

SEQ ID NO: 169911 - DNA, 2154 bp, synthetic construct
  misc_feature 1..2154: note = Description of Artificial Sequence: Synthetic coding sequence
  source 1..2154: mol_type = other DNA
atgggcgccggcaagcaccgggagggcggcggcggggaccccaccagcctgaatggctgtgccgacctgatccagaggagaacagagatcagccgggacctggatgaggtgtccaagcaggagctgtgccccaggaggctcatcagtgactatgagatgaggccccagacccccctgagcaccaccggctacctgcacaccaccccagcctctgtgaacagcgtggccaccagcagcagcgctgtgtacaagccacccctgaagccacccaagggcacccggcagcccaacaagccccgggtgcggcccaccagccggcagcccagcaaggacctgggctacagcaactacggccccagcatcgcctaccagaccaagagccctgtgcccctggagtgccccacagcctgcagctgcaacctgcagatcagtgacctgggcctgaatgtgaactgccaggagaggaagattgagagcattgctgagctgcagcccaagccctacaaccccaagaagatgtacctgacagagaactacatcgctgtggtgcggaggacagacttcctggaggccaccggcctggacctgctgcacctgggcaacaaccgcatctccatgatccaggaccgggccttcggggacctgaccaacctgcggcggctgtacctgaatggaaaccgcatcgagcggctgagccctgagctgttctacggcctgcagagcctgcagtacctgttcctgcagtacaacctgatccgggagatccagagcggcacctttgatcctgtgcccaacctgcagctgctcttcctgaacaacaacctgctgcaggccatgcccagcggggtcttcagcggcctgaccctgctgcggctgaacctgcggagcaaccacttcaccagcctgcctgtgtctggagtgctggaccagctgaagagcctcatccagattgacctgcatgacaacccctgggactgcacctgtgacatcgtgggcatgaagctgtgggtggagcagctgaaggtgggcgtgctggtggatgaagtcatctgcaaggcccccaagaagtttgctgagacagacatgaggagcatcaagtctgagctgctgtgcccagactacagtgatgtggtggtgtccacccccacccccagcagcatccaggtgcctgcccggaccagcgctgtgaccccagctgtgcggctgaacagcactggagccccagccagcctgggcgccggcggcggggccagctctgtgcccctgtctgtgctgatcctgagcctgctgctggtgttcatcatgtctgtgtttgtggccgccggcctgtttgtgctggtgatgaagaggaggaagaagaaccagagcgaccacaccagcaccaacaacagtgatgtgagcagcttcaacatgcagtacagcgtgtatggaggcggcggcggcaccggcggccacccccacgcccacgtgcaccaccggggccctgccctgcccaaggtgaagaccccagctggccacgtgtatgagtacatcccccaccccctgggccacatgtgcaagaaccccatctaccgcagccgggagggcaacagcgtggaggactacaaggacctgcacgagctgaaggtgacctacagcagcaaccaccacctgcagcagcagcagcagcccccacctccaccccagcagccccagcagcagcccccaccccagctgcagctgcagcccggggaggaggagcggcgggagagccaccacctgcggagccctgcctacagcgtgtccaccatcgagccccgggaggacctgctgagccctgtgcaggatgctgaccgcttctaccggggcatcctggagccagacaagcactgcagcaccaccccagctggcaacagcctgcctgagtaccccaagttcccctgcagccctgctgcctacaccttcagccccaactatgacctgcggcggccccaccagtacctgcaccctggagctggggacagccggctgcgggagcctgtgctgtacagcccccccagcgctgtgtttgtggagcccaacagaaatgagtacctggagctgaaggccaagctgaatgtggagccagactacctggaggtgctggagaagcagaccaccttcagccagttctag

SEQ ID NO: 169912 - DNA, 2526 bp, synthetic construct
  misc_feature 1..2526: note = Description of Artificial Sequence: Synthetic coding sequence
  source 1..2526: mol_type = other DNA
atgaagctgtggatccacctgttctacagcagcctgctggcctgcatcagcctgcacagccagacccctgtgctgagcagccggggcagctgtgacagcctgtgcaactgtgaggagaaggatggcaccatgctgatcaactgtgaggccaagggcatcaagatggtgtctgagatctctgtgccccccagccggcccttccagctgagcctgctgaacaacggcctgaccatgctgcacaccaatgacttcagcggcctgaccaatgccatcagcatccacctgggcttcaacaacattgctgacattgaaattggagccttcaacggcctgggcctgctgaagcagctgcacatcaaccacaacagcctggagatcctgaaggaggacaccttccacggcctggagaacctggagttcctgcaggccgacaacaacttcatcaccgtgattgagcccagcgccttcagcaagctgaaccggctgaaggtgctgatcctgaatgacaatgccatcgagagcctgccccccaacatcttccgctttgtgcccctgacccacctggacctgcggggcaaccagctgcagaccctgccctacgtgggcttcctggagcacatcggccgcatcctggacctgcagctggaggacaacaagtgggcctgcaactgtgacctgctgcagctgaagacctggctggagaacatgccaccccagagcatcattggagatgtggtgtgcaacagcccccccttcttcaagggcagcatcctgagccggctgaagaaggagagcatctgccccaccccacctgtgtatgaggagcacgaggaccccagcggcagcctgcacctggccgccaccagcagcatcaatgacagcaggatgagcaccaagaccaccagcatcctgaagctgcccaccaaggcccctggcctcatcccctacatcaccaagcccagcacccagctgcccggcccctactgccccatcccctgcaactgcaaggtgctgagccccagcggcctgctgatccactgccaggagaggaacatcgagagcctgagtgacctgcggcccccaccccagaaccccaggaagctgatcctggccggcaacatcatccacagcctgatgaagagtgacctggtggagtacttcaccctggagatgctgcacctgggcaacaacagaattgaggtgctggaggagggcagcttcatgaacctgacccggctgcagaagctgtacctgaatggaaaccacctgaccaagctgagcaagggcatgttcctgggcctgcacaacctggagtacctgtacctggagtacaatgccatcaaggagatcctgcccggcaccttcaaccccatgcccaagctgaaggtgctgtacctgaacaacaacctgctgcaggtgctgcccccccacatcttcagcggcgtgcccctgaccaaggtgaacctgaagaccaaccagttcacccacctgcctgtgagcaacatcctggatgacctggacctgctgacccagattgacctggaggacaacccctgggactgcagctgtgacctggtgggcctgcagcagtggatccagaagctgagcaagaacacagtgacagatgacatcctgtgcaccagccctggccacctggacaagaaggagctgaaggccctgaacagcgagatcctgtgccccggcctggtgaacaaccccagcatgcccacccagaccagctacctgatggtgaccaccccagccaccaccaccaacacagctgacaccatcctgcggagcctgacagatgctgtgcccctgtctgtgctgatcctgggcctgctgatcatgttcatcaccatcgtgttctgtgccgccggcatcgtggtgctggtgctgcacagaagaagacgctacaagaagaagcaggtggatgagcagatgagggacaacagccctgtgcacctgcagtacagcatgtatggccacaagaccacccaccacaccacagagcggcccagcgccagcctgtatgagcagcacatggtgagccccatggtgcacgtgtaccgcagccccagctttggccccaagcacctggaggaggaggaggagagaaatgagaaggagggcagtgatgccaagcacctgcagaggagcctgctggagcaggagaaccacagccccctgaccggcagcaacatgaagtacaagaccaccaaccagagcacagagttcctgtccttccaggatgccagcagcctgtacagaaacatcctggagaaggagcgggagctgcagcagctgggcatcacagagtacctgaggaagaacatcgcccagctgcagcctgacatggaggcccactacccaggggcccacgaggagctgaagctgatggagaccctgatgtacagccggcccaggaaggtgctggtggagcagaccaagaatgagtactttgagctgaaggccaacctgcatgctgagccagactacctggaggtgctggagcagcagacctag

SEQ ID NO: 169913 - DNA, 4578 bp, synthetic construct
  misc_feature 1..4578: note = Description of Artificial Sequence: Synthetic coding sequence
  source 1..4578: mol_type = other DNA
atgagaggagtgggctggcagatgctgagcctgagcctgggcctggtgctggccatcctgaacaaggtggccccccaggcctgcccagcccagtgcagctgcagcggcagcacagtggactgccacggcctggccctgcggtctgtgcccaggaacatccccaggaacacagagcggctggacctgaatggaaacaacatcacccgcatcaccaagacagactttgctggcctgcggcacctgcgggtgctgcagctgatggagaacaagatcagcaccatcgagcggggggccttccaggacctgaaggagctggagcggctgcggctgaacagaaaccacctgcagctgtttcctgagctgctcttcctgggcacagccaagctgtaccgcctggacctgtctgagaaccagatccaggccatccccaggaaggccttcagaggagctgtggacatcaagaacctgcagctggactacaaccagatcagctgcattgaagatggagccttccgggccctgcgggacctggaggtgctgaccctgaacaacaacaacatcacccggctgtctgtggccagcttcaaccacatgcccaagctgcggaccttccggctgcacagcaacaacctgtactgtgactgccacctggcctggctgagtgactggctgcggcagaggccccgggtgggcctgtacacccagtgcatgggccccagccacctgcggggccacaacgtggccgaggtgcagaagcgggagtttgtgtgcagcggcaagggggagggccaccagagcttcatggcccccagctgcagcgtgctgcactgcccagctgcctgcacctgcagcaacaacatcgtggactgccggggcaagggcctgacagagatccccaccaacctgcctgagaccatcacagagatccggctggagcagaacaccatcaaggtgatccccccaggggccttcagcccctacaagaagctgcggagaattgacctgagcaacaaccagatcagcgagctggccccagatgccttccagggcctgcggagcctgaacagcctggtgctgtatggcaacaagatcacagagctgcccaagagcctgtttgagggcctcttcagcctgcagctgctgctgctgaatgccaacaagatcaactgcctgcgggtggatgccttccaggacctgcacaacctgaacctgctgagcctgtatgacaacaagctgcagaccatcgccaagggcaccttcagccccctgcgggccatccagaccatgcacctggcccagaaccccttcatctgtgactgccacctgaagtggctggccgactacctgcacaccaaccccatcgagaccagcggggcccgctgcaccagcccccggcggctggccaacaagagaattggccagatcaagagcaagaagttccgctgcagcggcacagaggactaccgcagcaagctgagcggggactgctttgctgacctggcctgcccagagaagtgccgctgtgagggcaccaccgtggactgcagcaaccagaagctgaacaagatccctgagcacatcccccagtacacagctgagctgcggctgaacaacaatgagttcaccgtgctggaggccaccggcatcttcaagaagctgccccagctgaggaagatcaacttcagcaacaacaagatcacagacatcgaggagggcgcctttgagggcgccagcggcgtgaatgagatcctgctgaccagcaaccggctggagaatgtgcagcacaagatgttcaagggcctggagagcctgaagaccctgatgctgcggagcaaccgcatcacctgtgtgggcaatgacagcttcatcggcctgagctctgtgcggctgctgagcctgtatgacaaccagatcaccaccgtggcccctggggcctttgacaccctgcacagcctgagcaccctgaacctgctggccaaccccttcaactgcaactgctacctggcctggctgggggagtggctgaggaagaagagaattgtgacaggcaacccccgctgccagaagccctacttcctgaaggagatccccatccaggatgtggccatccaggacttcacctgtgatgatggaaatgatgacaacagctgcagccccctgagccgctgccccacagagtgcacctgcctggacacagtggtgcgctgcagcaacaagggcctgaaggtgctgcccaagggcatccccagagatgtgacagagctgtacctggatggcaaccagttcaccctggtgcccaaggagctgagcaactacaagcacctgaccctgattgacctgagcaacaaccgcatcagcaccctgagcaaccagagcttcagcaacatgacccagctgctgaccctcatcctgagctacaaccggctgcgctgcatcccccccaggacctttgatggcctgaagagcctgcggctgctgagcctgcatggaaatgacatctctgtggtgcctgagggcgccttcaatgacctgagcgccctgagccacctggccatcggggccaaccccctgtactgtgactgcaacatgcagtggctgagtgactgggtgaagtctgagtacaaggagcccggcatcgcccgctgtgccggccctggagagatggctgacaagctgctgctgaccacccccagcaagaagttcacctgccagggccctgtggatgtgaacatcctggccaagtgcaacccctgcctgagcaacccctgcaagaatgatggcacctgcaacagcgaccctgtggacttctaccgctgcacctgcccctacggcttcaagggccaggactgtgatgtgcccatccacgcctgcatcagcaacccctgcaagcacggcggcacctgccacctgaaggagggggaggaggatggcttctggtgcatctgtgctgatggctttgaaggagagaactgtgaggtgaatgtggatgactgtgaagataatgactgtgagaacaacagcacctgtgtggatggcatcaacaactacacctgcctgtgccccccagagtacacaggagagctgtgtgaggagaagctggacttctgtgcccaggacctgaacccctgccagcacgacagcaagtgcatcctgacccccaagggcttcaagtgtgactgcaccccaggctacgtgggggagcactgtgacatcgactttgatgactgccaggacaacaagtgcaagaatggagcccactgcacagatgctgtgaatggctacacctgcatctgcccagagggctacagcggcctcttctgtgagttcagcccccccatggtgctgcccaggaccagcccctgtgacaactttgactgccagaatggagcccagtgcatcgtgcgcatcaatgagcccatctgccagtgcctgcccggctaccagggcgagaagtgtgagaagctggtgtctgtgaacttcatcaacaaggagagctacctgcagatccccagcgccaaggtgcggccccagaccaacatcaccctgcagatcgccacagatgaggacagcggcatcctgctgtacaagggggacaaggaccacatcgctgtggagctgtaccggggccgggtgcgggccagctatgacaccggcagccacccagccagcgccatctacagcgtggagaccatcaatgatggcaacttccacatcgtggagctgctggccctggaccagagcctgagcctgtctgtggatggcggcaaccccaagatcatcaccaacctgagcaagcagagcaccctgaactttgacagccccctgtatgtgggcggcatgcctgggaagagcaatgtggccagcctgcggcaggcccctggccagaatggcaccagcttccacggctgcatccggaacctgtacatcaacagcgagctgcaggacttccagaaggtgcccatgcagacaggcatcctgcccggctgtgagccctgccacaagaaggtgtgtgcccacggcacctgccagcccagcagccaggccggcttcacctgtgagtgccaggagggctggatgggccccctgtgtgaccagaggaccaatgacccctgcctgggcaacaagtgtgtgcacggcacctgcctgcccatcaatgccttctcctacagctgcaagtgcctggagggccatggaggagtgctgtgtgatgaggaggaggacctcttcaacccctgccaggccatcaagtgcaagcatggaaaatgtcggctgagcggcctgggccagccctactgtgaatgtagcagcggctacacaggagacagctgtgaccgggagatcagctgccgcggggagcgcatccgggactactaccagaagcagcagggctatgctgcctgccagaccaccaagaaggtgtcccggctggagtgccggggcggctgtgccggcggccagtgctgcggccccctgcggagcaagaggaggaagtacagctttgaatgtacagatggcagcagctttgtggatgaggtggagaaggtggtgaagtgtggctgcacccgctgtgtgtcctag

SEQ ID NO: 169914 - DNA, 4566 bp, synthetic construct
  misc_feature 1..4566: note = Description of Artificial Sequence: Synthetic coding sequence
  source 1..4566: mol_type = other DNA
atgagaggagtgggctggcagatgctgagcctgagcctgggcctggtgctggccatcctgaacaaggtggccccccaggcctgcccagcccagtgcagctgcagcggcagcacagtggactgccacggcctggccctgcggtctgtgcccaggaacatccccaggaacacagagcggctggacctgaatggaaacaacatcacccgcatcaccaagacagactttgctggcctgcggcacctgcgggtgctgcagctgatggagaacaagatcagcaccatcgagcggggggccttccaggacctgaaggagctggagcggctgcggctgaacagaaaccacctgcagctgtttcctgagctgctcttcctgggcacagccaagctgtaccgcctggacctgtctgagaaccagatccaggccatccccaggaaggccttcagaggagctgtggacatcaagaacctgcagctggactacaaccagatcagctgcattgaagatggagccttccgggccctgcgggacctggaggtgctgaccctgaacaacaacaacatcacccggctgtctgtggccagcttcaaccacatgcccaagctgcggaccttccggctgcacagcaacaacctgtactgtgactgccacctggcctggctgagtgactggctgcggcagaggccccgggtgggcctgtacacccagtgcatgggccccagccacctgcggggccacaacgtggccgaggtgcagaagcgggagtttgtgtgcagcggccaccagagcttcatggcccccagctgcagcgtgctgcactgcccagctgcctgcacctgcagcaacaacatcgtggactgccggggcaagggcctgacagagatccccaccaacctgcctgagaccatcacagagatccggctggagcagaacaccatcaaggtgatccccccaggggccttcagcccctacaagaagctgcggagaattgacctgagcaacaaccagatcagcgagctggccccagatgccttccagggcctgcggagcctgaacagcctggtgctgtatggcaacaagatcacagagctgcccaagagcctgtttgagggcctcttcagcctgcagctgctgctgctgaatgccaacaagatcaactgcctgcgggtggatgccttccaggacctgcacaacctgaacctgctgagcctgtatgacaacaagctgcagaccatcgccaagggcaccttcagccccctgcgggccatccagaccatgcacctggcccagaaccccttcatctgtgactgccacctgaagtggctggccgactacctgcacaccaaccccatcgagaccagcggggcccgctgcaccagcccccggcggctggccaacaagagaattggccagatcaagagcaagaagttccgctgcagcggcacagaggactaccgcagcaagctgagcggggactgctttgctgacctggcctgcccagagaagtgccgctgtgagggcaccaccgtggactgcagcaaccagaagctgaacaagatccctgagcacatcccccagtacacagctgagctgcggctgaacaacaatgagttcaccgtgctggaggccaccggcatcttcaagaagctgccccagctgaggaagatcaacttcagcaacaacaagatcacagacatcgaggagggcgcctttgagggcgccagcggcgtgaatgagatcctgctgaccagcaaccggctggagaatgtgcagcacaagatgttcaagggcctggagagcctgaagaccctgatgctgcggagcaaccgcatcacctgtgtgggcaatgacagcttcatcggcctgagctctgtgcggctgctgagcctgtatgacaaccagatcaccaccgtggcccctggggcctttgacaccctgcacagcctgagcaccctgaacctgctggccaaccccttcaactgcaactgctacctggcctggctgggggagtggctgaggaagaagagaattgtgacaggcaacccccgctgccagaagccctacttcctgaaggagatccccatccaggatgtggccatccaggacttcacctgtgatgatggaaatgatgacaacagctgcagccccctgagccgctgccccacagagtgcacctgcctggacacagtggtgcgctgcagcaacaagggcctgaaggtgctgcccaagggcatccccagagatgtgacagagctgtacctggatggcaaccagttcaccctggtgcccaaggagctgagcaactacaagcacctgaccctgattgacctgagcaacaaccgcatcagcaccctgagcaaccagagcttcagcaacatgacccagctgctgaccctcatcctgagctacaaccggctgcgctgcatcccccccaggacctttgatggcctgaagagcctgcggctgctgagcctgcatggaaatgacatctctgtggtgcctgagggcgccttcaatgacctgagcgccctgagccacctggccatcggggccaaccccctgtactgtgactgcaacatgcagtggctgagtgactgggtgaagtctgagtacaaggagcccggcatcgcccgctgtgccggccctggagagatggctgacaagctgctgctgaccacccccagcaagaagttcacctgccagggccctgtggatgtgaacatcctggccaagtgcaacccctgcctgagcaacccctgcaagaatgatggcacctgcaacagcgaccctgtggacttctaccgctgcacctgcccctacggcttcaagggccaggactgtgatgtgcccatccacgcctgcatcagcaacccctgcaagcacggcggcacctgccacctgaaggagggggaggaggatggcttctggtgcatctgtgctgatggctttgaaggagagaactgtgaggtgaatgtggatgactgtgaagataatgactgtgagaacaacagcacctgtgtggatggcatcaacaactacacctgcctgtgccccccagagtacacaggagagctgtgtgaggagaagctggacttctgtgcccaggacctgaacccctgccagcacgacagcaagtgcatcctgacccccaagggcttcaagtgtgactgcaccccaggctacgtgggggagcactgtgacatcgactttgatgactgccaggacaacaagtgcaagaatggagcccactgcacagatgctgtgaatggctacacctgcatctgcccagagggctacagcggcctcttctgtgagttcagcccccccatggtgctgcccaggaccagcccctgtgacaactttgactgccagaatggagcccagtgcatcgtgcgcatcaatgagcccatctgccagtgcctgcccggctaccagggcgagaagtgtgagaagctggtgtctgtgaacttcatcaacaaggagagctacctgcagatccccagcgccaaggtgcggccccagaccaacatcaccctgcagatcgccacagatgaggacagcggcatcctgctgtacaagggggacaaggaccacatcgctgtggagctgtaccggggccgggtgcgggccagctatgacaccggcagccacccagccagcgccatctacagcgtggagaccatcaatgatggcaacttccacatcgtggagctgctggccctggaccagagcctgagcctgtctgtggatggcggcaaccccaagatcatcaccaacctgagcaagcagagcaccctgaactttgacagccccctgtatgtgggcggcatgcctgggaagagcaatgtggccagcctgcggcaggcccctggccagaatggcaccagcttccacggctgcatccggaacctgtacatcaacagcgagctgcaggacttccagaaggtgcccatgcagacaggcatcctgcccggctgtgagccctgccacaagaaggtgtgtgcccacggcacctgccagcccagcagccaggccggcttcacctgtgagtgccaggagggctggatgggccccctgtgtgaccagaggaccaatgacccctgcctgggcaacaagtgtgtgcacggcacctgcctgcccatcaatgccttctcctacagctgcaagtgcctggagggccatggaggagtgctgtgtgatgaggaggaggacctcttcaacccctgccaggccatcaagtgcaagcatggaaaatgtcggctgagcggcctgggccagccctactgtgaatgtagcagcggctacacaggagacagctgtgaccgggagatcagctgccgcggggagcgcatccgggactactaccagaagcagcagggctatgctgcctgccagaccaccaagaaggtgtcccggctggagtgccggggcggctgtgccggcggccagtgctgcggccccctgcggagcaagaggaggaagtacagctttgaatgtacagatggcagcagctttgtggatgaggtggagaaggtggtgaagtgtggctgcacccgctgtgtgtcctag

SEQ ID NO: 169915 - DNA, 4578 bp, synthetic construct
  misc_feature 1..4578: note = Description of Artificial Sequence: Synthetic coding sequence
  source 1..4578: mol_type = other DNA
atgagaggagtgggctggcagatgctgagcctgagcctgggcctggtgctggccatcctgaacaaggtggccccccaggcctgcccagcccagtgcagctgcagcggcagcacagtggactgccacggcctggccctgcggtctgtgcccaggaacatccccaggaacacagagcggctggacctgaatggaaacaacatcacccgcatcaccaagacagactttgctggcctgcggcacctgcgggtgctgcagctgatggagaacaagatcagcaccatcgagcggggggccttccaggacctgaaggagctggagcggctgcggctgaacagaaaccacctgcagctgtttcctgagctgctcttcctgggcacagccaagctgtaccgcctggacctgtctgagaaccagatccaggccatccccaggaaggccttcagaggagctgtggacatcaagaacctgcagctggactacaaccagatcagctgcattgaagatggagccttccgggccctgcgggacctggaggtgctgaccctgaacaacaacaacatcacccggctgtctgtggccagcttcaaccacatgcccaagctgcggaccttccggctgcacagcaacaacctgtactgtgactgccacctggcctggctgagtgactggctgcggcagaggccccgggtgggcctgtacacccagtgcatgggccccagccacctgcggggccacaacgtggccgaggtgcagaagcgggagtttgtgtgcagtgatgaggaggagggccaccagagcttcatggcccccagctgcagcgtgctgcactgcccagctgcctgcacctgcagcaacaacatcgtggactgccggggcaagggcctgacagagatccccaccaacctgcctgagaccatcacagagatccggctggagcagaacaccatcaaggtgatccccccaggggccttcagcccctacaagaagctgcggagaattgacctgagcaacaaccagatcagcgagctggccccagatgccttccagggcctgcggagcctgaacagcctggtgctgtatggcaacaagatcacagagctgcccaagagcctgtttgagggcctcttcagcctgcagctgctgctgctgaatgccaacaagatcaactgcctgcgggtggatgccttccaggacctgcacaacctgaacctgctgagcctgtatgacaacaagctgcagaccatcgccaagggcaccttcagccccctgcgggccatccagaccatgcacctggcccagaaccccttcatctgtgactgccacctgaagtggctggccgactacctgcacaccaaccccatcgagaccagcggggcccgctgcaccagcccccggcggctggccaacaagagaattggccagatcaagagcaagaagttccgctgcagcggcacagaggactaccgcagcaagctgagcggggactgctttgctgacctggcctgcccagagaagtgccgctgtgagggcaccaccgtggactgcagcaaccagaagctgaacaagatccctgagcacatcccccagtacacagctgagctgcggctgaacaacaatgagttcaccgtgctggaggccaccggcatcttcaagaagctgccccagctgaggaagatcaacttcagcaacaacaagatcacagacatcgaggagggcgcctttgagggcgccagcggcgtgaatgagatcctgctgaccagcaaccggctggagaatgtgcagcacaagatgttcaagggcctggagagcctgaagaccctgatgctgcggagcaaccgcatcacctgtgtgggcaatgacagcttcatcggcctgagctctgtgcggctgctgagcctgtatgacaaccagatcaccaccgtggcccctggggcctttgacaccctgcacagcctgagcaccctgaacctgctggccaaccccttcaactgcaactgctacctggcctggctgggggagtggctgaggaagaagagaattgtgacaggcaacccccgctgccagaagccctacttcctgaaggagatccccatccaggatgtggccatccaggacttcacctgtgatgatggaaatgatgacaacagctgcagccccctgagccgctgccccacagagtgcacctgcctggacacagtggtgcgctgcagcaacaagggcctgaaggtgctgcccaagggcatccccagagatgtgacagagctgtacctggatggcaaccagttcaccctggtgcccaaggagctgagcaactacaagcacctgaccctgattgacctgagcaacaaccgcatcagcaccctgagcaaccagagcttcagcaacatgacccagctgctgaccctcatcctgagctacaaccggctgcgctgcatcccccccaggacctttgatggcctgaagagcctgcggctgctgagcctgcatggaaatgacatctctgtggtgcctgagggcgccttcaatgacctgagcgccctgagccacctggccatcggggccaaccccctgtactgtgactgcaacatgcagtggctgagtgactgggtgaagtctgagtacaaggagcccggcatcgcccgctgtgccggccctggagagatggctgacaagctgctgctgaccacccccagcaagaagttcacctgccagggccctgtggatgtgaacatcctggccaagtgcaacccctgcctgagcaacccctgcaagaatgatggcacctgcaacagcgaccctgtggacttctaccgctgcacctgcccctacggcttcaagggccaggactgtgatgtgcccatccacgcctgcatcagcaacccctgcaagcacggcggcacctgccacctgaaggagggggaggaggatggcttctggtgcatctgtgctgatggctttgaaggagagaactgtgaggtgaatgtggatgactgtgaagataatgactgtgagaacaacagcacctgtgtggatggcatcaacaactacacctgcctgtgccccccagagtacacaggagagctgtgtgaggagaagctggacttctgtgcccaggacctgaacccctgccagcacgacagcaagtgcatcctgacccccaagggcttcaagtgtgactgcaccccaggctacgtgggggagcactgtgacatcgactttgatgactgccaggacaacaagtgcaagaatggagcccactgcacagatgctgtgaatggctacacctgcatctgcccagagggctacagcggcctcttctgtgagttcagcccccccatggtgctgcccaggaccagcccctgtgacaactttgactgccagaatggagcccagtgcatcgtgcgcatcaatgagcccatctgccagtgcctgcccggctaccagggcgagaagtgtgagaagctggtgtctgtgaacttcatcaacaaggagagctacctgcagatccccagcgccaaggtgcggccccagaccaacatcaccctgcagatcgccacagatgaggacagcggcatcctgctgtacaagggggacaaggaccacatcgctgtggagctgtaccggggccgggtgcgggccagctatgacaccggcagccacccagccagcgccatctacagcgtggagaccatcaatgatggcaacttccacatcgtggagctgctggccctggaccagagcctgagcctgtctgtggatggcggcaaccccaagatcatcaccaacctgagcaagcagagcaccctgaactttgacagccccctgtatgtgggcggcatgcctgggaagagcaatgtggccagcctgcggcaggcccctggccagaatggcaccagcttccacggctgcatccggaacctgtacatcaacagcgagctgcaggacttccagaaggtgcccatgcagacaggcatcctgcccggctgtgagccctgccacaagaaggtgtgtgcccacggcacctgccagcccagcagccaggccggcttcacctgtgagtgccaggagggctggatgggccccctgtgtgaccagaggaccaatgacccctgcctgggcaacaagtgtgtgcacggcacctgcctgcccatcaatgccttctcctacagctgcaagtgcctggagggccatggaggagtgctgtgtgatgaggaggaggacctcttcaacccctgccaggccatcaagtgcaagcatggaaaatgtcggctgagcggcctgggccagccctactgtgaatgtagcagcggctacacaggagacagctgtgaccgggagatcagctgccgcggggagcgcatccgggactactaccagaagcagcagggctatgctgcctgccagaccaccaagaaggtgtcccggctggagtgccggggcggctgtgccggcggccagtgctgcggccccctgcggagcaagaggaggaagtacagctttgaatgtacagatggcagcagctttgtggatgaggtggagaaggtggtgaagtgtggctgcacccgctgtgtgtcctag

SEQ ID NO: 169916 - DNA, 4590 bp, synthetic construct
  misc_feature 1..4590: note = Description of Artificial Sequence: Synthetic coding sequence
  source 1..4590: mol_type = other DNA
atgagaggagtgggctggcagatgctgagcctgagcctgggcctggtgctggccatcctgaacaaggtggccccccaggcctgcccagcccagtgcagctgcagcggcagcacagtggactgccacggcctggccctgcggtctgtgcccaggaacatccccaggaacacagagcggctggacctgaatggaaacaacatcacccgcatcaccaagacagactttgctggcctgcggcacctgcgggtgctgcagctgatggagaacaagatcagcaccatcgagcggggggccttccaggacctgaaggagctggagcggctgcggctgaacagaaaccacctgcagctgtttcctgagctgctcttcctgggcacagccaagctgtaccgcctggacctgtctgagaaccagatccaggccatccccaggaaggccttcagaggagctgtggacatcaagaacctgcagctggactacaaccagatcagctgcattgaagatggagccttccgggccctgcgggacctggaggtgctgaccctgaacaacaacaacatcacccggctgtctgtggccagcttcaaccacatgcccaagctgcggaccttccggctgcacagcaacaacctgtactgtgactgccacctggcctggctgagtgactggctgcggcagaggccccgggtgggcctgtacacccagtgcatgggccccagccacctgcggggccacaacgtggccgaggtgcagaagcgggagtttgtgtgcagcggccaccagagcttcatggcccccagctgcagcgtgctgcactgcccagctgcctgcacctgcagcaacaacatcgtggactgccggggcaagggcctgacagagatccccaccaacctgcctgagaccatcacagagatccggctggagcagaacaccatcaaggtgatccccccaggggccttcagcccctacaagaagctgcggagaattgacctgagcaacaaccagatcagcgagctggccccagatgccttccagggcctgcggagcctgaacagcctggtgctgtatggcaacaagatcacagagctgcccaagagcctgtttgagggcctcttcagcctgcagctgctgctgctgaatgccaacaagatcaactgcctgcgggtggatgccttccaggacctgcacaacctgaacctgctgagcctgtatgacaacaagctgcagaccatcgccaagggcaccttcagccccctgcgggccatccagaccatgcacctggcccagaaccccttcatctgtgactgccacctgaagtggctggccgactacctgcacaccaaccccatcgagaccagcggggcccgctgcaccagcccccggcggctggccaacaagagaattggccagatcaagagcaagaagttccgctgcagcgccaaggagcagtacttcatccctggaacagaggactaccgcagcaagctgagcggggactgctttgctgacctggcctgcccagagaagtgccgctgtgagggcaccaccgtggactgcagcaaccagaagctgaacaagatccctgagcacatcccccagtacacagctgagctgcggctgaacaacaatgagttcaccgtgctggaggccaccggcatcttcaagaagctgccccagctgaggaagatcaacttcagcaacaacaagatcacagacatcgaggagggcgcctttgagggcgccagcggcgtgaatgagatcctgctgaccagcaaccggctggagaatgtgcagcacaagatgttcaagggcctggagagcctgaagaccctgatgctgcggagcaaccgcatcacctgtgtgggcaatgacagcttcatcggcctgagctctgtgcggctgctgagcctgtatgacaaccagatcaccaccgtggcccctggggcctttgacaccctgcacagcctgagcaccctgaacctgctggccaaccccttcaactgcaactgctacctggcctggctgggggagtggctgaggaagaagagaattgtgacaggcaacccccgctgccagaagccctacttcctgaaggagatccccatccaggatgtggccatccaggacttcacctgtgatgatggaaatgatgacaacagctgcagccccctgagccgctgccccacagagtgcacctgcctggacacagtggtgcgctgcagcaacaagggcctgaaggtgctgcccaagggcatccccagagatgtgacagagctgtacctggatggcaaccagttcaccctggtgcccaaggagctgagcaactacaagcacctgaccctgattgacctgagcaacaaccgcatcagcaccctgagcaaccagagcttcagcaacatgacccagctgctgaccctcatcctgagctacaaccggctgcgctgcatcccccccaggacctttgatggcctgaagagcctgcggctgctgagcctgcatggaaatgacatctctgtggtgcctgagggcgccttcaatgacctgagcgccctgagccacctggccatcggggccaaccccctgtactgtgactgcaacatgcagtggctgagtgactgggtgaagtctgagtacaaggagcccggcatcgcccgctgtgccggccctggagagatggctgacaagctgctgctgaccacccccagcaagaagttcacctgccagggccctgtggatgtgaacatcctggccaagtgcaacccctgcctgagcaacccctgcaagaatgatggcacctgcaacagcgaccctgtggacttctaccgctgcacctgcccctacggcttcaagggccaggactgtgatgtgcccatccacgcctgcatcagcaacccctgcaagcacggcggcacctgccacctgaaggagggggaggaggatggcttctggtgcatctgtgctgatggctttgaaggagagaactgtgaggtgaatgtggatgactgtgaagataatgactgtgagaacaacagcacctgtgtggatggcatcaacaactacacctgcctgtgccccccagagtacacaggagagctgtgtgaggagaagctggacttctgtgcccaggacctgaacccctgccagcacgacagcaagtgcatcctgacccccaagggcttcaagtgtgactgcaccccaggctacgtgggggagcactgtgacatcgactttgatgactgccaggacaacaagtgcaagaatggagcccactgcacagatgctgtgaatggctacacctgcatctgcccagagggctacagcggcctcttctgtgagttcagcccccccatggtgctgcccaggaccagcccctgtgacaactttgactgccagaatggagcccagtgcatcgtgcgcatcaatgagcccatctgccagtgcctgcccggctaccagggcgagaagtgtgagaagctggtgtctgtgaacttcatcaacaaggagagctacctgcagatccccagcgccaaggtgcggccccagaccaacatcaccctgcagatcgccacagatgaggacagcggcatcctgctgtacaagggggacaaggaccacatcgctgtggagctgtaccggggccgggtgcgggccagctatgacaccggcagccacccagccagcgccatctacagcgtggagaccatcaatgatggcaacttccacatcgtggagctgctggccctggaccagagcctgagcctgtctgtggatggcggcaaccccaagatcatcaccaacctgagcaagcagagcaccctgaactttgacagccccctgtatgtgggcggcatgcctgggaagagcaatgtggccagcctgcggcaggcccctggccagaatggcaccagcttccacggctgcatccggaacctgtacatcaacagcgagctgcaggacttccagaaggtgcccatgcagacaggcatcctgcccggctgtgagccctgccacaagaaggtgtgtgcccacggcacctgccagcccagcagccaggccggcttcacctgtgagtgccaggagggctggatgggccccctgtgtgaccagaggaccaatgacccctgcctgggcaacaagtgtgtgcacggcacctgcctgcccatcaatgccttctcctacagctgcaagtgcctggagggccatggaggagtgctgtgtgatgaggaggaggacctcttcaacccctgccaggccatcaagtgcaagcatggaaaatgtcggctgagcggcctgggccagccctactgtgaatgtagcagcggctacacaggagacagctgtgaccgggagatcagctgccgcggggagcgcatccgggactactaccagaagcagcagggctatgctgcctgccagaccaccaagaaggtgtcccggctggagtgccggggcggctgtgccggcggccagtgctgcggccccctgcggagcaagaggaggaagtacagctttgaatgtacagatggcagcagctttgtggatgaggtggagaaggtggtgaagtgtggctgcacccgctgtgtgtcctag

SEQ ID NO: 169917 - DNA, 4419 bp, synthetic construct
  misc_feature 1..4419: note = Description of Artificial Sequence: Synthetic coding sequence
  source 1..4419: mol_type = other DNA
atggcccctggctgggccggcgtgggcgctgctgtgcgggcccggctggccctggccctggccctggcctctgtgctgagcggccccccagctgtggcctgccccaccaagtgcacctgcagcgctgcctctgtggactgccacggcctgggcctgcgggctgtgccccggggcatccccagaaatgctgagcggctggacctggacaggaacaacatcacccgcatcaccaagatggactttgctggcctgaagaacctgcgggtgctgcacctggaggacaaccaggtgtctgtcatcgagcggggggccttccaggacctgaagcagctggagcggctgcggctgaacaagaacaagctgcaggtgctgcctgagctgctcttccagagcacccccaagctgacccggctggacctgtctgagaaccagatccagggcatccccaggaaggccttccggggcatcacagatgtgaagaacctgcagctggacaacaaccacatcagctgcattgaagatggagccttccgggccctgcgggacctggagatcctgaccctgaacaacaacaacatcagccgcatcctggtgaccagcttcaaccacatgcccaagatccgcaccctgcggctgcacagcaaccacctgtactgtgactgccacctggcctggctgagtgactggctgcggcagaggagaacagtgggccagttcaccctgtgcatggcccctgtgcacctgcggggcttcaacgtggctgatgtgcagaagaaggagtatgtgtgcccagccccccacagcgagccccccagctgcaatgccaacagcatcagctgccccagcccctgcacctgcagcaacaacatcgtggactgccggggcaagggcctgatggagatcccagccaacctgcctgagggcatcgtggagatccggctggagcagaacagcatcaaggccatcccagctggggccttcacccagtacaagaagctgaagagaattgacatcagcaagaaccagatcagtgacatcgccccagatgccttccagggcctgaagagcctgaccagcctggtgctgtatggcaacaagatcacagagatcgtgaagggcctgtttgatggcctggtgtccctgcagctgctgctgctgaatgccaacaagatcaactgcctgcgggtgaacaccttccaggacctgcagaacctgaacctgctgagcctgtatgacaacaagctgcagaccatcagcaagggcctgtttgcccccctgcagagcatccagaccctgcacctggcccagaacccctttgtgtgtgactgccacctgaagtggctggccgactacctgcaggacaaccccatcgagaccagcggggcccgctgcagcagcccccggcggctggccaacaagaggatcagccagatcaagagcaagaagttccgctgcagcggcagcgaggactaccgcagccgcttcagcagcgagtgcttcatggacctggtgtgcccagagaagtgccgctgtgagggcaccatcgtggactgcagcaaccagaagctggtgcgcatccccagccacctgcctgaatatgtgacagacctgcggctgaatgacaatgaggtgtctgtgctggaggccaccggcatcttcaagaagctgcccaacctgaggaagatcaacctgagcaacaacaagatcaaggaggtgcgggagggcgcctttgatggagctgcctctgtgcaggagctgatgctgactggaaaccagctggagaccgtgcacggccgggtcttccggggcctgagcggcctgaagaccctgatgctgcggagcaacctgattggctgtgtgtccaatgacacctttgctggcctgagctctgtgcggctgctgagcctgtatgacaaccgcatcaccaccatcacccctggggccttcaccaccctggtgtccctgagcaccatcaacctgctgagcaaccccttcaactgcaactgccacctggcctggctgggcaagtggctgaggaagagaagaattgtgtctggcaacccccgctgccagaagcccttcttcctgaaggagatccccatccaggatgtggccatccaggacttcacctgtgatggaaatgaggagagcagctgccagctgagcccccgctgcccagagcagtgcacctgcatggagaccgtggtgcgctgcagcaacaagggcctgcgggccctgccccggggcatgcccaaggatgtgacagagctgtacctggagggcaaccacctgacagctgtgccccgggagctgagcgccctgcggcacctgaccctgattgacctgagcaacaacagcatctccatgctgaccaactacaccttcagcaacatgagccacctgagcaccctcatcctgagctacaaccggctgcgctgcatccctgtgcacgccttcaacggcctgcggagcctgcgggtgctgaccctgcatggaaatgacatcagctctgtgcctgagggcagcttcaatgacctgaccagcctgagccacctggccctgggcaccaaccccctgcactgtgactgcagcctgcgctggctgtctgagtgggtgaaggccggctacaaggagcccggcatcgcccgctgcagcagccctgagcccatggctgaccggctgctgctgaccacccccacccaccgcttccagtgcaagggccctgtggacatcaacatcgtggccaagtgcaatgcctgcctgagcagcccctgcaagaacaacggcacctgcacccaggaccctgtggagctgtaccgctgtgcctgcccctacagctacaagggcaaggactgcaccgtgcccatcaacacctgcatccagaacccctgccagcacggcggcacctgccacctgagtgacagccacaaggatggcttcagctgcagctgccccctgggctttgagggccagagatgtgagatcaacccagatgactgtgaagataatgactgtgagaacaatgccacctgtgtggatggcatcaacaactacgtgtgcatctgcccccccaactacacaggagagctgtgtgatgaggtgattgaccactgtgtgcctgagctgaacctgtgccagcacgaggccaagtgcatccccctggacaagggcttcagctgtgaatgtgtgcccggctacagcggcaagctgtgtgaaacagacaatgatgactgtgtggcccacaagtgcagacatggagcccagtgtgtggacaccatcaatggctacacctgcacctgcccccagggcttcagcggccccttctgtgagcaccccccacccatggtgctgctgcagaccagcccctgtgaccagtatgagtgccagaatggagcccagtgcatcgtggtgcagcaggagcccacctgccgctgccccccaggctttgctggcccccgctgtgagaagctgatcaccgtgaactttgtgggcaaggacagctatgtggagctggccagcgccaaggtgcggccccaggccaacatcagcctgcaggtggccacagacaaggacaatggcatcctgctgtacaagggggacaatgaccccctggccctggagctgtaccagggccacgtgcggctggtgtatgacagcctgagcagcccccccaccaccgtgtacagcgtggagaccgtgaatgatggccagttccacagcgtggagctggtgaccctgaaccagaccctgaacctggtggtggacaagggcacccccaagagcctgggcaagctgcagaagcagcctgctgtgggcatcaacagccccctgtacctgggcggcatccccaccagcacaggcctgagcgccctgcggcagggcacagaccggcccctgggcggcttccacggctgcatccacgaggtgcgcatcaacaatgagctgcaggacttcaaggccctgcccccccagagcctgggcgtgtccccaggctgcaagagctgcaccgtgtgcaagcacggcctgtgccgctctgtggagaaggacagcgtggtgtgtgagtgcaggcctggctggacaggccccctgtgtgaccaggaggcccgggacccctgcctgggccaccgctgccaccacggcaaatgtgtggccaccggcaccagctacatgtgcaagtgtgccgagggctatggaggagacctgtgtgacaacaagaatgacagcgccaatgcctgcagcgccttcaagtgccaccacggccagtgccacatcagtgaccagggcgagccctactgcctgtgccagcccggcttctctggagagcactgccagcaggtgttccgggcccaggtgttccagagcagcctgcccggcaactgctcctggagctgctggccacccaggcctcccatgccctag

SEQ ID NO: 169918 - DNA, 4572 bp, synthetic construct
  misc_feature 1..4572: note = Description of Artificial Sequence: Synthetic coding sequence
  source 1..4572: mol_type = other DNA
atggcccctggctgggccggcgtgggcgctgctgtgcgggcccggctggccctggccctggccctggcctctgtgctgagcggccccccagctgtggcctgccccaccaagtgcacctgcagcgctgcctctgtggactgccacggcctgggcctgcgggctgtgccccggggcatccccagaaatgctgagcggctggacctggacaggaacaacatcacccgcatcaccaagatggactttgctggcctgaagaacctgcgggtgctgcacctggaggacaaccaggtgtctgtcatcgagcggggggccttccaggacctgaagcagctggagcggctgcggctgaacaagaacaagctgcaggtgctgcctgagctgctcttccagagcacccccaagctgacccggctggacctgtctgagaaccagatccagggcatccccaggaaggccttccggggcatcacagatgtgaagaacctgcagctggacaacaaccacatcagctgcattgaagatggagccttccgggccctgcgggacctggagatcctgaccctgaacaacaacaacatcagccgcatcctggtgaccagcttcaaccacatgcccaagatccgcaccctgcggctgcacagcaaccacctgtactgtgactgccacctggcctggctgagtgactggctgcggcagaggagaacagtgggccagttcaccctgtgcatggcccctgtgcacctgcggggcttcaacgtggctgatgtgcagaagaaggagtatgtgtgcccagccccccacagcgagccccccagctgcaatgccaacagcatcagctgccccagcccctgcacctgcagcaacaacatcgtggactgccggggcaagggcctgatggagatcccagccaacctgcctgagggcatcgtggagatccggctggagcagaacagcatcaaggccatcccagctggggccttcacccagtacaagaagctgaagagaattgacatcagcaagaaccagatcagtgacatcgccccagatgccttccagggcctgaagagcctgaccagcctggtgctgtatggcaacaagatcacagagatcgtgaagggcctgtttgatggcctggtgtccctgcagctgctgctgctgaatgccaacaagatcaactgcctgcgggtgaacaccttccaggacctgcagaacctgaacctgctgagcctgtatgacaacaagctgcagaccatcagcaagggcctgtttgcccccctgcagagcatccagaccctgcacctggcccagaacccctttgtgtgtgactgccacctgaagtggctggccgactacctgcaggacaaccccatcgagaccagcggggcccgctgcagcagcccccggcggctggccaacaagaggatcagccagatcaagagcaagaagttccgctgcagcggcagcgaggactaccgcagccgcttcagcagcgagtgcttcatggacctggtgtgcccagagaagtgccgctgtgagggcaccatcgtggactgcagcaaccagaagctggtgcgcatccccagccacctgcctgaatatgtgacagacctgcggctgaatgacaatgaggtgtctgtgctggaggccaccggcatcttcaagaagctgcccaacctgaggaagatcaacctgagcaacaacaagatcaaggaggtgcgggagggcgcctttgatggagctgcctctgtgcaggagctgatgctgactggaaaccagctggagaccgtgcacggccgggtcttccggggcctgagcggcctgaagaccctgatgctgcggagcaacctgattggctgtgtgtccaatgacacctttgctggcctgagctctgtgcggctgctgagcctgtatgacaaccgcatcaccaccatcacccctggggccttcaccaccctggtgtccctgagcaccatcaacctgctgagcaaccccttcaactgcaactgccacctggcctggctgggcaagtggctgaggaagagaagaattgtgtctggcaacccccgctgccagaagcccttcttcctgaaggagatccccatccaggatgtggccatccaggacttcacctgtgatggaaatgaggagagcagctgccagctgagcccccgctgcccagagcagtgcacctgcatggagaccgtggtgcgctgcagcaacaagggcctgcgggccctgccccggggcatgcccaaggatgtgacagagctgtacctggagggcaaccacctgacagctgtgccccgggagctgagcgccctgcggcacctgaccctgattgacctgagcaacaacagcatctccatgctgaccaactacaccttcagcaacatgagccacctgagcaccctcatcctgagctacaaccggctgcgctgcatccctgtgcacgccttcaacggcctgcggagcctgcgggtgctgaccctgcatggaaatgacatcagctctgtgcctgagggcagcttcaatgacctgaccagcctgagccacctggccctgggcaccaaccccctgcactgtgactgcagcctgcgctggctgtctgagtgggtgaaggccggctacaaggagcccggcatcgcccgctgcagcagccctgagcccatggctgaccggctgctgctgaccacccccacccaccgcttccagtgcaagggccctgtggacatcaacatcgtggccaagtgcaatgcctgcctgagcagcccctgcaagaacaacggcacctgcacccaggaccctgtggagctgtaccgctgtgcctgcccctacagctacaagggcaaggactgcaccgtgcccatcaacacctgcatccagaacccctgccagcacggcggcacctgccacctgagtgacagccacaaggatggcttcagctgcagctgccccctgggctttgagggccagagatgtgagatcaacccagatgactgtgaagataatgactgtgagaacaatgccacctgtgtggatggcatcaacaactacgtgtgcatctgcccccccaactacacaggagagctgtgtgatgaggtgattgaccactgtgtgcctgagctgaacctgtgccagcacgaggccaagtgcatccccctggacaagggcttcagctgtgaatgtgtgcccggctacagcggcaagctgtgtgaaacagacaatgatgactgtgtggcccacaagtgcagacatggagcccagtgtgtggacaccatcaatggctacacctgcacctgcccccagggcttcagcggccccttctgtgagcaccccccacccatggtgctgctgcagaccagcccctgtgaccagtatgagtgccagaatggagcccagtgcatcgtggtgcagcaggagcccacctgccgctgccccccaggctttgctggcccccgctgtgagaagctgatcaccgtgaactttgtgggcaaggacagctatgtggagctggccagcgccaaggtgcggccccaggccaacatcagcctgcaggtggccacagacaaggacaatggcatcctgctgtacaagggggacaatgaccccctggccctggagctgtaccagggccacgtgcggctggtgtatgacagcctgagcagcccccccaccaccgtgtacagcgtggagaccgtgaatgatggccagttccacagcgtggagctggtgaccctgaaccagaccctgaacctggtggtggacaagggcacccccaagagcctgggcaagctgcagaagcagcctgctgtgggcatcaacagccccctgtacctgggcggcatccccaccagcacaggcctgagcgccctgcggcagggcacagaccggcccctgggcggcttccacggctgcatccacgaggtgcgcatcaacaatgagctgcaggacttcaaggccctgcccccccagagcctgggcgtgtccccaggctgcaagagctgcaccgtgtgcaagcacggcctgtgccgctctgtggagaaggacagcgtggtgtgtgagtgcaggcctggctggacaggccccctgtgtgaccaggaggcccgggacccctgcctgggccaccgctgccaccacggcaaatgtgtggccaccggcaccagctacatgtgcaagtgtgccgagggctatggaggagacctgtgtgacaacaagaatgacagcgccaatgcctgcagcgccttcaagtgccaccacggccagtgccacatcagtgaccagggcgagccctactgcctgtgccagcccggcttctctggagagcactgccagcaggagaacccctgcctgggccaggtggtgcgggaggtgatccggcggcagaagggctacgccagctgtgccacagccagcaaggtgcccatcatggagtgccggggcggctgcggcccccagtgctgccagcccaccaggagcaagaggaggaaatatgtgttccagtgcacagatggcagcagctttgtggaggaggtggagcggcacctggagtgtggctgcctggcctgcagctag

SEQ ID NO: 169919 - DNA, 3258 bp, synthetic construct
  misc_feature 1..3258: note = Description of Artificial Sequence: Synthetic coding sequence
  source 1..3258: mol_type = other DNA
atgagcacccccagccgcttcaagaaggacaaggagatcatcgccgagtatgagagccaggtgaaggagatccgggcccagctggtggagcagcagaagtgcctggagcagcagacagagatgagggtgcagctgctgcaggacctgcaggacttcttcaggaagaaggccgagattgaaacagagtacagcaggaacctggagaagctggccgagcgcttcatggccaagaccaggagcaccaaggaccaccagcagtacaagaaggaccagaacctgctgagccctgtgaactgctggtacctgctgctgaaccaggtgcggcgggagagcaaggaccacgccaccctgagtgacatctacctgaacaacgtcatcatgaggttcatgcagatcagcgaggacagcaccaggatgttcaagaagagcaaggagatcgccttccagctgcacgaggacctgatgaaggtgctgaatgagctgtacacagtgatgaagacctaccacatgtaccacgccgagagcatctctgctgagagcaagctgaaggaggccgagaagcaggaggagaagcagatcggccgcagcggggaccctgtgttccacatccggctggaggagcggcaccagaggaggagctctgtgaagaagattgagaagatgaaggagaagaggcaggccaagtacagcgagaacaagctgaagagcatcaaggccagaaatgagtacctgctgaccctggaggccaccaatgcctctgtgttcaagtactacatccatgacctgagtgacctgattgactgctgtgacctgggctaccacgccagcctgaacagagccctgcggacctacctgtctgctgagtacaacctggagaccagcagacatgagggcctggacatcattgaaaatgctgtggacaacctggagcccaggagtgacaagcagcgcttcatggagatgtacccagctgccttctgcccccccatgaagtttgagttccagagccacatgggagatgaggtgtgccaggtgtctgcccagcagcctgtgcaggccgagctgatgctgcgctaccagcagctgcagagccggctggccaccctgaagattgaaaatgaggaggtgaagaagaccacagaggccaccctgcagaccatccaggacatggtgaccatcgaggactatgatgtgtctgagtgcttccagcacagccgcagcacagagagcgtgaagagcacagtgtctgagacctacctgagcaagcccagcatcgccaagaggcgggccaaccagcaggagacagagcagttctacttcatgaagctgcgggagtacctggagggcagcaacctgatcaccaagctgcaggccaagcatgacctgctgcagaggaccctgggggagggccacagagctgagtacatgaccacccggccccccaacgtgccccccaagccccagaagcacaggaagagccggcccaggagccagtacaacaccaagctgttcaatggagacctggagacctttgtgaaggacagcggccaggtgatccccctcatcgtggagagctgcatccgcttcatcaacctgtatggcctgcagcaccagggcatcttccgggtgtctggcagccaggtggaggtgaatgacatcaagaacagctttgaaagaggagagaaccccctggctgatgaccagagcaaccacgacatcaacagcgtggccggcgtgctgaagctgtacttccggggcctggagaaccccctcttccccaaggagcgcttcaatgacctgatcagctgcatcagaattgacaacctgtatgaaagagccctgcacatcaggaagctgctgctgaccctgcccaggtctgtgctgattgtgatgagatacctgtttgccttcctgaaccacctgagccagtacagtgatgagaacatgatggacccctacaacctggccatctgcttcggccccaccctgatgcctgtgcctgagatccaggaccaggtgtcctgccaggcccacgtgaatgagatcatcaagaccatcatcatccaccacgagaccatcttcccagatgccaaggagctggatggccctgtgtatgagaagtgcatggctggagatgactactgtgacagcccctacagcgagcacggcaccctggaggaggtggaccaggatgctggaacagagccccacaccagtgaagatgaatgtgagcccatcgaggccatcgccaagtttgattatgtgggccgcagcgcccgggagctgtccttcaagaagggggccagcctgctgctgtaccaccgggccagcgaggactggtgggagggccgccacaacggcattgatggcctggtgccccaccagtacatcgtggtgcaggacatggatgacaccttcagtgacaccctgagccagaaggctgacagcgaggccagcagcggccctgtgacagaggacaagagcagcagcaaggacatgaacagccccacagacagacacccagatggctacctggcccggcagaggaagagaggagagcccccacctcctgtgagaagacctggccgcaccagtgatggccactgccccctgcacccccctcatgccctgagcaacagctctgtggacctgggcagccccagcctggccagccacccccggggcctgctgcagaacagaggcctgaacaatgacagccctgagaggagaagaagacctggccacggcagcctgaccaacatcagcagacatgacagcctgaagaagattgacagcccccccatccgccgcagcaccagcagcggccagtacacaggcttcaatgaccacaagcccctggaccctgagaccatcgcccaggacatcgaggagaccatgaacacagccctgaatgagctgcgggagctggagcggcagagcacagccaagcacgccccagatgtggtgctggacaccctggagcaggtgaagaacagccccaccccagccaccagcacagagagcctgagccccctgcacaacgtggccctgcggagcagcgagccccagatcagaagaagcaccagcagcagcagtgacaccatgagcaccttcaagcccatggtggcccccaggatgggcgtgcagctgaagcccccagccctgcggcccaagccagctgtgctgcccaagaccaaccccaccatcggccctgcccccccaccccagggccccacagacaagagctgcaccatgtag

SEQ ID NO: 169920 - DNA, 3189 bp, synthetic construct
  misc_feature 1..3189: note = Description of Artificial Sequence: Synthetic coding sequence
  source 1..3189: mol_type = other DNA
atgagcacccccagccgcttcaagaaggacaaggagatcatcgccgagtatgagagccaggtgaaggagatccgggcccagctggtggagcagcagaagtgcctggagcagcagacagagatgagggtgcagctgctgcaggacctgcaggacttcttcaggaagaaggccgagattgaaacagagtacagcaggaacctggagaagctggccgagcgcttcatggccaagaccaggagcaccaaggaccaccagcagtacaagaaggaccagaacctgctgagccctgtgaactgctggtacctgctgctgaaccaggtgcggcgggagagcaaggaccacgccaccctgagtgacatctacctgaacaacgtcatcatgaggttcatgcagatcagcgaggacagcaccaggatgttcaagaagagcaaggagatcgccttccagctgcacgaggacctgatgaaggtgctgaatgagctgtacacagtgatgaagacctaccacatgtaccacgccgagagcatctctgctgagagcaagctgaaggaggccgagaagcaggaggagaagcagatcggccgcagcggggaccctgtgttccacatccggctggaggagcggcaccagaggaggagctctgtgaagaagattgagaagatgaaggagaagaggcaggccaagtacagcgagaacaagctgaagagcatcaaggccagaaatgagtacctgctgaccctggaggccaccaatgcctctgtgttcaagtactacatccatgacctgagtgacctgattgactgctgtgacctgggctaccacgccagcctgaacagagccctgcggacctacctgtctgctgagtacaacctggagaccagcagacatgagggcctggacatcattgaaaatgctgtggacaacctggagcccaggagtgacaagcagcgcttcatggagatgtacccagctgccttctgcccccccatgaagtttgagttccagagccacatgggagatgaggtgtgccaggtgtctgcccagcagcctgtgcaggccgagctgatgctgcgctaccagcagctgcagagccggctggccaccctgaagattgaaaatgaggaggtgaagaagaccacagaggccaccctgcagaccatccaggacatggtgaccatcgaggactatgatgtgtctgagtgcttccagcacagccgcagcacagagagcgtgaagagcacagtgtctgagacctacctgagcaagcccagcatcgccaagaggcgggccaaccagcaggagacagagcagttctacttcatgaagctgcgggagtacctggagggcagcaacctgatcaccaagctgcaggccaagcatgacctgctgcagaggaccctgggggagggccacagagctgagtacatgaccaccagccggggcagaagaaacagccacaccaggcaccaggacagcggccaggtgatccccctgattgtggagagctgcatccgcttcatcaacctgtatggcctgcagcaccagggcatcttccgggtgtctggcagccaggtggaggtgaatgacatcaagaacagctttgagcggggggagaaccccctggctgatgaccagagcaaccacgacatcaacagcgtggccggcgtgctgaagctgtacttccggggcctggagaaccccctcttccccaaggagcgcttcaatgacctgatcagctgcatcagaattgacaacctgtatgagcgggccctgcacatcaggaagctgctgctgaccctgcccaggtctgtgctgattgtgatgagatacctgtttgccttcctgaaccacctgagccagtacagtgatgagaacatgatggacccctacaacctggccatctgcttcggccccaccctgatgcctgtgcctgagatccaggaccaggtgtcctgccaggcccacgtgaatgagatcatcaagaccatcatcatccaccacgagaccatcttcccagatgccaaggagctggatggccctgtgtatgagaagtgcatggctggagatgactactgtgacagcccctacagcgagcacggcaccctggaggaggtggaccaggatgctggaacagagccccacaccagtgaagatgaatgtgagcccatcgaggccatcgccaagtttgattatgtgggccgcagcgcccgggagctgtccttcaagaagggggccagcctgctgctgtaccaccgggccagcgaggactggtgggagggccgccacaatggaattgatggcctggtgccccaccagtacatcgtggtgcaggacatggatgacaccttcagtgacaccctgagccagaaggctgacagcgaggccagcagcggccctgtgacagaggacaagagcagcagcaaggacatgaacagccccacagacagacacccagatggctacctggcccggcagaggaagagaggagagcccccacctcctgtgcggcggcccggccgcaccagtgatggccactgccccctgcaccccccccacgccctgagcaacagctctgtggacctgggcagccccagcctggccagccacccccggggcctgctgcagaacagaggcctgaacaatgacagccctgagaggagaagaagacctggccacggcagcctgaccaacatcagcagacatgacagcctgaagaagattgacagcccccccatcagaagaagcaccagcagcggccagtacacaggcttcaatgaccacaagcccctggaccctgagaccatcgcccaggacatcgaggagaccatgaacacagccctgaatgagctgcgggagctggagcggcagagcacagccaagcacgccccagatgtggtgctggacaccctggagcaggtgaagaacagccccaccccagccaccagcacagagagcctgagccccctgcacaacgtggccctgcggagcagcgagccccagatccgccgcagcaccagcagcagcagtgacaccatgagcaccttcaagcccatggtggcccccaggatgggcgtgcagctgaagcccccagccctgcggcccaagccagctgtgctgcccaagaccaaccccaccatcggccctgcccccccaccccagggccccacagacaagagctgcaccatgtag

SEQ ID NO: 169921 - DNA, 2958 bp, synthetic construct
  misc_feature 1..2958: note = Description of Artificial Sequence: Synthetic coding sequence
  source 1..2958: mol_type = other DNA
tgaaaagaccagaatgtgctgagccctgtgaactgctggaacctgctgctgaaccaggtgaagcgggagagccgggaccacaccaccctgagtgacatctacctgaacaacatcatccccaggtttgtgcaggtgtctgaagattctggccgcctcttcaagaagagcaaggaggtgggccagcagctgcaggatgacctgatgaaggtgctgaatgagctgtacagcgtgatgaagacctaccacatgtacaatgctgacagcatcagcgcccagagcaagctgaaggaggccgagaagcaggaggagaagcagatcggcaagtctgtgaagcaggaggaccggcagacccccaggagcccagacagcacagccaacgtgagaattgaggagaagcacgtgagaagaagctctgtgaagaagattgagaagatgaaggagaagaggcaggccaagtacacagagaacaagctgaaggccatcaaggccagaaatgagtacctgctggccctggaggccaccaatgcctctgtgttcaagtactacatccatgacctgagtgacctgattgaccagtgctgtgacctgggctaccacgccagcctgaacagagccctgcggaccttcctgtctgctgagctgaacctggagcagagcaagcatgagggcctggatgccattgaaaatgctgtggagaacctggatgccaccagtgacaagcagaggctgatggagatgtacaacaacgtgttctgcccccccatgaagtttgagttccagccccacatgggagacatggccagccagctgtgtgcccagcagcctgtgcagagcgagctggtgcagcgctgccagcagctgcagagccggctgagcaccctgaagattgaaaatgaggaggtgaagaagaccatggaggccaccctgcagaccatccaggacatcgtgacagtggaggactttgatgtgtctgactgcttccagtacagcaacagcatggagagcgtgaagagcacagtgtctgagaccttcatgagcaagcccagcatcgccaagagaagagccaaccagcaggagacagagcagttctacttcaccaagatgaaggagtacctggagggcaggaacctgatcaccaagctgcaggccaagcatgacctgctgcagaagaccctgggggagagccagaggacagactgcagcctggcccggcgcagcagcacagtgaggaagcaggacagcagccaggccatccccctggtggtggagagctgcatccgcttcatcagccgccacggcctgcagcacgagggcatcttccgggtgtctggcagccaggtggaggtgaatgacatcaagaatgcctttgagcggggggaggaccccctggccggggaccagaatgaccatgacatggacagcattgctggggtgctgaagctgtacttccggggcctggagcaccccctcttccccaaggacatcttccatgacctgatggcctgtgtgaccatggacaacctgcaggagcgggccctgcacatcaggaaggtgctgctggtgctgcccaagaccaccctcatcatcatgagatacctgtttgccttcctgaaccacctgagccagttcagcgaggagaacatgatggacccctacaacctggccatctgcttcggccccagcctgatgtctgtgcctgagggccatgaccaggtgtcctgccaggcccacgtgaatgaactcatcaagaccatcatcatccagcacgagaacatcttccccagcccccgggagctggagggccctgtgtacagcagaggaggctccatggaggactactgtgacagcccccacggggagaccacctctgtggaggacagcacccaggatgtgacagctgagcaccacaccagtgatgatgaatgtgagcccatcgaggccatcgccaagtttgattatgtgggccgcacagcccgggagctgtccttcaagaagggggccagcctgctgctgtaccagagggccagtgatgactggtgggagggccgccacaatggaattgatggcctcatcccccaccagtacatcgtggtgcaggacacagaagatggagtggtggagaggagcagccccaagtcagaaattgaagtcatcagcgagcccccagaggagaaggtgacagcccgggccggggccagctgccccagcggcggccacgtggccgacatctacctggccaacatcaacaagcagaggaagaggcctgagagcggcagcatcaggaagaccttcagaagtgacagccacggcctgagcagcagcctgacagacagcagcagccctggggtgggcgccagctgccggcccagcagccagcccatcatgagccagagcctgcccaaggagggccctgacaagtgcagcatcagcggccacggcagcctgaacagcatcagccgccacagcagcctgaagaaccggctggacagcccccagatcaggaagacagccacagctggccgcagcaagagcttcaacaaccaccggcccatggaccctgaggtgattgcccaggacatcgaggccaccatgaacagcgccctgaatgagctgcgggagctggagcggcagagctctgtgaagcacaccccagatgtggtgctggacaccctggagcccctgaagaccagccctgtggtggcccccaccagcgagcccagcagccccctgcacacccagctgctgaaggaccctgagcccgccttccagaggtctgccagcacagctggggacatcgcctgtgccttccggcctgtgaagtctgtgaagatggccgcccctgtgaagcccccagccacccggcccaagcccaccgtcttccccaagaccaatgccaccagccctggggtgaacagcagcaccagcccccagagcacagacaagagctgcaccgtgtag

SEQ ID NO: 169922 - DNA, 2796 bp, synthetic construct
  misc_feature 1..2796: note = Description of Artificial Sequence: Synthetic coding sequence
  source 1..2796: mol_type = other DNA
cagagcaaggaggtgggccagcagctgcaggatgacctgatgaaggtgctgaatgagctgtacagcgtgatgaagacctaccacatgtacaatgctgacagcatcagcgcccagagcaagctgaaggaggccgagaagcaggaggagaagcagatcggcaagtctgtgaagcaggaggaccggcagacccccaggagcccagacagcacagccaacgtgagaattgaggagaagcacgtgagaagaagctctgtgaagaagattgagaagatgaaggagaagaggcaggccaagtacacagagaacaagctgaaggccatcaaggccagaaatgagtacctgctggccctggaggccaccaatgcctctgtgttcaagtactacatccatgacctgagtgacctgattgaccagtgctgtgacctgggctaccacgccagcctgaacagagccctgcggaccttcctgtctgctgagctgaacctggagcagagcaagcatgagggcctggatgccattgaaaatgctgtggagaacctggatgccaccagtgacaagcagaggctgatggagatgtacaacaacgtgttctgcccccccatgaagtttgagttccagccccacatgggagacatggccagccagctgtgtgcccagcagcctgtgcagagcgagctggtgcagcgctgccagcagctgcagagccggctgagcaccctgaagattgaaaatgaggaggtgaagaagaccatggaggccaccctgcagaccatccaggacatcgtgacagtggaggactttgatgtgtctgactgcttccagtacagcaacagcatggagagcgtgaagagcacagtgtctgagaccttcatgagcaagcccagcatcgccaagagaagagccaaccagcaggagacagagcagttctacttcaccaagatgaaggagtacctggagggcaggaacctgatcaccaagctgcaggccaagcatgacctgctgcagaagaccctgggggagagccagaggacagactgcagcctggcccggcgcagcagcacagtgaggaagcaggacagcagccaggccatccccctggtggtggagagctgcatccgcttcatcagccgccacggcctgcagcacgagggcatcttccgggtgtctggcagccaggtggaggtgaatgacatcaagaatgcctttgagcggggggaggaccccctggccggggaccagaatgaccatgacatggacagcattgctggggtgctgaagctgtacttccggggcctggagcaccccctcttccccaaggacatcttccatgacctgatggcctgtgtgaccatggacaacctgcaggagcgggccctgcacatcaggaaggtgctgctggtgctgcccaagaccaccctcatcatcatgagatacctgtttgccttcctgaaccacctgagccagttcagcgaggagaacatgatggacccctacaacctggccatctgcttcggccccagcctgatgtctgtgcctgagggccatgaccaggtgtcctgccaggcccacgtgaatgaactcatcaagaccatcatcatccagcacgagaacatcttccccagcccccgggagctggagggccctgtgtacagcagaggaggctccatggaggactactgtgacagcccccacggggagaccacctctgtggaggacagcacccaggatgtgacagctgagcaccacaccagtgatgatgaatgtgagcccatcgaggccatcgccaagtttgattatgtgggccgcacagcccgggagctgtccttcaagaagggggccagcctgctgctgtaccagagggccagtgatgactggtgggagggccgccacaatggaattgatggcctcatcccccaccagtacatcgtggtgcaggacacagaagatggagtggtggagaggagcagccccaagtcagaaattgaagtcatcagcgagcccccagaggagaaggtgacagcccgggccggggccagctgccccagcggcggccacgtggccgacatctacctggccaacatcaacaagcagaggaagaggcctgagagcggcagcatcaggaagaccttcagaagtgacagccacggcctgagcagcagcctgacagacagcagcagccctggggtgggcgccagctgccggcccagcagccagcccatcatgagccagagcctgcccaaggagggccctgacaagtgcagcatcagcggccacggcagcctgaacagcatcagccgccacagcagcctgaagaaccggctggacagcccccagatcaggaagacagccacagctggccgcagcaagagcttcaacaaccaccggcccatggaccctgaggtgattgcccaggacatcgaggccaccatgaacagcgccctgaatgagctgcgggagctggagcggcagagctctgtgaagcacaccccagatgtggtgctggacaccctggagcccctgaagaccagccctgtggtggcccccaccagcgagcccagcagccccctgcacacccagctgctgaaggaccctgagcccgccttccagaggtctgccagcacagctggggacatcgcctgtgccttccggcctgtgaagtctgtgaagatggccgcccctgtgaagcccccagccacccggcccaagcccaccgtcttccccaagaccaatgccaccagccctggggtgaacagcagcaccagcccccagagcacagacaagagctgcaccgtgtag

SEQ ID NO: 169923 - DNA, 2112 bp, synthetic construct
  misc_feature 1..2112: note = Description of Artificial Sequence: Synthetic coding sequence
  source 1..2112: mol_type = other DNA
aggaaggaccagaatgtgctgagccctgtgaactgctggaacctgctgctgaaccaggtgaagcgggagagccgggaccacaccaccctgagtgacatctacctgaacaacatcatccccaggtttgtgcaggtgtctgaagattctggccgcctcttcaagaagagcaaggaggtgggccagcagctgcaggatgacctgatgaaggtgctgaatgagctgtacagcgtgatgaagacctaccacatgtacaatgctgacagcatcagcgcccagagcaagctgaaggaggccgagaagcaggaggagaagcagatcggcaagtctgtgaagcaggaggaccggcagacccccaggagcccagacagcacagccaacgtgagaattgaggagaagcacgtgagaagaagctctgtgaagaagattgagaagatgaaggagaagaggcaggccaagtacacagagaacaagctgaaggccatcaaggccagaaatgagtacctgctggccctggaggccaccaatgcctctgtgttcaagtactacatccatgacctgagtgacctgattgactgctgtgacctgggctaccacgccagcctgaacagagccctgcggaccttcctgtctgctgagctgaacctggagcagagcaagcatgagggcctggatgccattgaaaatgctgtggagaacctggatgccaccagtgacaagcagaggctgatggagatgtacaacaacgtgttctgcccccccatgaagtttgagttccagccccacatgggagacatggccagccagctgtgtgcccagcagcctgtgcagagcgagctggtgcagcgctgccagcagctgcagagccggctgagcaccctgaagattgaaaatgaggaggtgaagaagaccatggaggccaccctgcagaccatccaggacatcgtgacagtggaggactttgatgtgtctgactgcttccagtacagcaacagcatggagagcgtgaagagcacagtgtctgagaccttcatgagcaagcccagcatcgccaagaggcgggccaaccagcaggagacagagcagttctacttcaccaagatgaaggagtacctggagggcaggaacctgatcaccaagctgcaggccaagcatgacctgctgcagaagaccctgggggagagccagaggacagactgcagcctggcccggcgcagcagcacagtgaggaagcaggacagcagccaggccatccccctggtggtggagagctgcatccgcttcatcagcagacatggcctgcagcacgagggcatcttccgggtgtctggcagccaggtggaggtgaatgacatcaagaatgcctttgaaagaggagaggaccccctggccggggaccagaatgaccatgacatggacagcattgctggggtgctgaagctgtacttccggggcctggagcaccccctcttccccaaggacatcttccatgacctgatggcctgtgtgaccatggacaacctgcaggagcgggccctgcacatcaggaaggtgctgctggtgctgcccaagaccaccctcatcatcatgagatacctgtttgccttcctgaaccacctgagccagttcagcgaggagaacatgatggacccctacaacctggccatctgcttcggccccagcctgatgtctgtgcctgagggccatgaccaggtgtcctgccaggcccacgtgaatgagctgatcaagaccatcatcatccagcacgagaacatcttccccagcccccgggagctggagggccctgtgtacagccggggcggctccatggaggactactgtgacagcccccatggagagaccacctctgtggaggacagcacccaggatgtgacagctgagcaccacaccagtgatgatgaatgtgagcccatcgaggccatcgccaagtttgattatgtgggccgcacagcccgggagctgtccttcaagaagggggccagcctgctgctgtaccagagggccagtgatgactggtgggagggccgccacaacggcattgatggcctcatcccccaccagtacatcgtggtgcaggacaccctcatctcctag

SEQ ID NO: 169924 - DNA, 759 bp, synthetic construct
  misc_feature 1..759: note = Description of Artificial Sequence: Synthetic coding sequence
  source 1..759: mol_type = other DNA
atggaggactactgtgacagcccccatggagagaccacctctgtggaggacagcacccaggatgtgacagctgagcaccacaccagtgatgatgaatgtgagcccatcgaggccatcgccaagtttgattatgtgggccgcacagcccgggagctgtccttcaagaagggggccagcctgctgctgtaccagagggccagtgatgactggtgggagggccgccacaacggcattgatggcctcatcccccaccagtacatcgtggtgcaggacacagaagatggagtggtggagaggagcagccccaagtcagaaattgaggtgatcagcgagcccccagaggagaaggtgacagcccgggccggggccagctgccccagcggcggccacgtggccgacatctacctggccaacatcaacaacaacctgcacctggacaacaccaagcctgtgaccaccaagcagaggaagaggcctgagagcggcagcatcaggaagaccttcagaagtgacagccacggcctgagcagcagcctgacagacagcagcagccctggggtgggcgccagctgccggcccagcagccagcccatcatgagccagagcctgcccaaggagggccctgacaagtgcagcatcagcggccacggcagcctgaacagcatcagccgccacagcagcctgaagaaccggctggacagcccccagatcaggaagacagccacagctggccgcagcaagagcttcaacaaccactag

SEQ ID NO: 169925 - DNA, 693 bp, synthetic construct
  misc_feature 1..693: note = Description of Artificial Sequence: Synthetic coding sequence
  source 1..693: mol_type = other DNA
tgagctgagcaccacaccagtgatgatgaatgtgagcccatcgaggccatcgccaagtttgattatgtgggccgcacagcccgggagctgtccttcaagaagggggccagcctgctgctgtaccagagggccagtgatgactggtgggagggccgccacaacggcattgatggcctcatcccccaccagtacatcgtggtgcaggacacagaagatggagtggtggagaggagcagccccaagtcagaaattgaggtgatcagcgagcccccagaggagaaggtgacagcccgggccggggccagctgccccagcggcggccacgtggccgacatctacctggccaacatcaacaacaacctgcacctggacaacaccaagcctgtgaccaccaagcagaggaagaggcctgagagcggcagcatcaggaagaccttcagaagtgacagccacggcctgagcagcagcctgacagacagcagcagccctggggtgggcgccagctgccggcccagcagccagcccatcatgagccagagcctgcccaaggagggccctgacaagtgcagcatcagcggccacggcagcctgaacagcatcagccgccacagcagcctgaagaaccggctggacagcccccagatcaggaagacagccacagctggccgcagcaagagcttcaacaaccactag

SEQ ID NO: 169926 - DNA, 1353 bp, synthetic construct
  misc_feature 1..1353: note = Description of Artificial Sequence: Synthetic coding sequence
  source 1..1353: mol_type = other DNA
gtgaagaagaccatggaggccaccctgcagaccatccaggacatcgtgacagtggaggactttgatgtgtctgactgcttccagtacagcaacagcatggagagcgtgaagagcacagtgtctgagaccttcatgagcaagcccagcatcgccaagagaagagccaaccagcaggagacagagcagttctacttcaccaagatgaaggagtacctggagggcaggaacctgatcaccaagctgcaggccaagcatgacctgctgcagaagaccctgggggagagccagaggacagactgcagcctggcccggcgcagcagcacagtgaggaagcaggacagcagccaggccatccccctggtggtggagagctgcatccgcttcatcagccgccacggcctgcagcacgagggcatcttccgggtgtctggcagccaggtggaggtgaatgacatcaagaatgcctttgagcggggggaggaccccctggccggggaccagaatgaccatgacatggacagcattgctggggtgctgaagctgtacttccggggcctggagcaccccctcttccccaaggacatcttccatgacctgatggcctgtgtgaccatggacaacctgcaggagcgggccctgcacatcaggaaggtgctgctggtgctgcccaagaccaccctcatcatcatgagatacctgtttgccttcctgaaccacctgagccagttcagcgaggagaacatgatggacccctacaacctggccatctgcttcggccccagcctgatgtctgtgcctgagggccatgaccaggtgtcctgccaggcccacgtgaatgaactcatcaagaccatcatcatccagcacgagaacatcttccccagcccccgggagctggagggccctgtgtacagcagaggaggctccatggaggactactgtgacagcccccacggggagaccacctctgtggaggacagcacccaggatgtgacagctgagcaccacaccagtgatgatgaatgtgagcccatcgaggccatcgccaagtttgattatgtgggccgcacagcccgggagctgtccttcaagaagggggccagcctgctgctgtaccagagggccagtgatgactggtgggagggccgccacaatggaattgatggcctcatcccccaccagtacatcgtggtgcaggacacagaagatggagtggtggagaggagcagccccaagtcagaaattgaagtcatcagcgagcccccagaggagaaggtgacagcccgggccggggccagctgccccagcggcggccacgtggccgacatctacctggccaacatcaacaagtag

SEQ ID NO: 169927 - DNA, 3228 bp, synthetic construct
  misc_feature 1..3228: note = Description of Artificial Sequence: Synthetic coding sequence
  source 1..3228: mol_type = other DNA
atgagcagccagaccaagttcaagaaggacaaggagatcatcgccgagtatgaggcccagatcaaggagatccgcacccagctggtggagcagttcaagtgcctggagcagcagagcgagagccggctgcagctgctgcaggacctgcaggagttcttccggaggaaggccgagattgagctggagtacagccgcagcctggagaagctggccgagcgcttcagcagcaagatccgcagcagccgggagcaccagttcaagaaggaccagtacctgctgagccctgtgaactgctggtacctggtgctgcaccagacccggcgggagagccgggaccacgccaccctgaatgacatcttcatgaacaacgtgattgtgcggctgagccagatcagtgaagatgtgatccgcctcttcaagaagagcaaggagatcggcctgcagatgcatgaggagctgctgaaggtgaccaatgagctgtacacagtgatgaagacctaccacatgtaccacgccgagagcatctctgctgagagcaagctgaaggaggccgagaagcaggaggagaagcagttcaacaagagcggggacctgtccatgaacctgctgcggcatgaggaccggccccagaggaggagctctgtgaagaagattgagaagatgaaggagaagaggcaggccaagtacagcgagaacaagctgaagtgcaccaaggccagaaatgactacctgctgaacctggccgccaccaatgctgccatcagcaagtactacatccatgatgtgtctgacctgattgactgctgtgacctgggcttccacgccagcctggcccggaccttccgcacctacctgtctgctgagtacaacctggagaccagcagacatgagggcctggatgtgattgaaaatgctgtggacaacctggacagcagaagtgacaagcacacagtgatggacatgtgcaaccaggtgttctgcccccccctgaagtttgagttccagccccacatgggagatgaggtgtgccaggtgtctgcccagcagcctgtgcagacagagctgctgatgagataccaccagctgcagagccggctggccaccctgaagattgaaaatgaggaggtgaggaagaccctggatgccaccatgcagaccctgcaggacatgctgactgtggaggactttgatgtgtctgatgccttccagcacagccgcagcacagagagcgtgaagtctgctgccagcgagacctacatgagcaagatcaacatcgccaagaggcgggccaaccagcaggagacagagatgttctacttcaccaagttcaaggagtatgtgaatggcagcaacctgatcaccaagctgcaggccaagcatgacctgctgaagcagaccctgggggagggggagcgggcagaatgtggcaccacccggggcagaagaaatgcccggaccaggaaccaggacagcggccaggccatccccctggtggtggagagctgcatccgctacatcaacctgtatggcctgcagcagcagggcatcttccgggtgcccggcagccaggtggaggtgaatgacatcaagaacagctttgaaagaggagaggaccccctggtggatgaccagaatgaaagagacatcaacagcgtggccggcgtgctgaagctgtacttccggggcctggagaaccccctcttccccaaggagcgcttccaggacctgatcagcaccatcaagctggagaacccagctgagcgggtgcaccagatccagcagatcctggtgaccctgccccgggtggtgattgtggtgatgagatacctgtttgccttcctgaaccacctgagccagtacagtgatgagaacatgatggacccctacaacctggccatctgcttcggccccaccctgatgcacatcccagatggccaggaccctgtgtcctgccaggcccacatcaatgaggtgatcaagaccatcatcatccaccacgaggccatcttccccagcccccgggagctggagggccctgtgtatgagaagtgcatggccggcggggaggagtactgtgacagcccccacagcgagcccggggccattgatgaggtggaccatgacaatggaacagagccccacaccagtgatgaggaggtggagcagatcgaggccatcgccaagtttgactacatgggccgcagcccccgggagctgtccttcaagaagggggccagcctgctgctgtaccaccgggccagcgaggactggtgggagggccgccacaatggagtggatggcctcatcccccaccagtacatcgtggtgcaggacatggatgatgccttcagtgacagcctgagccagaaggctgacagcgaggccagcagcggccccctgctggatgacaaggccagcagcaagaatgacctgcagagccccacagagcacatcagtgactatggctttggaggagtgatgggccgggtgcggctgcggagtgatggagctgccatcccccggcggcgcagcggcggggacacccacagccccccccggggcctgggccccagcattgacaccccacccagggctgctgcctgccccagcagcccccacaagatccccctgacccggggccgcatcgagagccctgagaagaggaggatggccacctttggatctgctggcagcatcaactacccagacaagaaggccctgtctgagggccacagcatgaggagcacctgtggcagcaccaggcacagcagcctgggggaccacaagagcctggaggccgaggccctggccgaggacatcgagaagaccatgagcacagccctgcacgagctgcgggagctggagcggcagaacacagtgaagcaggccccagatgtggtgctggacaccctggagcccctgaagaaccccccaggccctgtgtcctctgagcccgccagccccctgcacaccatcgtcatccgggaccctgatgctgccatgaggaggagcagcagcagcagcacagagatgatgaccaccttcaagccagccctgagcgcccggctggccggggcccagctgcggcccccacccatgaggcctgtgcggcctgtggtgcagcacaggagcagcagcagcagcagcagcggcgtgggcagccctgctgtgacccccacagagaagatgttccccaacagcagcgctgacaagagcggcaccatgtag

SEQ ID NO: 169928 - DNA, 3300 bp, synthetic construct
  misc_feature 1..3300: note = Description of Artificial Sequence: Synthetic coding sequence
  source 1..3300: mol_type = other DNA
atgagcagccagaccaagttcaagaaggacaaggagatcatcgccgagtatgaggcccagatcaaggagatccgcacccagctggtggagcagttcaagtgcctggagcagcagagcgagagccggctgcagctgctgcaggacctgcaggagttcttccggaggaaggccgagattgagctggagtacagccgcagcctggagaagctggccgagcgcttcagcagcaagatccgcagcagccgggagcaccagttcaagaaggaccagtacctgctgagccctgtgaactgctggtacctggtgctgcaccagacccggcgggagagccgggaccacgccaccctgaatgacatcttcatgaacaacgtgattgtgcggctgagccagatcagtgaagatgtgatccgcctcttcaagaagagcaaggagatcggcctgcagatgcatgaggagctgctgaaggtgaccaatgagctgtacacagtgatgaagacctaccacatgtaccacgccgagagcatctctgctgagagcaagctgaaggaggccgagaagcaggaggagaagcagttcaacaagagcggggacctgtccatgaacctgctgcggcatgaggaccggccccagaggaggagctctgtgaagaagattgagaagatgaaggagaagaggcaggccaagtacagcgagaacaagctgaagtgcaccaaggccagaaatgactacctgctgaacctggccgccaccaatgctgccatcagcaagtactacatccatgatgtgtctgacctgattgactgctgtgacctgggcttccacgccagcctggcccggaccttccgcacctacctgtctgctgagtacaacctggagaccagcagacatgagggcctggatgtgattgaaaatgctgtggacaacctggacagcagaagtgacaagcacacagtgatggacatgtgcaaccaggtgttctgcccccccctgaagtttgagttccagccccacatgggagatgaggtgtgccaggtgtctgcccagcagcctgtgcagacagagctgctgatgagataccaccagctgcagagccggctggccaccctgaagattgaaaatgaggaggtgaggaagaccctggatgccaccatgcagaccctgcaggacatgctgactgtggaggactttgatgtgtctgatgccttccagcacagccgcagcacagagagcgtgaagtctgctgccagcgagacctacatgagcaagatcaacatcgccaagaggcgggccaaccagcaggagacagagatgttctacttcaccaagttcaaggagtatgtgaatggcagcaacctgatcaccaagctgcaggccaagcatgacctgctgaagcagaccctgggggagggggagcgggcagaatgtggcaccacccggcccccctgcctgccccccaagccccagaagatgagaagaccccggcccctgtctgtgtacagccacaagctgttcaacggctccatggaggccttcatcaaggacagcggccaggccatccccctggtggtggagagctgcatccgctacatcaacctgtatggcctgcagcagcagggcatcttccgggtgcccggcagccaggtggaggtgaatgacatcaagaacagctttgaaagaggagaggaccccctggtggatgaccagaatgaaagagacatcaacagcgtggccggcgtgctgaagctgtacttccggggcctggagaaccccctcttccccaaggagcgcttccaggacctgatcagcaccatcaagctggagaacccagctgagcgggtgcaccagatccagcagatcctggtgaccctgccccgggtggtgattgtggtgatgagatacctgtttgccttcctgaaccacctgagccagtacagtgatgagaacatgatggacccctacaacctggccatctgcttcggccccaccctgatgcacatcccagatggccaggaccctgtgtcctgccaggcccacatcaatgaggtgatcaagaccatcatcatccaccacgaggccatcttccccagcccccgggagctggagggccctgtgtatgagaagtgcatggccggcggggaggagtactgtgacagcccccacagcgagcccggggccattgatgaggtggaccatgacaatggaacagagccccacaccagtgatgaggaggtggagcagatcgaggccatcgccaagtttgactacatgggccgcagcccccgggagctgtccttcaagaagggggccagcctgctgctgtaccaccgggccagcgaggactggtgggagggccgccacaatggagtggatggcctcatcccccaccagtacatcgtggtgcaggacatggatgatgccttcagtgacagcctgagccagaaggctgacagcgaggccagcagcggccccctgctggatgacaaggccagcagcaagaatgacctgcagagccccacagagcacatcagtgactatggctttggaggagtgatgggccgggtgcggctgcggagtgatggagctgccatcccccggcggcgcagcggcggggacacccacagccccccccggggcctgggccccagcattgacaccccacccagggctgctgcctgccccagcagcccccacaagatccccctgacccggggccgcatcgagagccctgagaagaggaggatggccacctttggatctgctggcagcatcaactacccagacaagaaggccctgtctgagggccacagcatgaggagcacctgtggcagcaccaggcacagcagcctgggggaccacaagagcctggaggccgaggccctggccgaggacatcgagaagaccatgagcacagccctgcacgagctgcgggagctggagcggcagaacacagtgaagcaggccccagatgtggtgctggacaccctggagcccctgaagaaccccccaggccctgtgtcctctgagcccgccagccccctgcacaccatcgtcatccgggaccctgatgctgccatgaggaggagcagcagcagcagcacagagatgatgaccaccttcaagccagccctgagcgcccggctggccggggcccagctgcggcccccacccatgaggcctgtgcggcctgtggtgcagcacaggagcagcagcagcagcagcagcggcgtgggcagccctgctgtgacccccacagagaagatgttccccaacagcagcgctgacaagagcggcaccatgtag

SEQ ID NO: 169929 - DNA, 1008 bp, synthetic construct
  misc_feature 1..1008: note = Description of Artificial Sequence: Synthetic coding sequence
  source 1..1008: mol_type = other DNA
atgaacaacgtgattgtgcggctgagccagatcagtgaagatgtgatccgcctcttcaagaagagcaaggagatcggcctgcagatgcatgaggagctgctgaaggtgaccaatgagctgtacacagtgatgaagacctaccacatgtaccacgccgagagcatctctgctgagagcaagctgaaggaggccgagaagcaggaggagaagcagttcaacaagagcggggacctgtccatgaacctgctgcggcatgaggaccggccccagaggaggagctctgtgaagaagattgagaagatgaaggagaagaggcaggccaagtacagcgagaacaagctgaagtgcaccaaggccagaaatgactacctgctgaacctggccgccaccaatgctgccatcagcaagtactacatccatgatgtgtctgacctgattgactgctgtgacctgggcttccacgccagcctggcccggaccttccgcacctacctgtctgctgagtacaacctggagaccagcagacatgagggcctggatgtgattgaaaatgctgtggacaacctggacagcagaagtgacaagcacacagtgatggacatgtgcaaccaggtgttctgcccccccctgaagtttgagttccagccccacatgggagatgaggtgtgccaggtgtctgcccagcagcctgtgcagacagagctgctgatgagataccaccagctgcagagccggctggccaccctgaagattgaaaatgaggaggtgaggaagaccctggatgccaccatgcagaccctgcaggacatgctgactgtggaggactttgatgtgtctgatgccttccagcacagccgcagcacagagagcgtgaagtctgctgccagcgagacctacatgagcaagatcaacatcgccaagaggcgggccaaccagcaggagacagagatgttctacttcaccaagggcccagatgatgtgttccccatctgccacccccggctgtag

SEQ ID NO: 169930 - DNA, 360 bp, synthetic construct
  misc_feature 1..360: note = Description of Artificial Sequence: Synthetic coding sequence
  source 1..360: mol_type = other DNA
atgtcctggtggaggaacaacttctggatcatcctggccgtggccatcatcgtggtgtctgtgggcctgggcctcatcctgtactgtgtgtgcaagtggcagctgcggcggggcaagaagtgggagatcgccaagcccctgaagcacaagcaggtggatgaggagaagatgtatgacttcctgctgctgaggacagcctgcagcctgccccccctgcccctgcactaccgcacctccatgacagagacctacggcgtgctgctgtgcaggcctggctggagcgccctggcccggagccggctgacagctgccagcgcctcctgggtgcaggccatcctgctgccccagccccccaagtag

SEQ ID NO: 169931 - DNA, 438 bp, synthetic construct
  misc_feature 1..438: note = Description of Artificial Sequence: Synthetic coding sequence
  source 1..438: mol_type = other DNA
atggacaccttcaccgtgcaggacagcacagccatgtcctggtggaggaacaacttctggatcatcctggccgtggccatcatcgtggtgtctgtgggcctgggcctcatcctgtactgtgtgtgcaagtggcagctgcggcggggcaagaagtgggagatcgccaagcccctgaagcacaagcaggtggatgaggagaagatgtatgaaaatgtgctgaatgaaagccctgtgcagctgccccccctgccccccaggaactggcccagcctggaggacagcagcccccaggaggcccccagccagcccccagccacctacagcctggtgaacaaggtgaagaacaagaagacagtgtccatccccagctacatcgagccagaagatgattatgatgatgtggagatcccagccaacacagagaaggccagcttctag

SEQ ID NO: 169932 - DNA, 438 bp, synthetic construct; identical to SEQ ID NO: 169931
  misc_feature 1..438: note = Description of Artificial Sequence: Synthetic coding sequence
  source 1..438: mol_type = other DNA

SEQ ID NO: 169933 - DNA, 1398 bp, synthetic construct
  misc_feature 1..1398: note = Description of Artificial Sequence: Synthetic coding sequence
  source 1..1398: mol_type = other DNA
atgaatgtgaccagcctcttctccttcaccagccctgctgtgaagaggctgctgggctggaagcagggagatgaggaggagaagtgggccgagaaggctgtggatgccctggtgaagaagctgaagaagaagaagggggccatggaggagctggagaaggccctgagctgccccggccagcccagcaactgtgtgaccatccccaggagcctggatggccgcctgcaggtgagccacaggaagggcctgccccacgtgatctactgccgggtgtggcgctggccagacctgcagagccaccacgagctgaagcccctggagtgctgtgagttccccttcggcagcaagcagaaggaggtgtgcatcaacccctaccactacaagagggtggagagccctgtgctgccccctgtgctggtgcccaggcacagcgagtacaacccccagcacagcctgctggcccagttcaggaacctgggccagaatgagccccacatgcccctgaatgccaccttcccagacagcttccagcagcccaacagccaccccttcccccacagccccaacagcagctaccccaacagccctggcagcagcagcagcacctacccccacagccccaccagcagtgaccccggcagccccttccagatgcctgctgacaccccacctccagcctacctgcccccagaggaccccatgacccaggacggcagccagcccatggacaccaacatgatggccccacccctgcccagcgagatcaacagaggagatgtgcaggccgtggcctatgaggagcccaagcactggtgcagcatcgtgtactatgagctgaacaacagagtgggggaggccttccacgccagcagcacctctgtgctggtggatggcttcacagaccccagcaacaacaagaaccgcttctgcctgggcctgctgagcaatgtgaacagaaacagcaccatcgagaacaccaggaggcacatcggcaagggcgtgcacctgtactacgtgggcggggaggtgtatgcagagtgcctgagtgacagcagcatctttgtgcagagcaggaactgcaactaccaccacggcttccaccccaccaccgtgtgcaagatccccagcggctgcagcctgaagatcttcaacaaccaggagtttgcccagctgctggcccagagcgtgaaccacggctttgagaccgtgtatgagctgaccaagatgtgcaccatccgcatgagctttgtgaagggctggggcgctgagtaccaccggcaggatgtgaccagcaccccctgctggattgagatccacctgcacggccccctgcagtggctggacaaggtgctgacccagatgggcagcccccacaaccccatcagctctgtgtcctag

SEQ ID NO: 169934 - DNA, 1398 bp, synthetic construct; identical to SEQ ID NO: 169933
  misc_feature 1..1398: note = Description of Artificial Sequence: Synthetic coding sequence
  source 1..1398: mol_type = other DNA

SEQ ID NO: 169935 - DNA, 177 bp, synthetic construct
  misc_feature 1..177: note = Description of Artificial Sequence: Synthetic coding sequence
  source 1..177: mol_type = other DNA
atgaatgtgaccagcctcttctccttcaccagccctgctgtgaagaggctgctgggctggaagcagggagatgaggaggagaagtgggccgagaaggctgtggatgccctggtgaagaagctgaagaagaagaagggggccatggaggagctggagaaggccctgagctgcccctag

SEQ ID NO: 169936 - DNA, 33 bp, synthetic construct
  misc_feature 1..33: note = Description of Artificial Sequence: Synthetic coding sequence
  source 1..33: mol_type = other DNA
atgaatgtgaccagcctcttctccttcacctag

SEQ ID NO: 169937 - DNA, 288 bp, synthetic construct
  misc_feature 1..288: note = Description of Artificial Sequence: Synthetic coding sequence
  source 1..288: mol_type = other DNA
atgaatgtgaccagcctcttctccttcaccagccctgctgtgaagaggctgctgggctggaagcagggagatgaggaggagaagtgggccgagaaggctgtggatgccctggtgaagaagctgaagaagaagaagggggccatggaggagctggagaaggccctgagctgccccggccagcccagcaactgtgtgaccatccccaggagcctggatggccgcctgcaggtgagccacaggaagggcctgccccacgtgatctactgccgggtgtggcgctggccctag

SEQ ID NO: 169938 - DNA, 402 bp, synthetic construct
  misc_feature 1..402: note = Description of Artificial Sequence: Synthetic coding sequence
  source 1..402: mol_type = other DNA
atgaatgtgaccagcctcttctccttcaccagccctgctgtgaagaggctgctgggctggaagcagggagatgaggaggagaagtgggccgagaaggctgtggatgccctggtgaagaagctgaagaagaagaagggggccatggaggagctggagaaggccctgagctgccccggccagcccagcaactgtgtgaccatccccaggagcctggatggccgcctgcaggtgagccacaggaagggcctgccccacgtgatctactgccgggtgtggcgctggccagacctgcagagccaccacgagctgaagcccctggagtgctgtgagttccccttcggcagcaagcagaaggaggtgtgcatcaacccctaccactacaagagggtggagagcccctag

SEQ ID NO: 169939 - DNA, 321 bp, synthetic construct
  misc_feature 1..321: note = Description of Artificial Sequence: Synthetic coding sequence
  source 1..321: mol_type = other DNA
atgaatgtgaccagcctcttctccttcaccagccctgctgtgaagaggctgctgggctggaagcagggagatgaggaggagaagtgggccgagaaggctgtggatgccctggtgaagaagctgaagaagaagaagggggccatggaggagctggagaaggccctgagctgccccggccagcccagcaactgtgtgaccatccccaggagcctggatggccgcctgcaggtgagccacaggaagggcctgccccacgtgatctactgccgggtgtggcgctggccagacctgcagagccaccacgagctgaagcccctgtag

SEQ ID NO: 169940 - DNA, 339 bp, synthetic construct
  misc_feature 1..339: note = Description of Artificial Sequence: Synthetic coding sequence
  source 1..339: mol_type = other DNA
atgaatgtgaccagcctcttctccttcaccagccctgctgtgaagaggctgctgggctggaagcagggagatgaggaggagaagtgggccgagaaggctgtggatgccctggtgaagaagctgaagaagaagaagggggccatggaggagctggagaaggccctgagctgccccggccagcccagcaactgtgtgaccatccccaggagcctggatggccgcctgcaggtgagccacaggaagggcctgccccacgtgatctactgccgggtgtggcgctggccagacctgcagagccaccacgagctgaagcccctggagtgctgtgagttcccctag

SEQ ID NO: 169941 - DNA, 1398 bp, synthetic construct; identical to SEQ ID NO: 169933
  misc_feature 1..1398: note = Description of Artificial Sequence: Synthetic coding sequence
  source 1..1398: mol_type = other DNA

SEQ ID NO: 169942 - DNA, 1659 bp, synthetic construct
  misc_feature 1..1659: note = Description of Artificial Sequence: Synthetic coding sequence
  source 1..1659: mol_type = other DNA
atggacaacatgagcatcaccaacacccccaccagcaatgatgcctgcctgagcatcgtgcacagcctgatgtgccaccggcagggcggggagagcgagacctttgccaagagggccatcgagagcctggtgaagaagctgaaggagaagaaggatgagctggacagcctcatcacagccatcaccaccaacggggcccaccccagcaaatgtgtgaccatccagaggaccctggatggccgcctgcaggtggccggcaggaagggcttcccccacgtgatctatgcccggctgtggcgctggccagacctgcacaagaatgagctgaagcacgtgaagtactgccagtatgcctttgacctgaagtgtgacagcgtgtgtgtgaacccctaccactatgagcgggtggtgtccccaggcatcgacctgagcggcctgaccctgcagagcaatgcccccagctccatgatggtgaaggatgaatatgtgcatgactttgagggccagcccagcctgagcacagagggccacagcatccagaccatccagcacccccccagcaacagagccagcacagagacctacagcaccccagccctgctggcccccagcgagagcaatgccaccagcacagccaacttccccaacatccctgtggccagcaccagccagcctgccagcatcctgggcggcagccacagcgagggcctgctgcagatcgccagcggcccccagcccggccagcagcagaatggcttcaccggccagcctgccacctaccaccacaacagcaccaccacctggacaggcagcaggacagccccctacacccccaacctgccccaccaccagaatggccacctgcagcaccacccccccatgccaccccaccctggccactactggcctgtgcacaatgagctggccttccagccccccatcagcaaccacccagcccctgagtactggtgcagcatcgcctactttgagatggatgtgcaggtgggggagaccttcaaggtgcccagcagctgccccatcgtgacagtggatggctacgtggaccccagcggcggggaccgcttctgcctgggccagctgagcaatgtgcacaggacagaggccatcgagcgggcccggctgcacatcggcaaaggagtgcagctggagtgcaagggggagggagatgtgtgggtgcgctgcctgagtgaccatgctgtgtttgtgcagagctactacctggaccgggaggccggccgggcccctggagatgctgtgcacaagatctaccccagcgcctacatcaaggtgtttgacctgcggcagtgccaccggcagatgcagcagcaggccgccacagcccaggccgctgctgctgcccaggccgctgctgtggccggcaacatccctggccctggctctgtgggcggcatcgccccagccatcagcctgtctgctgctgctggcatcggcgtggatgacctgcggcggctgtgcatcctgaggatgagctttgtgaagggctggggccctgactacccccggcagagcatcaaggagaccccctgctggattgagatccacctgcaccgggccctgcagctgctggatgaggtgctgcacaccatgcccatcgctgacccccagcccctggactag

SEQ ID NO: 169943 - DNA, 1659 bp, synthetic construct; identical to SEQ ID NO: 169942
  misc_feature 1..1659: note = Description of Artificial Sequence: Synthetic coding sequence
  source 1..1659: mol_type = other DNA

SEQ ID NO: 169944 - DNA, 534 bp, synthetic construct
  misc_feature 1..534: note = Description of Artificial Sequence: Synthetic coding sequence
  source 1..534: mol_type = other DNA
atggacaacatgagcatcaccaacacccccaccagcaatgatgcctgcctgagcatcgtgcacagcctgatgtgccaccggcagggcggggagagcgagacctttgccaagagggccatcgagagcctggtgaagaagctgaaggagaagaaggatgagctggacagcctcatcacagccatcaccaccaacggggcccaccccagcaaatgtgtgaccatccagaggaccctggatggccgcctgcaggtggccggcaggaagggcttcccccacgtgatctatgcccggctgtggcgctggccagacctgcacaagaatgagctgaagcacgtgaagtactgccagtatgcctttgacctgaagtgtgacagcgtgtgtgtgaacccctaccactatgagcgggtggtgtccccaggcatcgacctgagcggcctgaccctgcagagcaatgaaaacaactggtacttcagccagctgctgctggacctggacaagggcatgatccaggagcaggccatccacggcccctag

SEQ ID NO: 169945 - DNA, 1311 bp, synthetic construct
  misc_feature 1..1311: note = Description of Artificial Sequence: Synthetic coding sequence
  source 1..1311: mol_type = other DNA
atggacaacatgagcatcaccaacacccccaccagcaatgatgcctgcctgagcatcgtgcacagcctgatgtgccaccggcagggcggggagagcgagacctttgccaagagggccatcgagagcctggtgaagaagctgaaggagaagaaggatgagctggacagcctcatcacagccatcaccaccaacggggcccaccccagcaaatgtgtgaccatccagaggaccctggatggccgcctgcaggtggccggcaggaagggcttcccccacgtgatctatgcccggctgtggcgctggccagacctgcacaagaatgagctgaagcacgtgaagtactgccagtatgcctttgacctgaagtgtgacagcgtgtgtgtgaacccctaccactatgagcgggtggtgtccccaggcatcgacctgagcggcctgaccctgcagagcaatgcccccagctccatgatggtgaaggatgaatatgtgcatgactttgagggccagcccagcctgagcacagagggccacagcatccagaccatccagcacccccccagcaacagagccagcacagagacctacagcaccccagccctgctggcccccagcgagagcaatgccaccagcacagccaacttccccaacatccctgtggccagcaccagccagcctgccagcatcctgggcggcagccacagcgagggcctgctgcagatcgccagcggcccccagcccggccagcagcagaatggcttcaccggccagcctgccacctaccaccacaacagcaccaccacctggacaggcagcaggacagccccctacacccccaacctgccccaccaccagaatggccacctgcagcaccacccccccatgccaccccaccctggccactactggcctgtgcacaatgagctggccttccagccccccatcagcaaccacccagcccctgagtactggtgcagcatcgcctactttgagatggatgtgcaggtgggggagaccttcaaggtgcccagcagctgccccatcgtgacagtggatggctacgtggaccccagcggcggggaccgcttctgcctgggccagctgagcaatgtgcacaggacagaggccatcgagcgggcccggctgcacatcggcaaaggagtgcagctggagtgcaagggggagggagatgtgtgggtgcgctgcctgagtgaccatgctgtgtttgtgcagagctactacctggaccgggaggccggccgggcccctggagatgctgtgcacaagatctaccccagcgcctacatcaagtag

SEQ ID NO: 169946 - DNA, 243 bp, synthetic construct
  misc_feature 1..243: note = Description of Artificial Sequence: Synthetic coding sequence
  source 1..243: mol_type = other DNA
atgacctccatggccagcctcttctccttcaccagccctgctgtgaagaggctgctgggctggaagcagggagatgaggaggagaagtgggccgagaaggctgtggatgccctggtgaagaagctgaagaagaagaagggggccatggaggagctggagaaggccctgagcagccctggccagcccagcaaatgtgtgaccatccccaggagcctggatggccgcctgcaggtgagccactag

SEQ ID NO: 169947 - DNA, 387 bp, synthetic construct
  misc_feature 1..387: note = Description of Artificial Sequence: Synthetic coding sequence
  source 1..387: mol_type = other DNA
atgacctccatggccagcctcttctccttcaccagccctgctgtgaagaggctgctgggctggaagcagggagatgaggaggagaagtgggccgagaaggctgtggatgccctggtgaagaagctgaagaagaagaagggggccatggaggagctggagaaggccctgagcagccctggccagcccagcaaatgtgtgaccatccccaggagcctggatggccgcctgcaggtgagccacaggaagggcctgccccacgtgatctactgccgggtgtggcgctggccagacctgcagagccaccacgagctgaagcccctggacatctgtgagttccccttcggcagcaagcagaaggaggtgtgcatcaacccctaccactactag

SEQ ID NO: 169948 - skipped

SEQ ID NO: 169949 - DNA, 405 bp, synthetic construct
  misc_feature 1..405: note = Description of Artificial Sequence: Synthetic coding sequence
  source 1..405: mol_type = other DNA
atgacctccatggccagcctcttctccttcaccagccctgctgtgaagaggctgctgggctggaagcagggagatgaggaggagaagtgggccgagaaggctgtggatgccctggtgaagaagctgaagaagaagaagggggccatggaggagctggagaaggccctgagcagccctggccagcccagcaaatgtgtgaccatccccaggagcctggatggccgcctgcaggtgagccacaggaagggcctgccccacgtgatctactgccgggtgtggcgctggccagacctgcagagccaccacgagctgaagcccctggacatctgtgagttccccttcggcagcaagcagaaggaggtgtgcatcaacccctaccactacaagagggtggagagcccctag

SEQ ID NO: 169950 - skipped

SEQ ID NO: 169951 - DNA, 1395 bp, synthetic construct
  misc_feature 1..1395: note = Description of Artificial Sequence: Synthetic coding sequence
  source 1..1395: mol_type = other DNA
atgacctccatggccagcctcttctccttcaccagccctgctgtgaagaggctgctgggctggaagcagggagatgaggaggagaagtgggccgagaaggctgtggatgccctggtgaagaagctgaagaagaagaagggggccatggaggagctggagaaggccctgagcagccctggccagcccagcaaatgtgtgaccatccccaggagcctggatggccgcctgcaggtgagccacaggaagggcctgccccacgtgatctactgccgggtgtggcgctggccagacctgcagagccaccacgagctgaagcccctggacatctgtgagttccccttcggcagcaagcagaaggaggtgtgcatcaacccctaccactacaagagggtggagagccctgtgctgccccctgtgctggtgcccaggcacaatgagttcaacccccagcacagcctgctggtgcagttcaggaacctgagccacaatgagccccacatgccccagaatgccaccttcccagacagcttccaccagcccaacaacacccccttccccctgagccccaacagcccctacccacccagccctgccagcagcacctaccccaacagccctgccagcagcggccctggcagccccttccagctgcctgctgacaccccacctccagcctacatgcccccagatgaccagatgggccaggacaacagccagcccatggacaccagcaacaacatgatcccccagatcatgcccagcatcagcagcagagatgtgcagcctgtggcctatgaggagcccaagcactggtgcagcatcgtgtactatgagctgaacaacagagtgggggaggccttccacgccagcagcacctctgtgctggtggatggcttcacagaccccagcaacaacaagagccgcttctgcctgggcctgctgagcaatgtgaacagaaacagcaccatcgagaacaccaggaggcacatcggcaagggcgtgcacctgtactacgtgggcggggaggtgtatgcagagtgcctgagtgacagcagcatctttgtgcagagcaggaactgcaacttccaccacggcttccaccccaccaccgtgtgcaagatccccagcagctgcagcctgaagatcttcaacaaccaggagtttgcccagctgctggcccagagcgtgaaccacggctttgaggccgtgtatgagctgaccaagatgtgcaccatccgcatgagctttgtgaagggctggggcgctgagtaccaccggcaggatgtgaccagcaccccctgctggattgagatcctgcacggccccctgcagtggctggacaaggtgctgacccagatgggcagccccctgaaccccatcagctctgtgtcctag

SEQ ID NO: 169952 - DNA, 1395 bp, synthetic construct; identical to SEQ ID NO: 169951
  misc_feature 1..1395: note = Description of Artificial Sequence: Synthetic coding sequence
  source 1..1395: mol_type = other DNA

SEQ ID NO: 169953 - DNA, 1491 bp, synthetic construct
  misc_feature 1..1491: note = Description of Artificial Sequence: Synthetic coding sequence
  source 1..1491: mol_type = other DNA
atgttccgcagcaagaggagcggcctggtgcggcggctgtggaggagccgggtggtgcctgaccgggaggagggcggcagcggcggcggcggcggcggagatgaagatggcagcctgggcagcagagctgagcccgccccccgggcccgggagggcggcggctgcggccgctctgaggtgcggcctgtggccccccggcggcccagagatgctgtgggccagagaggagcccagggcgccggcagaagaagaagagctgggggccccccccggcccatgtctgagcccggggccggggccggcagcagcctgctggatgtggccgagcccggcggccctggctggctgcctgagagtgactgtgaaacagtgacctgctgcctcttcagcgagagagatgctgctggggcccccagagatgccagtgaccccctggccggggccgccctggagcctgctgggggcggccgcagccgggaggcccggagccggctgctgctgctggagcaggagctgaagacagtgacctacagcctgctgaagaggctgaaggagaggagcctggacaccctgctggaggccgtggagagcagaggaggagtgcctgggggctgtgtgctggtgcccagggctgacctgcggctgggcggccagcctgccccaccccagctgctgctgggccgcctcttccgctggccagacctgcagcacgctgtggagctgaagcccctgtgtggctgccacagctttgctgctgctgctgatggccccaccgtgtgctgcaacccctaccacttcagccggctgtgtggccctgagagccccccaccaccctacagccggctgagccccagagatgagtacaagcccctggacctgagtgacagcaccctgagctacacagaaacagaggccaccaacagcctcatcacagcccctggagagttcagtgatgcctccatgagcccagatgccaccaagcccagccactggtgcagcgtggcctactgggagcacaggaccagggtgggccgcctgtatgctgtgtatgaccaggccgtgtccatcttctatgacctgccccagggcagcggcttctgcctgggccagctgaacctggagcagaggtctgagagcgtgcggaggaccaggagcaagattggatttggcatcctgctgagcaaggagccagatggagtgtgggcctacaacagaggagagcaccccatctttgtgaacagccccaccctggatgcccctgggggccgggccctggtggtgaggaaggtgcccccaggctacagcatcaaggtgtttgattttgagaggagcggcctgcagcacgcccctgagccagatgctgctgatggcccctatgaccccaacagcgtgcgcatcagctttgccaagggctggggcccctgctacagccggcagttcatcaccagctgcccctgctggctggagatcctgctgaacaaccccaggtag

SEQ ID NO: 169954 - DNA, 708 bp, synthetic construct
  misc_feature 1..708: note = Description of Artificial Sequence: Synthetic coding sequence
  source 1..708: mol_type = other DNA
atgagcaggatgggcaagcccatcgagacccagaagagccccccaccaccctacagccggctgagccccagagatgagtacaagcccctggacctgagtgacagcaccctgagctacacagaaacagaggccaccaacagcctcatcacagcccctggagagttcagtgatgcctccatgagcccagatgccaccaagcccagccactggtgcagcgtggcctactgggagcacaggaccagggtgggccgcctgtatgctgtgtatgaccaggccgtgtccatcttctatgacctgccccagggcagcggcttctgcctgggccagctgaacctggagcagaggtctgagagcgtgcggaggaccaggagcaagattggcttcggcatcctgctgagcaaggagccagatggagtgtgggcctacaacagaggagagcaccccatctttgtgaacagccccaccctggatgcccctgggggccgggccctggtggtgaggaaggtgcccccaggctacagcatcaaggtgtttgattttgagaggagcggcctgcagcacgcccctgagccagatgctgctgatggcccctatgaccccaacagcgtgcgcatcagctttgccaagggctggggcccctgctacagccggcagttcatcaccagctgcccctgctggctggagatcctgctgaacaaccccaggtag

SEQ ID NO: 169955 - DNA, 1017 bp, synthetic construct
  misc_feature 1..1017: note = Description of Artificial Sequence: Synthetic coding sequence
  source 1..1017: mol_type = other DNA
atgttccgcagcaagaggagcggcctggtgcggcggctgtggaggagccgggtggtgcctgaccgggaggagggcggcagcggcggcggcggcggcggagatgaagatggcagcctgggcagcagagctgagcccgccccccgggcccgggagggcggcggctgcggccgctctgaggtgcggcctgtggccccccggcggcccagagatgctgtgggccagagaggagcccagggcgccggcagaagaagaagagctgggggccccccccggcccatgtctgagcccggggccggggccggcagcagcctgctggatgtggccgagcccggcggccctggctggctgcctgagagtgactgtgaaacagtgacctgctgcctcttcagcgagagagatgctgctggggcccccagagatgccagtgaccccctggccggggccgccctggagcctgctgggggcggccgcagccgggaggcccggagccggctgctgctgctggagcaggagctgaagacagtgacctacagcctgctgaagaggctgaaggagaggagcctggacaccctgctggaggccgtggagagcagaggaggagtgcctgggggctgtgtgctggtgcccagggctgacctgcggctgggcggccagcctgccccaccccagctgctgctgggccgcctcttccgctggccagacctgcagcacgctgtggagctgaagcccctgtgtggctgccacagctttgctgctgctgctgatggccccaccgtgtgctgcaacccctaccacttcagccggctgtgtggccctgagagccccccaccaccctacagccggctgagccccagagatgagtacaagcccctggacctgagtgacagcaccctgagctacacagaaacagaggccaccaacagcctcatcacagcccctggagagttctctgctgctgatgctggcatcggcagccggggcaacagaggcctggagagctctgtgccctgcagctag

SEQ ID NO: 169956 - DNA, 1293 bp, synthetic construct
  misc_feature 1..1293: note = Description of Artificial Sequence: Synthetic coding sequence
  source 1..1293: mol_type = other DNA
atgcacagcaccacccccatcagcagcctcttctccttcaccagccctgctgtgaagaggctgctgggctggaagcagggagatgaggaggagaagtgggccgagaaggctgtggacagcctggtgaagaagctgaagaagaagaagggggccatggatgagctggagcgggccctgagctgccccggccagcccagcaaatgtgtgaccatccccaggagcctggatggccgcctgcaggtgagccacaggaagggcctgccccacgtgatctactgccgggtgtggcgctggccagacctgcagagccaccacgagctgaagcccctggagtgctgtgagttccccttcggcagcaagcagaaggaggtgtgcatcaacccctaccactaccgccgggtggagacccctgtgctgccccctgtgctggtgcccaggcacagcgagtacaacccccagctgagcctgctggccaagttccgcagcgccagcctgcacagcgagcccctgatgccccacaatgccacctacccagacagcttccagcagcccccctgcagcgccctgccccccagccccagccacgccttcagccagagcccctgcacagccagctacccccacagccctggcagccccagcgagcctgagagcccctaccagcacagcgacttccggcctgtgtgctatgaggagccccagcactggtgcagcgtggcctactatgagctgaacaacagagtgggggagaccttccaggccagcagccgctctgtgctgattgatggcttcacagaccccagcaacaacagaaaccgcttctgcctgggcctgctgagcaatgtgaacagaaacagcaccatcgagaacacccggcggcacatcggcaaaggagtgcacctgtactacgtgggcggggaggtgtatgcagaatgtgtgtctgacagcagcatctttgtgcagagcaggaactgcaactaccagcacggcttccacccagccaccgtgtgcaagatccccagcggctgcagcctgaaggtgttcaacaaccagctgtttgcccagctgctggcccagagcgtgcaccacggctttgaggtggtgtatgagctgaccaagatgtgcaccatccgcatgagctttgtgaagggctggggcgctgagtaccaccggcaggatgtgaccagcaccccctgctggattgagatccacctgcacggccccctgcagtggctggacaaggtgctgacccagatgggcagcccccacaaccccatcagctctgtgtcctag

SEQ ID NO: 169957 - DNA, 1404 bp, synthetic construct
  misc_feature 1..1404: note = Description of Artificial Sequence: Synthetic coding sequence
  source 1..1404: mol_type = other DNA
atgcacagcaccacccccatcagcagcctcttctccttcaccagccctgctgtgaagaggctgctgggctggaagcagggagatgaggaggagaagtgggccgagaaggctgtggacagcctggtgaagaagctgaagaagaagaagggggccatggatgagctggagcgggccctgagctgccccggccagcccagcaaatgtgtgaccatccccaggagcctggatggccgcctgcaggtgagccacaggaagggcctgccccacgtgatctactgccgggtgtggcgctggccagacctgcagagccaccacgagctgaagcccctggagtgctgtgagttccccttcggcagcaagcagaaggaggtgtgcatcaacccctaccactaccgccgggtggagacccctgtgctgccccctgtgctggtgcccaggcacagcgagtacaacccccagctgagcctgctggccaagttccgcagcgccagcctgcacagcgagcccctgatgccccacaatgccacctacccagacagcttccagcagcccccctgcagcgccctgccccccagccccagccacgccttcagccagagcccctgcacagccagctacccccacagccctggcagccccagcgagcctgagagcccctaccagcacagcgtggacaccccacccctgccctaccacgccacagaggccagcgagacccagagcggccagcctgtggatgccacagctgacagacatgtggtgctgagcatccccaatggagacttccggcctgtgtgctatgaggagccccagcactggtgcagcgtggcctactatgagctgaacaacagagtgggggagaccttccaggccagcagccgctctgtgctgattgatggcttcacagaccccagcaacaacagaaaccgcttctgcctgggcctgctgagcaatgtgaacagaaacagcaccatcgagaacaccaggaggcacatcggcaagggcgtgcacctgtactacgtgggcggggaggtgtatgcagaatgtgtgtctgacagcagcatctttgtgcagagcaggaactgcaactaccagcacggcttccacccagccaccgtgtgcaagatccccagcggctgcagcctgaaggtgttcaacaaccagctgtttgcccagctgctggcccagagcgtgcaccacggctttgaggtggtgtatgagctgaccaagatgtgcaccatccgcatgagctttgtgaagggctggggcgctgagtaccaccggcaggatgtgaccagcaccccctgctggattgagatccacctgcacggccccctgcagtggctggacaaggtgctgacccagatgggcagcccccacaaccccatcagctctgtgtcctag

SEQ ID NO: 169958 - DNA, 1404 bp, synthetic construct; identical to SEQ ID NO: 169957
  misc_feature 1..1404: note = Description of Artificial Sequence: Synthetic coding sequence
  source 1..1404: mol_type = other DNA

SEQ ID NO: 169959 - DNA, 1191 bp, synthetic construct
  misc_feature 1..1191: note = Description of Artificial Sequence: Synthetic coding sequence
  source 1..1191: mol_type = other DNA
atgaaggctgtgaagtctgagcgggagcggggcagcagaagaagacacagagatggagatgtggtgctgcctgctggggtggtggtgaagcaggagcggctgagccctgaggtggcccccccagcccaccggcggccagaccacagcggcggcagccccagcccccccaccagcgagcccgcccggagcggccaccggggcaacagagcccggggcgtgagccgcagcccccccaagaagaagaacaaggccagcggcagaagaagcaagagccccaggagcaagaggaacagaagcccccaccacagcacagtgaaggtgaagcaggagcgggaggaccacccccggcggggccgggaggaccggcagcaccgggagcccagcgagcaggagcacagaagagccaggaacagcgaccgggacagacaccggggccacagccaccagaggaggaccagcaatgaaagacctggcagcggccagggccagggccgggaccgggacacccagaacctgcaggcccaggaggaggagcgggagttctacaatgcccggcggcgggagcaccggcagagaaatgatgtgggcggcggcggcagcgagagccaggagctggtgcccaggcctgggggcaacaacaaggagaaggaggtgcctgccaaggagaagcccagctttgagctgagcggggccctgctggaggacaccaacaccttccggggcgtggtgatcaagtacagcgagcccccagaggcccgcatccccaagaagcgctggaggctgtaccccttcaagaatgatgaggtgctgcctgtgatgtacatccaccggcagagcgcctacctgctgggccgccacagaagaattgctgacatccccatcgaccaccccagctgcagcaagcagcacgctgtgttccagtaccgcctggtggagtacaccagggcagatggcaccgtgggccggcgggtgaagccctacatcatcgacctgggcagcggaaatggcaccttcctgaacaacaagagaattgagccccagcgctactatgagctgaaggagaaggatgtgctgaagtttggcttcagcagccgggagtatgtgctgctgcacgagagcagtgacaccagcgagattgacaggaaggatgatgaagatgaggaggaggaggaggaggtgtctgacagctag

SEQ ID NO: 169960 - DNA, 1143 bp, synthetic construct
  misc_feature 1..1143: note = Description of Artificial Sequence: Synthetic coding sequence
  source 1..1143: mol_type = other DNA
atgaaggctgtgaagtctgagcgggagggcgtggtggtgaagcaggagcggctgagccctgaggtggcccccccagcccaccggcggccagaccacagcggcggcagccccagcccccccaccagcgagcccgcccggagcggccaccggggcaacagagcccggggcgtgagccgcagcccccccaagaagaagaacaaggccagcggcagaagaagcaagagccccaggagcaagaggaacagaagcccccaccacagcacagtgaaggtgaagcaggagcgggaggaccacccccggcggggccgggaggaccggcagcaccgggagcccagcgagcaggagcacagaagagccaggaacagcgaccgggacagacaccggggccacagccaccagaggaggaccagcaatgaaagacctggcagcggccagggccagggccgggaccgggacacccagaacctgcaggcccaggaggaggagcgggagttctacaatgcccggcggcgggagcaccggcagagaaatgatgtgggcggcggcggcagcgagagccaggagctggtgcccaggcctgggggcaacaacaaggagaaggaggtgcctgccaaggagaagcccagctttgagctgagcggggccctgctggaggacaccaacaccttccggggcgtggtgatcaagtacagcgagcccccagaggcccgcatccccaagaagcgctggaggctgtaccccttcaagaatgatgaggtgctgcctgtgatgtacatccaccggcagagcgcctacctgctgggccgccacagaagaattgctgacatccccatcgaccaccccagctgcagcaagcagcacgctgtgttccagtaccgcctggtggagtacaccagggcagatggcaccgtgggccggcgggtgaagccctacatcatcgacctgggcagcggaaatggcaccttcctgaacaacaagagaattgagccccagcgctactatgagctgaaggagaaggatgtgctgaagtttggcttcagcagccgggagtatgtgctgctgcacgagagcagtgacaccagcgagattgacaggaaggatgatgaagatgaggaggaggaggaggaggtgtctgacagctag

SEQ ID NO: 169961 - DNA, 2274 bp, synthetic construct
  misc_feature 1..2274: note = Description of Artificial Sequence: Synthetic coding sequence
  source 1..2274: mol_type = other DNA
atgagcaaccctggcaccaggagaaatggcagcagcatcaagatccggctgactgtgctgtgtgccaagaacctggccaagaaggacttcttccggctgcctgacccctttgccaagatcgtggtggatggcagcggccagtgccacagcacagacacagtgaagaacaccctggaccccaagtggaaccagcactatgacctgtatgtgggcaagacagacagcatcaccatctctgtgtggaaccacaagaagatccacaagaagcagggcgccggcttcctgggctgtgtgcggctgctgagcaatgccatcagccggctgaaggacaccggctaccagaggctggacctgtgcaagctgaaccccagcgacacagatgctgtgcggggccagatcgtggtgtccctgcagacccgggacagaattggaactggaggctctgtggtggactgccggggcctgctggagaatgaaggaacagtgtatgaggacagcggccctggccggcccctgagctgcttcatggaggagcccgccccctacacagacagcactggagctgctgctgggggcggcaactgccgctttgtggagagccccagccaggaccagaggctgcaggcccagaggctgagaaatccagatgtgcggggcagcctgcagaccccccagaaccggccccacggccaccagagccctgagctgcctgagggctatgagcagaggaccaccgtgcagggccaggtgtacttcctgcacacccagacaggagtgtccacctggcatgacccccgcatccccagccccagcggcaccatccctggaggagatgctgccttcctgtatgagttcctgctgcagggccacaccagcgagccccgggacctgaacagcgtgaactgtgatgagctgggccccctgcccccaggctgggaggtgcgcagcacagtgtctggccgcatctactttgtggaccacaacaacagaaccacccagttcacagacccccggctgcaccacatcatgaaccaccagtgccagctgaaggagcccagccagcccctgcccctgcccagcgagggcagcctggaggatgaggagctgcctgcccagagatatgaaagagacctggtgcagaagctgaaggtgctgcggcatgagctgagcctgcagcagccccaggccggccactgcagaattgaggtgtcccgggaggagatctttgaggagagctaccggcagatcatgaagatgaggcccaaggacctgaagaagaggctgatggtgaagttccggggggaggagggcctggactatggaggagtggcccgggagtggctgtacctgctgtgccacgagatgctgaacccctactacggcctcttccagtacagcacagacaacatctacatgctgcagatcaacccagacagcagcatcaacccagaccacctgagctacttccactttgtgggccgcatcatgggcctggccgtgttccacggccactacatcaatggaggcttcaccgtgcccttctacaagcagctgctgggcaagcccatccagctgagtgacctggagagcgtggaccctgagctgcacaagagcctggtgtggatcctggagaatgacatcacccctgtgctggaccacaccttctgtgtggagcacaatgccttcggccgcatcctgcagcacgagctgaagcccaatggaagaaatgtgcctgtgacagaggagaacaagaaggagtatgtgcggctgtatgtgaactggaggttcatgaggggcatcgaggcccagttcctggccctgcagaagggcttcaatgagctgatcccccagcacctgctgaagccctttgaccagaaggagctggagctgatcatcggcggcctggacaagattgacctgaatgactggaagagcaacacccggctgaagcactgtgtggccgacagcaacatcgtgcgctggttctggcaggccgtggagacctttgatgaggagcggcgggcccggctgctgcagtttgtgacaggcagcaccagggtgcccctgcagggcttcaaggccctgcagggcagcactggagctgctggccccaggctcttcaccatccacctgattgatgccaacacagacaacctgcccaaggcccacacctgcttcaacagaattgacatccccccctatgagagctatgagaagctgtatgagaagctgctgacagctgtggaggagacctgtggctttgctgtggagtag

SEQ ID NO: 169962 - DNA, 2196 bp, synthetic construct
  misc_feature 1..2196: note = Description of Artificial Sequence: Synthetic coding sequence
  source 1..2196: mol_type = other DNA
atgagcaaccctggcaccaggagaaatggcagcagcatcaagatccggctgactgtgctgtgtgccaagaacctggccaagaaggacttcttccggctgcctgacccctttgccaagatcgtggtggatggcagcggccagtgccacagcacagacacagtgaagaacaccctggaccccaagtggaaccagcactatgacctgtatgtgggcaagacagacagcatcaccatctctgtgtggaaccacaagaagatccacaagaagcagggcgccggcttcctgggctgtgtgcggctgctgagcaatgccatcagccggctgaaggacaccggctaccagaggctggacctgtgcaagctgaaccccagcgacacagatgctgtgcggggccagatcgtggtgtccctgcagacccgggacagaattggaactggaggctctgtggtggactgccggggcctgctggagaatgaaggaacagtgtatgaggacagcggccctggccggcccctgagctgcttcatggaggagcccgccccctacacagacagcactggagctgctgctgggggcggcaactgccgctttgtggagagccccagccaggaccagaggctgcaggcccagaggctgagaaatccagatgtgcggggcagcctgcagaccccccagaaccggccccacggccaccagagccctgagctgcctgagggctatgagcagaggaccaccgtgcagggccaggtgtacttcctgcacacccagacaggagtgtccacctggcatgacccccgcatcccccgggacctgaacagcgtgaactgtgatgagctgggccccctgcccccaggctgggaggtgcgcagcacagtgtctggccgcatctactttgtggaccacaacaacagaaccacccagttcacagacccccggctgcaccacatcatgaaccaccagtgccagctgaaggagcccagccagcccctgcccctgcccagcgagggcagcctggaggatgaggagctgcctgcccagagatatgaaagagacctggtgcagaagctgaaggtgctgcggcatgagctgagcctgcagcagccccaggccggccactgcagaattgaggtgtcccgggaggagatctttgaggagagctaccggcagatcatgaagatgaggcccaaggacctgaagaagaggctgatggtgaagttccggggggaggagggcctggactatggaggagtggcccgggagtggctgtacctgctgtgccacgagatgctgaacccctactacggcctcttccagtacagcacagacaacatctacatgctgcagatcaacccagacagcagcatcaacccagaccacctgagctacttccactttgtgggccgcatcatgggcctggccgtgttccacggccactacatcaatggaggcttcaccgtgcccttctacaagcagctgctgggcaagcccatccagctgagtgacctggagagcgtggaccctgagctgcacaagagcctggtgtggatcctggagaatgacatcacccctgtgctggaccacaccttctgtgtggagcacaatgccttcggccgcatcctgcagcacgagctgaagcccaatggaagaaatgtgcctgtgacagaggagaacaagaaggagtatgtgcggctgtatgtgaactggaggttcatgaggggcatcgaggcccagttcctggccctgcagaagggcttcaatgagctgatcccccagcacctgctgaagccctttgaccagaaggagctggagctgatcatcggcggcctggacaagattgacctgaatgactggaagagcaacacccggctgaagcactgtgtggccgacagcaacatcgtgcgctggttctggcaggccgtggagacctttgatgaggagcggcgggcccggctgctgcagtttgtgacaggcagcaccagggtgcccctgcagggcttcaaggccctgcagggcagcactggagctgctggccccaggctcttcaccatccacctgattgatgccaacacagacaacctgcccaaggcccacacctgcttcaacagaattgacatccccccctatgagagctatgagaagctgtatgagaagctgctgacagctgtggaggagacctgtggctttgctgtggagtag

SEQ ID NO: 169963 - DNA, 1323 bp, synthetic construct
  misc_feature 1..1323: note = Description of Artificial Sequence: Synthetic coding sequence
  source 1..1323: mol_type = other DNA
atggccaccaggagctgccgggagaaggcccagaagctgaatgagcagcaccagctgatcctgagcaagctgctgcgggaggaggacaacaagtactgtgccgactgtgaggccaagggcccccgctgggcctcctggaacatcggggtcttcatctgcatccgctgtgccggcatccacaggaacctgggcgtgcacatcagccgggtgaagtctgtgaacctggaccagtggacagctgagcagatccagtgcatgcaggacatgggcaacaccaaggcccggctgctgtatgaggccaacctgcctgagaacttcagaagaccccagacagaccaggccgtggagttcttcatccgggacaagtatgagaagaagaagtactatgacaagaatgccatcgccatcaccaacaaggagaaggagaagaagaaggaggagaagaagcgggagaaggagcctgagaagccagccaagcccctgacagctgagaagctgcagaagaaggaccagcagctggagcccaagaagagcaccagccccaagaaggctgctgagcccaccgtggacctgctgggcctggatggccctgctgtggcccctgtgaccaacggcaacaccaccgtgccccccctgaatgatgacctggacatcttcggccccatgatcagcaaccccctgcctgccaccgtgatgcccccagcccagggcacccccagcgccccagctgctgccaccctgagcacagtgaccagcggggacctggacctcttcacagagcagaccaccaagtctgaggaggtggccaagaagcagctgagcaaggacagcatcctgagcctgtatggcaccggcaccatccagcagcagagcaccccaggagtcttcatgggccccaccaacatccccttcaccagccaggccccagctgccttccagggcttccccagcatgggcgtgcctgtgcctgctgcccctggcctgattggaaatgtgatgggccagagccccagcatgatggtgggcatgcccatgcccaacggcttcatgggaaatgcccagacaggagtgatgcccctgccccagaatgtggtgggcccccagggcggcatggtgggccagatgggcgccccccagagcaagtttggcctgccccaggcccagcagccccagtggagcctgagccagatgaaccagcagatggccggcatgagcatcagcagcgccacccccacagctggcttcggccagcccagcagcaccacagctggctggagcggcagcagcagcggccagaccctgagcacccagctgtggaagtag

SEQ ID NO: 169964 - DNA, 489 bp, synthetic construct
  misc_feature 1..489: note = Description of Artificial Sequence: Synthetic coding sequence
  source 1..489: mol_type = other DNA
atgggcaacaccaaggcccggctgctgtatgaggccaacctgcctgagaacttcagaagaccccagacagaccaggccgtggagttcttcatccgggacaagtatgagaagaagaagtactatgacaagaatgccatcgccatcaccaacatcagcagcagtgatgcccccctgcagcccctggtgagcagccccagcctgcaggccgctgtggacaagaacaagctggagaaggagaaggagaagaagaaggaggagaagaagcgggagaaggagcctgagaagccagccaagcccctgacagctgagaagctgcagaagaaggaccagcagctggagcccaagaagagcaccagccccaagaaggctgctgagcccaccgtggacctgctgggcctggtgtggaggaagattgagaaggagaagtctgagcggcagctggtggaggtggaggagctgaccttcatgtactgcttccccaagaactag

SEQ ID NO: 169965 - DNA, 1311 bp, synthetic construct
  misc_feature 1..1311: note = Description of Artificial Sequence: Synthetic coding sequence
  source 1..1311: mol_type = other DNA
atggccaccaggagctgccgggagaaggcccagaagctgaatgagcagcaccagctgatcctgagcaagctgctgcgggaggaggacaacaagtactgtgccgactgtgaggccaagggcccccgctgggcctcctggaacatcggggtcttcatctgcatccgctgtgccggcatccacaggaacctgggcgtgcacatcagccgggtgaagtctgtgaacctggaccagtggacagctgagcagatccagtgcatgcaggacatgggcaacaccaaggcccggctgctgtatgaggccaacctgcctgagaacttcagaagaccccagacagaccaggccgtggagttcttcatccgggacaagtatgagaagaagaagtactatgacaagaatgccatcgccatcaccaacaaggagaaggagaagaagaaggaggagaagaagcgggagaaggagcctgagaagccagccaagcccctgacagctgagaagctgcagaagaaggaccagcagctggagcccaagaagagcaccagccccaagaaggctgctgagcccaccgtggacctgctgggcctggatggccctgctgtggcccctgtgaccaacggcaacaccaccgtgccccccctgaatgatgacctggacatcttcggccccatgatcagcaaccccctgcctgccaccgtgatgcccccagcccagggcacccccagcgccccagctgctgccaccctgagcacagtgaccagcggggacctggacctcttcacagagcagaccaccaagtctgaggaggtggccaagaagcagctgagcaaggacagcatcctgagcctgtatggcaccggcaccatccagcagcagagcaccccaggagtcttcatgggccccaccaacatccccttcaccagccaggccccagctgccttccagggcttccccagcatgggcgtgcctgtgcctgctgcccctggcctgattggaaatgtgatgggccagagccccagcatgatggtgggcatgcccatgcccaacggcttcatgggaaatgcccagacaggagtgatgcccctgccccagaatgtggtgggcccccagggcggcatggtgggccagatgggcgccccccagagcaagtttggcctgccccaggcccagcagccccagtggagcctgagccagatcatgcagaagggagatgctgtgctgcagcacagcatcagcgccatctactggcccatgacccgctggctgaagtgccccctggtggatgagagcgcagatggctggcatgagtaccagtag

SEQ ID NO: 169966 - DNA, 1404 bp, synthetic construct
  misc_feature 1..1404: note = Description of Artificial Sequence: Synthetic coding sequence
  source 1..1404: mol_type = other DNA
atggccaccaggagctgccgggagaaggcccagaagctgaatgagcagcaccagctgatcctgagcaagctgctgcgggaggaggacaacaagtactgtgccgactgtgaggccaagggcccccgctgggcctcctggaacatcggggtcttcatctgcatccgctgtgccggcatccacaggaacctgggcgtgcacatcagccgggtgaagtctgtgaacctggaccagtggacagctgagcagatccagtgcatgcaggacatgggcaacaccaaggcccggctgctgtatgaggccaacctgcctgagaacttcagaagaccccagacagaccaggccgtggagttcttcatccgggacaagtatgagaagaagaagtactatgacaagaatgccatcgccatcaccaacatcagcagcagtgatgcccccctgcagcccctggtgagcagccccagcctgcaggccgctgtggacaagaacaagctggagaaggagaaggagaagaagaaggaggagaagaagcgggagaaggagcctgagaagccagccaagcccctgacagctgagaagctgcagaagaaggaccagcagctggagcccaagaagagcaccagccccaagaaggctgctgagcccaccgtggacctgctgggcctggatggccctgctgtggcccctgtgaccaatggaaacaccaccgtgccccccctgaatgatgacctggacatcttcggccccatgatcagcaaccccctgcctgccaccgtgatgcccccagcccagggcaccccatctgccccagctgctgccaccctgagcacagtgaccagcggggacctggacctcttcacagagcagaccaccaagtctgaggaggtggccaagaagcagctgagcaaggacagcatcctgagcctgtatggaacaggcaccatccagcagcagagcaccccaggagtcttcatgggccccaccaacatccccttcaccagccaggccccagctgccttccagggcttccccagcatgggcgtgcctgtgcctgctgcccctggcctgattggaaatgtgatgggccagagccccagcatgatggtgggcatgcccatgcccaacggcttcatgggaaatgcccagacaggagtgatgcccctgccccagaatgtggtgggcccccagggcggcatggtgggccagatgggcgccccccagagcaagtttggcctgccccaggcccagcagccccagtggagcctgagccagatgaaccagcagatggccggcatgagcatcagcagcgccacccccacagctggcttcggccagcccagcagcaccacagctggctggagcggcagcagcagcggccagaccctgagcacccagctgtggaagtag

SEQ ID NO: 169967 - DNA, 414 bp, synthetic construct
  misc_feature 1..414: note = Description of Artificial Sequence: Synthetic coding sequence
  source 1..414: mol_type = other DNA
atggccaccaggagctgccgggagaaggcccagaagctgaatgagcagcaccagctgatcctgagcaagctgctgcgggaggaggacaacaagtactgtgccgactgtgaggccaagggcccccgctgggcctcctggaacatcggggtcttcatctgcatccgctgtgccggcatccacaggaacctgggcgtgcacatcagccgggtgaagtctgtgaacctggaccagtggacagctgagcagatccagtgcatgcaggacatgggcaacaccaaggcccggctgctgtatgaggccaacctgcctgagaacttcagaagaccccagacagaccacgaggacatcatcctggagaccacagctgtgatcaccctgctgctgaacaagtgcctgccctatgccaagccctag

SEQ ID NO: 169968 - DNA, 378 bp, synthetic construct
  misc_feature 1..378: note = Description of Artificial Sequence: Synthetic coding sequence
  source 1..378: mol_type = other DNA
tgaaaatactatgacaagaatgccatcgccatcaccaacatcagcagcagtgatgcccccctgcagcccctggtgagcagccccagcctgcaggccgctgtggacaagaacaagctggagaaggagaaggagaagaagaaggaggagaagaagcgggagaaggagcctgagaagccagccaagcccctgacagctgagaagctgcagaagaaggaccagcagctggagcccaagaagagcaccagccccaagaaggctgctgagcccaccgtggacctgctgggcctggtgtggaggaagattgagaaggagaagtctgagcggcagctggtggaggtggaggagctgaccttcatgtactgcttccccaagaactag

SEQ ID NO: 169969 - DNA, 189 bp, synthetic construct
  misc_feature 1..189: note = Description of Artificial Sequence: Synthetic coding sequence
  source 1..189: mol_type = other DNA
atgctgttcctgaagctgtctgtgttccgggctgtggagttcttcatccgggacaagtatgagaagaagaagtactatgacaagaatgccatcgccatcaccaacatcagcagcagtgatgcccccctgcagcccctggtgagcagccccagcctgcaggccgctgtggacaagaacaagctggagtag

SEQ ID NO: 169970 - DNA, 1200 bp, synthetic construct
  misc_feature 1..1200: note = Description of Artificial Sequence: Synthetic coding sequence
  source 1..1200: mol_type = other DNA
atgatcttcaagggcccccgctgggcctcctggaacattggagtcttcatctgcatccgctgtgccggcatccacaggaacctgggcgtgcacatcagccgggtgaagtctgtgaacctggaccagtggacccaggagcagatccagtgcatgcaggagatgggaaatggcaaggccaaccggctgtatgaggcctacctgcctgagaccttccggcggccccagattgatcctgctgtggagggcttcatccgggacaagtatgagaagaagaagtacatggacaggagcctggacatcaatgccttcaggaaggagaaggatgacaagtggaagaggggcagcgagcctgtgcctgagaagaagctggagcctgtggtgtttgagaaggtgaagatgccccagaagaaggaggacccccagctgcccaggaagagcagccccaagagcacagcccctgtgatggacctgctgggcctggatgcccctgtggcctgcagcatcgccaacagcaagaccagcaacaccctggagaaggacctggacctgctggcctctgtgcccagccccagcagcagcggcagcaggaaggtggtgggctccatgcccacagctggcagcgctggctctgtgcctgagaacctgaacctcttccctgagcccggcagcaagtctgaggagatcggcaagaagcagctgagcaaggacagcatcctgagcctgtatggcagccagaccccccagatgcccacccaggccatgttcatggccccagcccagatggcctaccccacagcctaccccagcttccctggggtgaccccacccaacagcatcatgggctccatgatgcctcctcctgtgggcatggtggcccagcccggggccagcggcatggtggcccccatggccatgcctgctggctacatgggcggcatgcaggcctccatgatgggcgtgcccaacggcatgatgaccacccagcaggccggctacatggccggcatggccgccatgccccagacagtgtatggagtgcagcctgcccagcagctgcagtggaacctgacccagatgacccagcagatggccggcatgaacttctatggagccaacggcatgatgaactacggccagagcatgtctggaggaaatggccaggccgccaaccagaccctgagcccccagatgtggaagtag

SEQ ID NO: 169971 - DNA, 1290 bp, synthetic construct
  misc_feature 1..1290: note = Description of Artificial Sequence: Synthetic coding sequence
  source 1..1290: mol_type = other DNA
atgaccgggaagtctgtgaaggatgtggaccgctaccaggccgtgctggccaacctgctgctggaggaggacaacaagttctgtgccgactgccagagcaagggcccccgctgggcctcctggaacattggagtcttcatctgcatccgctgtgccggcatccacaggaacctgggcgtgcacatcagccgggtgaagtctgtgaacctggaccagtggacccaggagcagatccagtgcatgcaggagatgggaaatggcaaggccaaccggctgtatgaggcctacctgcctgagaccttccggcggccccagattgatcctgctgtggagggcttcatccgggacaagtatgagaagaagaagtacatggacaggagcctggacatcaatgccttcaggaaggagaaggatgacaagtggaagaggggcagcgagcctgtgcctgagaagaagctggagcctgtggtgtttgagaaggtgaagatgccccagaagaaggaggacccccagctgcccaggaagagcagccccaagagcacagcccctgtgatggacctgctgggcctggatgcccctgtggcctgcagcatcgccaacagcaagaccagcaacaccctggagaaggacctggacctgctggcctctgtgcccagccccagcagcagcggcagcaggaaggtggtgggctccatgcccacagctggcagcgctggctctgtgcctgagaacctgaacctcttccctgagcccggcagcaagtctgaggagatcggcaagaagcagctgagcaaggacagcatcctgagcctgtatggcagccagaccccccagatgcccacccaggccatgttcatggccccagcccagatggcctaccccacagcctaccccagcttccctggggtgaccccacccaacagcatcatgggctccatgatgcctcctcctgtgggcatggtggcccagcccggggccagcggcatggtggcccccatggccatgcctgctggctacatgggcggcatgcaggcctccatgatgggcgtgcccaacggcatgatgaccacccagcaggccggctacatggccggcatggccgccatgccccagacagtgtatggagtgcagcctgcccagcagctgcagtggaacctgacccagatgacccagcagatggccggcatgaacttctatggagccaacggcatgatgaactacggccagagcatgtctggaggaaatggccaggccgccaaccagaccctgagcccccagatgtggaagtag

SEQ ID NO: 169972 - DNA, 684 bp, synthetic construct
  misc_feature 1..684: note = Description of Artificial Sequence: Synthetic coding sequence
  source 1..684: mol_type = other DNA
atgaccgggaagtctgtgaaggatgtggaccgctaccaggccgtgctggccaacctgctgctggaggaggacaacaagttctgtgccgactgccagagcaagggcccccgctgggcctcctggaacattggagtcttcatctgcatccgctgtgccggcatccacaggaacctgggcgtgcacatcagccgggtgaagtctgtgaacctggaccagtggacccaggagcagatccagtgcatgcaggagatgggaaatggcaaggccaaccggctgtatgaggcctacctgcctgagaccttccggcggccccagattgatcctgctgtggagggcttcatccgggacaagtatgagaagaagaagtacatggacaggagcctggacatcaatgccttcaggaaggagaaggatgacaagtggaagaggggcagcgagcctgtgcctgagaagaagctggagcctgtggtgtttgagaaggtgaagatgccccagaagaaggaggacccccagctgcccaggaagagcagccccaagagcacagcccctgtgatggacctgctgggcctggatgcccctgtggcctgcagcatcgccaacagcaagaccagcaacaccctggagaaggacctggacctgctggcctctgtgcccagccccagcagcagcggcagcaggaagtag

SEQ ID NO: 169973 - DNA, 1050 bp, synthetic construct
  misc_feature 1..1050: note = Description of Artificial Sequence: Synthetic coding sequence
  source 1..1050: mol_type = other DNA
atgcaggagatgggaaatggcaaggccaaccggctgtatgaggcctacctgcctgagaccttccggcggccccagattgatcctgctgtggagggcttcatccgggacaagtatgagaagaagaagtacatggacaggagcctggacatcaatgccttcaggaaggagaaggatgacaagtggaagaggggcagcgagcctgtgcctgagaagaagctggagcctgtggtgtttgagaaggtgaagatgccccagaagaaggaggacccccagctgcccaggaagagcagccccaagagcacagcccctgtgatggacctgctgggcctggatgcccctgtggcctgcagcatcgccaacagcaagaccagcaacaccctggagaaggacctggacctgctggcctctgtgcccagccccagcagcagcggcagcaggaaggtggtgggctccatgcccacagctggcagcgctggctctgtgcctgagaacctgaacctcttccctgagcccggcagcaagtctgaggagatcggcaagaagcagctgagcaaggacagcatcctgagcctgtatggcagccagaccccccagatgcccacccaggccatgttcatggccccagcccagatggcctaccccacagcctaccccagcttccctggggtgaccccacccaacagcatcatgggctccatgatgcctcctcctgtgggcatggtggcccagcccggggccagcggcatggtggcccccatggccatgcctgctggctacatgggcggcatgcaggcctccatgatgggcgtgcccaacggcatgatgaccacccagcaggccggctacatggccggcatggccgccatgccccagacagtgtatggagtgcagcctgcccagcagctgcagtggaacctgacccagatgacccagcagatggccggcatgaacttctatggagccaacggcatgatgaactacggccagagcatgtctggaggaaatggccaggccgccaaccagaccctgagcccccagatgtggaagtag

SEQ ID NO: 169974 - DNA, 189 bp, synthetic construct
  misc_feature 1..189: note = Description of Artificial Sequence: Synthetic coding sequence
  source 1..189: mol_type = other DNA
atggcccggggcaaccagcgggagctggcccggcagaagaacatgaagaagacccaggagatcagcaagggcaagaggaaggaggacagcctgacagccagccagaggaagcagagggacagcgagatcatgcaggagaagcagaaggccgccaatgagaagaagtccatgcagacccgggagaagtag

SEQ ID NO: 169975 - DNA, 333 bp, synthetic construct
  misc_feature 1..333: note = Description of Artificial Sequence: Synthetic coding sequence
  source 1..333: mol_type = other DNA
atggcccggggcaaccagcgggagctggcccggcagaagaacatgaagaagacccaggagatcagcaagggcaagaggaaggaggacagcctgacagccagccagaggaagcagagcagcggcggccagaagtctgagagcaagatgtctgctggcccccacctgcccctgaaggccccccgggagaacccctgcttccccctgcctgctgctgggggcagccgctactacctggcctacggcagcatcacccccatcagcgcctttgtgtttgtggtgttcttcagcgtcttcttccccagcttctatgaggacttctgctgctggatctag

SEQ ID NO: 169976 - DNA, 147 bp, synthetic construct
  misc_feature 1..147: note = Description of Artificial Sequence: Synthetic coding sequence
  source 1..147: mol_type = other DNA
atgaagaagacccaggagatcagcaagggcaagaggaaggaggacagcctgacagccagccagaggaagcagagggacagcgagatcatgcaggagaagcagaaggccgccaatgagaagaagtccatgcagacccgggagaagtag

SEQ ID NO: 169977 - DNA, 63 bp, synthetic construct
  misc_feature 1..63: note = Description of Artificial Sequence: Synthetic coding sequence
  source 1..63: mol_type = other DNA
atgaagaagacccaggagatcagcaagggcaagaggaaggaggacagcctgacagccagctag

SEQ ID NO: 169978 - DNA, 291 bp, synthetic construct
  misc_feature 1..291: note = Description of Artificial Sequence: Synthetic coding sequence
  source 1..291: mol_type = other DNA
atgaagaagacccaggagatcagcaagggcaagaggaaggaggacagcctgacagccagccagaggaagcagagcagcggcggccagaagtctgagagcaagatgtctgctggcccccacctgcccctgaaggccccccgggagaacccctgcttccccctgcctgctgctgggggcagccgctactacctggcctacggcagcatcacccccatcagcgcctttgtgtttgtggtgttcttcagcgtcttcttccccagcttctatgaggacttctgctgctggatctag

SEQ ID NO: 169979 - DNA, 270 bp, synthetic construct
  misc_feature 1..270: note = Description of Artificial Sequence: Synthetic coding sequence
  source 1..270: mol_type = other DNA
atgaagaagacccaggagatcagcaagggcaagaggaaggaggacagcctgacagccagccagaggaagcagagcagcggcggccagaagtctgagagcaagatgtctgctggcccccacctgcccctgaaggccccccgggagaacccctgcttccccctgcctgctgctgggggcagccgctactacctggcctacggcagcatcacccccatcagcgcctttgtgtttgtggtgttcttcagcgtcttcttccccagcttctactag

SEQ ID NO: 169980 - DNA, 3156 bp, synthetic construct
  misc_feature 1..3156: note = Description of Artificial Sequence: Synthetic coding sequence
  source 1..3156: mol_type = other DNA
atgggcagcgcagaagatgctgtgaaggagaagctgctgtggaatgtgaagaaggaggtgaagcagatcatggaggaggccgtgaccaggaagtttgtgcatgaggacagcagccacatcatcgccctgtgtggggctgtggaggcctgcctgctgcaccagctgcggaggagagctgctggcttcctgcggagtgacaagatggccgccctcttcaccaaggtgggcaagacctgccctgtggccggggagatctgccacaaggtgcaggagctgcagcagcaggccgagggcaggaagcccagcggcgtgtcccaggaggccctgcggcggcagggcagcgccagcggcaaggccccagccctgagcccccaggccctgaagcacgtgtgggtgaggacagccctgattgagaaggtgctggacaaggtggtgcagtacctggccgagaactgcagcaagtactatgagaaggaggccctgctggccgaccctgtgtttggccccatcctggccagcctgctggtgggcccctgtgccctggagtacaccaagctgaagacagctgaccactactggacagaccccagcgcagatgagctggtgcagaggcaccgcatccggggcccccccacccggcaggacagccctgccaagaggcctgccctgggcatcaggaagaggcacagcagcggcagcgccagcgaggaccggctggccgcctgtgccagagaatgtgtggagagcctgcaccagaacagcaggacccggctgctgtatggcaagaaccacgtgctggtgcagcccaaggaggacatggaggccgtgcccggctacctgagcctgcaccagagcgctgagagcctgaccctgaagtggacccccaaccagctgatgaatggcaccctgggggacagcgagctggagaagtctgtgtactgggactatgccctggtggtgcccttcagccaggtggtgtgcatccactgccaccagcagaagagcggcggcaccctggtgctggtgtcccaggacggcatccagaggcctcccctgcacttcccccagggcggccacctgctgtccttcctgagctgcctggagaatggcctgctgccccggggccagctggagccccccctgtggacccagcagggcaagggcaaggtgttccccaagctgaggaagaggagcagcatccgctctgtggacatggaggagatgggcaccggccgggccacagattatgtgttccgcatcatctacccaggccacagacatgagcacatcaccatcaactaccaccacctggccgccagccgggccgcctctgtggatgatgatgaggaggaggaggacaagctgcacgccatgctgtccatgatctgcagcaggaacctgacagcccccaaccccatgaaggatgctggggacatgattgagatgcagggcttcggccccagcctgcctgcctggcacctggagcccctgtgcagccagggcagcagctgcctgagctgcagcagcagcagcagcccccacgccacccccagccactgcagctgcatcccagaccggctgcccctgcggctgctgtgtgagagcatgaagaggcagatcgtgtcccgggccttctacggctggctggcccactgccgccacctgagcacagtgaggacccacctgagcgccctggtgcaccacagcgtcatccccccagaccggcccccaggggccagcgctggcctgaccaaggatgtgtggagcaagtaccagaaggacaagaagaactacaaggagctggagctgctgcggcaggtgtactatggaggcatcgagcacgagatcaggaaggatgtgtggcccttcctgctgggccactacaagtttggcatgagcaagaaggagatggagcaggtggatgctgtggtggccgcccgctaccagcaggtgctggccgagtggaaggcctgtgaggtggtggtgcggcagcgggagcgggaggcccacccagccaccaggaccaagttcagcagcggcagcagcattgacagccacgtgcagaggctcatccaccgggacagcaccatcagcaatgatgtgttcatctctgtggatgacctggagcccccagagccccaggaccctgaggacagccggcccaagccagagcaggaggccggccctggcaccccaggcacagctgtggtggagcagcagcacagcgtggagtttgacagcccagacagcggcctgcccagcagcaggaactacagcgtggccagcggcatccagagcagcctggatgagggccagagcgtgggctttgaggaggaggatggcggcggggaggagggcagcagcggccctggccctgctgcccacaccctgcgggagccccaggaccccagccaggagaagccccaggccggggagctggaggccggggaggagctggccgctgtgtgtgccgccgcctacaccatcgagctgctggacacagtggccctgaacctgcacagaattgacaaggatgtgcagagatgtgacaggaactactggtacttcaccccacccaacctggagcggctgagagatgtgatgtgcagctatgtgtgggagcacctggatgtgggctacgtgcagggcatgtgtgacctgctggcccccctgctggtgaccctggacaatgaccagctggcctacagctgcttcagccacctgatgaagaggatgagccagaacttccccaacggcggggccatggacacccactttgccaacatgaggagcctcatccagatcctggacagcgagctgtttgagctgatgcaccagaatggagactacacccacttctacttctgctaccgctggttcctgctggacttcaagcgggagctgctgtatgaagatgtgtttgctgtgtgggaggtgatctgggccgcccggcacatcagcagcgagcactttgtgctcttcatcgccctggccctggtggaggcctaccgggagatcatccgggacaacaacatggacttcacagacatcatcaagttcttcaatgaaagagctgagcaccatgatgcccaggagatcctgcgcatcgcccgggacctggtgcacaaggtgcagatgctgattgagaacaagtag

SEQ ID NO: 169981 - DNA, 3021 bp, synthetic construct
  misc_feature 1..3021: note = Description of Artificial Sequence: Synthetic coding sequence
  source 1..3021: mol_type = other DNA
atgggcagcgcagaagatgctgtgaaggagaagctgctgtggaatgtgaagaaggaggtgaagcagatcatggaggaggccgtgaccaggaagtttgtgcatgaggacagcagccacatcatcgccctgtgtggggctgtggaggcctgcctgctgcaccagctgcggaggagagctgctggcttcctgcggagtgacaagatggccgccctcttcaccaaggtgggcaagacctgccctgtggccggggagatctgccacaaggtgcaggagctgcagcagcaggccgagggcaggaagcccagcggcgtgtcccaggaggccctgcggcggcagggcagcgccagcggcaaggccccagccctgagcccccaggccctgaagcacgtgtgggtgaggacagccctgattgagaaggtgctggacaaggtggtgcagtacctggccgagaactgcagcaagtactatgagaaggaggccctgctggccgaccctgtgtttggccccatcctggccagcctgctggtgggcccctgtgccctggagtacaccaagctgaagacagctgaccactactggacagaccccagcgcagatgagctggtgcagaggcaccgcatccggggcccccccacccggcaggacagccctgccaagaggcctgccctgggcatcaggaagaggcacagcagcggcagcgccagcgaggaccggctggccgcctgtgccagagaatgtgtggagagcctgcaccagaacagcaggacccggctgctgtatggcaagaaccacgtgctggtgcagcccaaggaggacatggaggccgtgcccggctacctgagcctgcaccagagcgctgagagcctgaccctgaagtggacccccaaccagctgatgaatggcaccctgggggacagcgagctggagaagtctgtgtactgggactatgccctggtggtgcccttcagccaggtggtgtgcatccactgccaccagcagaagagcggcggcaccctggtgctggtgtcccaggacggcatccagaggcctcccctgcacttcccccagggcggccacctgctgtccttcctgagctgcctggagaatggcctgctgccccggggccagctggagccccccctgtggacccagcagggcaagggcaaggtgttccccaagctgaggaagaggagcagcatccgctctgtggacatggaggagatgggcaccggccgggccacagattatgtgttccgcatcatctacccaggccacagacatgagcacaatgctggggacatgattgagatgcagggcttcggccccagcctgcctgcctggcacctggagcccctgtgcagccagggcagcagctgcctgagctgcagcagcagcagcagcccccacgccacccccagccactgcagctgcatcccagaccggctgcccctgcggctgctgtgtgagagcatgaagaggcagatcgtgtcccgggccttctacggctggctggcccactgccgccacctgagcacagtgaggacccacctgagcgccctggtgcaccacagcgtcatccccccagacaggcctcctggggccagcgctggcctgaccaaggatgtgtggagcaagtaccagaaggacaagaagaactacaaggagctggagctgctgcggcaggtgtactacggcggcattgaacatgagatcaggaaggatgtgtggcccttcctgctgggccactacaagtttggcatgagcaagaaggagatggagcaggtggatgctgtggtggccgcccgctaccagcaggtgctggccgagtggaaggcctgtgaggtggtggtgcggcagcgggagcgggaggcccacccagccaccaggaccaagttcagcagcggcagcagcattgacagccacgtgcagaggctcatccaccgggacagcaccatcagcaatgatgtgttcatctctgtggatgacctggagcccccagagccccaggaccctgaggacagccggcccaagccagagcaggaggccggccctggcaccccaggcacagctgtggtggagcagcagcacagcgtggagtttgacagcccagattctggcctgcccagcagcaggaactacagcgtggccagcggcatccagagcagcctggatgagggccagagcgtgggctttgaggaggaggatggcggcggggaggagggcagcagcggccctggccctgctgcccacaccctgcgggagccccaggaccccagccaggagaagccccaggccggggagctggaggccggggaggagctggccgctgtgtgtgccgccgcctacaccatcgagctgctggacacagtggccctgaacctgcacagaattgacaaggatgtgcagagatgtgacaggaactactggtacttcaccccacccaacctggagcggctgagagatgtgatgtgcagctatgtgtgggagcacctggatgtgggctacgtgcagggcatgtgtgacctgctggcccccctgctggtgaccctggacaatgaccagctggcctacagctgcttcagccacctgatgaagaggatgagccagaacttccccaatggaggagccatggacacccactttgccaacatgaggagcctcatccagatcctggacagcgagctgtttgagctgatgcaccagaatggagactacacccacttctacttctgctaccgctggttcctgctggacttcaagcgggagctgctgtatgaagatgtgtttgctgtgtgggaggtgatctgggccgcccggcacatcagcagcgagcactttgtgctcttcatcgccctggccctggtggaggcctaccgggagatcatccgggacaacaacatggacttcacagacatcatcaagttcttcaatgaaagagctgagcaccatgatgcccaggagatcctgagaattgcccgggacctggtgcacaaggtgcagatgctgattgagaacaagtag

SEQ ID NO: 169982 - DNA, 795 bp, synthetic construct
  misc_feature 1..795: note = Description of Artificial Sequence: Synthetic coding sequence
  source 1..795: mol_type = other DNA
atgtgccacaagaatggcttcccccaggagggcggcatcacagctgccttcctgcagaagaggaagctgcggctgagcaagaaccacaggcctgcccgggccaaggtgacagaacatgtgcggggcaccaggcctggccgggccacagctggccctgctgccagcaccagggctgctggcagcctcttctttgaccgctggggcaacagaggccctgctggctgccggggcagcagccacctgccccagcagctgaagttcaccaccagtgacagctgtgaccgcatcaaggatgagttccagctgctgcaggcccagtaccacagcctgaagctggagtgtgacaagctggccagcgagaagtctgagatgcagaggcactacgtgatgtactatgagatgtcctatggcctgaacatcgagatgcacaagcaggccgagatcgtgaagaggctgaatggcatctgtgcccaggtgctgccctacctgagccaggagcaccagcagcaggtgctgggcgccatcgagcgggccaagcaggtgacagcccctgagctgaacagcatcatccggcagcagctgcaggcccaccagctgagccagctgcaggccctggccctgcccctgacccccctgcctgtgggcctgcagccccccagcctgcctgctgtgtctgctggcaccggcctgctgagcctgagcgccctgggcagccaggcccacctgagcaaagaagacaagaatggacatgatggagacacccaccaggaggatgatggagagaagagtgactag

SEQ ID NO: 169983 - DNA, 267 bp, synthetic construct
  misc_feature 1..267: note = Description of Artificial Sequence: Synthetic coding sequence
  source 1..267: mol_type = other DNA
atgaacatgagcaagcagcctgtgtccaatgtgcgggccatccaggccaacatcaacatccccatgggcgccttccggcctggagctggccagccccccaggaggaaagaatgtaccccagaggtggaggagggcgtgccccccaccagtgatgaggagaagaagcccatccctggggccaagaagctgcccggccctgctgtgaacctgtctgagatccagaacatcaagtctgagctgaagtatgtgcccaaggccgagcagtag

SEQ ID NO: 169984 - DNA, 6411 bp, synthetic construct
  misc_feature 1..6411: note = Description of Artificial Sequence: Synthetic coding sequence
  source 1..6411: mol_type = other DNA
atggctgatgtgacagcccggagcctgcagtatgagtacaaggccaacagcaacctggtgctgcaggccgacaggagcctgattgacaggaccaggagagatgagcccactggagaggtgctgagcctggtgggcaagctggagggcaccaggatgggagacaaggcccagaggaccaagccccagatgcaggaggagcggcgggccaagaggaggaagagagatgaggacagacatgacatcaacaagatgaagggctacaccctgctgtctgagggcattgatgagatggtgggcatcatctacaagcccaagaccaaggagacccgggagacctatgaggtgctgctgtccttcatccaggccgccctgggggaccagccccgggacatcctgtgtggggctgctgatgaggtgctggccgtgctgaagaatgagaagctgcgggacaaggagaggaggaaggagattgacctgctgctgggccagacagatgacacccgctaccacgtgctggtgaacctgggcaagaagatcacagattatggaggagacaaggagatccagaacatggatgacaacattgatgagacctatggagtgaatgtgcagtttgaaagtgatgaggaggagggagatgaagatgtgtatggagaggtgcgggaggaggccagtgatgatgacatggagggagatgaggccgtggtgcgctgcaccctgagcgccaacctggtggccagcggggagctgatgagcagcaagaagaaggacctgcacccccgggacattgatgccttctggctgcagaggcagctgagccgcttctatgatgatgccatcgtgtcccagaagaaggcagatgaggtgctggagatcctgaagacagccagtgatgacagagaatgtgagaaccagctggtgctgctgctgggcttcaacacctttgacttcatcaaggtgctgcggcagcacaggatgatgatcctgtactgcaccctgctggccagcgcccagagcgaggccgagaaggagcgcatcatgggcaagatggaggccgaccctgagctgagcaagttcctgtaccagctgcacgagacagagaaggaggacctgatccgggaggagaggagccggcgggagcgggtgcggcagagcaggatggacacagacctggagaccatggacctggaccagggcggggaggccctggccccccggcaggtgctggacctggaggacctggtgttcacccagggcagccacttcatggccaacaagcgctgccagctgcctgatggcagcttccggcggcagaggaagggctatgaggaggtgcacgtgcctgccctgaagcccaagccctttggaagtgaggagcagctgctgcctgtggagaagctgcccaagtatgcccaggccggctttgagggcttcaagaccctgaaccgcatccagagcaagctgtacagagctgccctggagacagatgagaacctgctgctgtgtgcccccactggagctgggaagaccaacgtggccctgatgtgcatgctgcgggagatcggcaagcacatcaacatggatggcaccatcaacgtggatgacttcaagatcatctacatcgcccccatgaggagcctggtgcaggagatggtgggcagctttgggaagaggctggccacctacggcatcaccgtggccgagctgaccggggaccaccagctgtgcaaggaggagatcagcgccacccagatcatcgtgtgcaccccagagaagtgggacatcatcaccaggaaaggaggagagaggacctacacccagctggtgcggctcatcatcctggatgagatccacctgctgcatgatgaccggggccctgtgctggaggccctggtggcccgggccatcagaaatattgagatgacccaggaggatgtgcggctgattggcctgagcgccaccctgcccaactatgaagatgtggccaccttcctgcgggtggaccctgccaagggcctcttctactttgacaacagcttccggcctgtgcccctggagcagacctacgtgggcatcacagagaagaaggccatcaagcgcttccagatcatgaatgaaattgtgtatgagaagatcatggagcacgccggcaagaaccaggtgctggtgtttgtgcacagcaggaaggagaccgggaagacagcccgggccatccgggacatgtgcctggagaaggacaccctgggcctcttcctgcgggagggcagcgccagcacagaggtgctgaggacagaggccgagcagtgcaagaacctggagctgaaggacctgctgccctacggctttgccatccaccacgccggcatgaccagggtggacaggaccctggtggaggacctgtttgctgacaagcacatccaggtgctggtgtccacagccaccctggcctggggcgtgaacctgcctgcccacacagtcatcatcaagggcacccaggtgtacagccctgagaagggccgctggacagagctgggcgccctggacatcctgcagatgctgggccgggccggccggccccagtatgacaccaagggggagggcatcctgatcaccagccatggagagctgcagtactacctgagcctgctgaaccagcagctgcccatcgagagccagatggtgtccaagctgcctgacatgctgaatgctgagatcgtgctgggcaatgtgcagaatgccaaggatgctgtgaactggctgggctacgcctacctgtacatccgcatgctgcggagccccaccctgtatggcatcagccatgatgacctgaagggggaccccctgctggaccagaggcggctggacctggtgcacacagctgccctgatgctggacaagaacaacctggtgaagtatgacaagaagacaggcaacttccaggtgacagagctgggcagaattgccagccactactacatcaccaatgacacagtgcagacctacaaccagctgctgaagcccaccctgtctgaaattgagctgttccgggtcttcagcctgagcagcgagttcaagaacatcaccgtgcgggaggaggagaagctggagctgcagaagctgctggagcgggtgcccatccctgtgaaggagagcattgaggagcccagcgccaagatcaacgtgctgctgcaggccttcatcagccagctgaagctggagggctttgccctgatggctgacatggtgtatgtgacccagagcgctggccgcctgatgagggccatctttgagatcgtgctgaacagaggctgggcccagctgacagacaagaccctgaacctgtgcaagatgattgacaagaggatgtggcagagcatgtgccccctgcggcagttcaggaagctgcctgaggaggtggtgaagaagattgagaagaagaacttcccctttgagcggctgtatgacctgaaccacaatgaaattggagagctgatccgcatgcccaagatgggcaagaccatccacaagtatgtgcacctgttccccaagctggagctgtctgtgcacctgcagcccatcaccaggagcaccctgaaggtggagctgaccatcaccccagacttccagtgggatgagaaggtgcacggcagcagcgaggccttctggatcctggtggaggatgtggacagcgaggtgatcctgcaccacgagtacttcctgctgaaggccaagtatgcccaggatgagcacctgatcaccttctttgtgcctgtgtttgagcccctgcccccccagtacttcatccgggtggtgtctgaccgctggctgagctgtgagacccagctgcctgtgtccttccgccacctgatcctgcctgagaagtaccccccacccacagagctgctggacctgcagcccctgcctgtgtctgccctgagaaattctgcctttgagagcctgtaccaggacaagttccccttcttcaaccccatccagacccaggtgttcaacacagtgtacaacagtgatgacaacgtgtttgtgggcgcccccaccggcagcggcaagaccatctgtgccgagtttgccatcctgaggatgctgctgcagagcagcgagggccgctgtgtgtacatcacccccatggaggccctggccgagcaggtgtacatggactggtatgagaagttccaggaccggctgaacaagaaggtggtgctgctgactggagagaccagcacagacctgaagctgctgggcaaaggaaacatcatcatcagcaccccagagaagtgggacatcctgagccgccgctggaagcagaggaagaatgtgcagaacatcaacctgtttgtggtggatgaggtgcacctgattggaggagaaaatggacctgtgctggaggtgatctgcagcaggatgagatacatcagcagccagatcgagcggcccatcagaattgtggccctgagcagcagcctgagcaatgccaaggatgtggcccactggctgggctgcagcgccaccagcaccttcaacttccaccccaacgtgcggcctgtgcccctggagctgcacatccagggcttcaacatcagccacacccagacccggctgctgtccatggccaagcctgtgtaccacgccatcaccaagcacagccccaagaagcctgtgattgtgtttgtgcccagcaggaagcagacccggctgacagccatcgacatcctgaccacctgtgccgctgacatccagaggcagcgcttcctgcactgcacagagaaggacctgatcccctacctggagaagctgagtgacagcaccctgaaggagaccctgctgaatggagtgggctacctgcacgagggcctgagccccatggagcggcggctggtggagcagctgttcagcagcggggccatccaggtggtggtggccagccgcagcctgtgctggggcatgaatgtggccgcccacctggtgatcatcatggacacccagtactacaacgggaagatccacgcctacgtggactaccccatctatgatgtgctgcagatggtgggccacgccaaccggcccctgcaggatgatgagggccgctgcgtcatcatgtgccagggcagcaagaaggacttcttcaagaagttcctgtatgagcccctgcctgtggagagccacctggaccactgcatgcatgaccacttcaatgctgagatcgtgaccaagaccatcgagaacaagcaggatgctgtggactacctgacctggaccttcctgtacagaaggatgacccagaaccccaactactacaacctgcagggcatcagccaccgccacctgagtgaccacctgtctgagctggtggagcagaccctgagtgacctggagcagagcaagtgcatcagcattgaagatgagatggatgtggcccccctgaacctgggcatgattgctgcctactactacatcaactacaccaccatcgagctgttctccatgagcctgaatgccaagaccaaggtgcggggcctcatcgagatcatcagcaatgctgctgaatatgagaacatccccatccgccaccacgaggacaacctgctgcggcagctggcccagaaggtgccccacaagctgaacaaccccaagttcaatgacccccacgtgaagaccaacctgctgctgcaggcccacctgagcaggatgcagctgtctgctgagctgcagagcgacacagaggagatcctgagcaaggccatccgcctcatccaggcctgtgtggatgtgctgagcagcaatggctggctgagccctgccctggccgccatggagctggcccagatggtgacccaggccatgtggagcaaggacagctacctgaagcagctgccccacttcaccagcgagcacatcaagcgctgcacagacaagggcgtggagagcgtgtttgacatcatggagatggaggatgaggagagaaatgccctgctgcagctgacagacagccagattgctgatgtggcccgcttctgcaaccgctaccccaacatcgagctgtcctatgaggtggtggacaaggacagcatccgcagcggcggccctgtggtggtgctggtgcagctggagcgggaggaggaggtgacaggccctgtgattgcccccctcttcccccagaagcgggaggagggctggtgggtggtgattggagatgccaagagcaacagcctcatcagcatcaagaggctgaccctgcagcagaaggccaaggtgaagctggactttgtggccccagccactggagcccacaactacaccctgtacttcatgtctgatgcctacatgggctgtgaccaggagtacaagttctctgtggatgtgaaggaggccgagacagacagcgacagcgactag

SEQ ID NO: 169985 - DNA, 1878 bp, synthetic construct
  misc_feature 1..1878: note = Description of Artificial Sequence: Synthetic coding sequence
  source 1..1878: mol_type = other DNA
atggctgatgtgacagcccggagcctgcagtatgagtacaaggccaacagcaacctggtgctgcaggccgacaggagcctgattgacaggaccaggagagatgagcccactggagaggtgctgagcctggtgggcaagctggagggcaccaggatgggagacaaggcccagaggaccaagccccagatgcaggaggagcggcgggccaagaggaggaagagagatgaggacagacatgacatcaacaagatgaagggctacaccctgctgtctgagggcattgatgagatggtgggcatcatctacaagcccaagaccaaggagacccgggagacctatgaggtgctgctgtccttcatccaggccgccctgggggaccagccccgggacatcctgtgtggggctgctgatgaggtgctggccgtgctgaagaatgagaagctgcgggacaaggagaggaggaaggagattgacctgctgctgggccagacagatgacacccgctaccacgtgctggtgaacctgggcaagaagatcacagattatggaggagacaaggagatccagaacatggatgacaacattgatgagacctatggagtgaatgtgcagtttgaaagtgatgaggaggagggagatgaagatgtgtatggagaggtgcgggaggaggccagtgatgatgacatggagggagatgaggccgtggtgcgctgcaccctgagcgccaacctggtggccagcggggagctgatgagcagcaagaagaaggacctgcacccccgggacattgatgccttctggctgcagaggcagctgagccgcttctatgatgatgccatcgtgtcccagaagaaggcagatgaggtgctggagatcctgaagacagccagtgatgacagagaatgtgagaaccagctggtgctgctgctgggcttcaacacctttgacttcatcaaggtgctgcggcagcacaggatgatgatcctgtactgcaccctgctggccagcgcccagagcgaggccgagaaggagcgcatcatgggcaagatggaggccgaccctgagctgagcaagttcctgtaccagctgcacgagacagagaaggaggacctgatccgggaggagaggagccggcgggagcgggtgcggcagagcaggatggacacagacctggagaccatggacctggaccagggcggggaggccctggccccccggcaggtgctggacctggaggacctggtgttcacccagggcagccacttcatggccaacaagcgctgccagctgcctgatggcagcttccggcggcagaggaagggctatgaggaggtgcacgtgcctgccctgaagcccaagccctttggaagtgaggagcagctgctgcctgtggagaagctgcccaagtatgcccaggccggctttgagggcttcaagaccctgaaccgcatccagagcaagctgtacagagctgccctggagacagatgagaacctgctgctgtgtgcccccactggagctgggaagaccaacgtggccctgatgtgcatgctgcgggagatcggcaagcacatcaacatggatggcaccatcaacgtggatgacttcaagatcatctacatcgcccccatgaggagcctggtgcaggagatggtgggcagctttgggaagagagatgccaagagcaacagcctcatcagcatcaagaggctgaccctgcagcagaaggccaaggtgaagctggactttgtggccccagccaccggggcccacaactacaccctgtacttcatgtctgatgcctacatgggctgtgaccaggagtacaagttctctgtggatgtgaaggaggccgagacagacagcgacagcgactag

SEQ ID NO: 169986 - DNA, 1788 bp, synthetic construct
  misc_feature 1..1788: note = Description of Artificial Sequence: Synthetic coding sequence
  source 1..1788: mol_type = other DNA
atgagatacatcagcagccagatcgagcggcccatccgcatcgtggccctgagcagcagcctgagcaatgccaaggatgtggcccactggctgggctgcagcgccaccagcaccttcaacttccaccccaacgtgcggcctgtgcccctggagctgcacatccagggcttcaacatcagccacacccagacccggctgctgtccatggccaagcctgtgtaccacgccatcaccaagcacagccccaagaagcctgtgattgtgtttgtgcccagcaggaagcagacccggctgacagccatcgacatcctgaccacctgtgccgctgacatccagaggcagcgcttcctgcactgcacagagaaggacctgatcccctacctggagaagctgagtgacagcaccctgaaggagaccctgctgaatggagtgggctacctgcacgagggcctgagccccatggagcggcggctggtggagcagctgttcagcagcggggccatccaggtggtggtggccagccgcagcctgtgctggggcatgaatgtggccgcccacctggtgatcatcatggacacccagtactacaacgggaagatccacgcctacgtggactaccccatctatgatgtgctgcagatggtgggccacgccaaccggcccctgcaggatgatgagggccgctgtgtgatcatgtgccagggcagcaagaaggacttcttcaagaagttcctgtatgagcccctgcctgtggagagccacctggaccactgcatgcatgaccacttcaatgctgagatcgtgaccaagaccatcgagaacaagcaggatgctgtggactacctgacctggaccttcctgtacagaaggatgacccagaaccccaactactacaacctgcagggcatcagccaccgccacctgagtgaccacctgtctgagctggtggagcagaccctgagtgacctggagcagagcaagtgcatcagcattgaagatgagatggatgtggcccccctgaacctgggcatgattgctgcctactactacatcaactacaccaccatcgagctgttctccatgagcctgaatgccaagaccaaggtgcggggcctgattgagatcatcagcaatgctgctgaatatgagaacatccccatccgccaccacgaggacaacctgctgcggcagctggcccagaaggtgccccacaagctgaacaaccccaagttcaatgacccccacgtgaagaccaacctgctgctgcaggcccacctgagcaggatgcagctgtctgctgagctgcagagcgacacagaggagatcctgagcaaggccatccgcctcatccaggcctgtgtggatgtgctgagcagcaatggctggctgagccctgccctggccgccatggagctggcccagatggtgacccaggccatgtggagcaaggacagctacctgaagcagctgccccacttcaccagcgagcacatcaagcgctgcacagacaagggcgtggagagcgtgtttgacatcatggagatggaggatgaggagagaaatgccctgctgcagctgacagacagccagattgctgatgtggcccgcttctgcaaccgctaccccaacatcgagctgtcctatgaggtggtggacaaggacagcatccgcagcggcggccctgtggtggtgctggtgcagctggagcgggaggaggaggtgactggacctgtgattgcccccctcttcccccagttccgggccggccgcagcggcagccggctgtag

SEQ ID NO: 169987 - DNA, 1788 bp, synthetic construct
  misc_feature 1..1788: note = Description of Artificial Sequence: Synthetic coding sequence
  source 1..1788: mol_type = other DNA
atggccaagcctgtgtaccacgccatcaccaagcacagccccaagaagcctgtgattgtgtttgtgcccagcaggaagcagacccggctgacagccatcgacatcctgaccacctgtgccgctgacatccagaggcagcgcttcctgcactgcacagagaaggacctgatcccctacctggagaagctgagtgacagcaccctgaaggagaccctgctgaatggagtgggctacctgcacgagggcctgagccccatggagcggcggctggtggagcagctgttcagcagcggggccatccaggtggtggtggccagccgcagcctgtgctggggcatgaatgtggccgcccacctggtgatcatcatggacacccagtactacaacgggaagatccacgcctacgtggactaccccatctatgatgtgctgcagatggtgggccacgccaaccggcccctgcaggatgatgagggccgctgtgtgatcatgtgccagggcagcaagaaggacttcttcaagaagttcctgtatgagcccctgcctgtggagagccacctggaccactgcatgcatgaccacttcaatgctgagatcgtgaccaagaccatcgagaacaagcaggatgctgtggactacctgacctggaccttcctgtacagaaggatgacccagaaccccaactactacaacctgcagggcatcagccaccgccacctgagtgaccacctgtctgagctggtggagcagaccctgagtgacctggagcagagcaagtgcatcagcattgaagatgagatggatgtggcccccctgaacctgggcatgattgctgcctactactacatcaactacaccaccatcgagctgttctccatgagcctgaatgccaagaccaaggtgcggggcctgattgagatcatcagcaatgctgctgaatatgagaacatccccatccgccaccacgaggacaacctgctgcggcagctggcccagaaggtgccccacaagctgaacaaccccaagttcaatgacccccacgtgaagaccaacctgctgctgcaggcccacctgagcaggatgcagctgtctgctgagctgcagagcgacacagaggagatcctgagcaaggccatccgcctcatccaggcctgtgtggatgtgctgagcagcaatggctggctgagccctgccctggccgccatggagctggcccagatggtgacccaggccatgtggagcaaggacagctacctgaagcagctgccccacttcaccagcgagcacatcaagcgctgcacagacaagggcgtggagagcgtgtttgacatcatggagatggaggatgaggagagaaatgccctgctgcagctgacagacagccagattgctgatgtggcccgcttctgcaaccgctaccccaacatcgagctgtcctatgaggtggtggacaaggacagcatccgcagcggcggccctgtggtggtgctggtgcagctggagcgggaggaggaggtgactggacctgtgattgcccccctcttcccccagaagcgggaggagggctggtgggtggtgattggagatgccaagagcaacagcctcatcagcatcaagaggctgaccctgcagcagaaggccaaggtgaagctggactttgtggccccagccaccggggcccacaactacaccctgtacttcatgtctgatgcctacatgggctgtgaccaggagtacaagttctctgtggatgtgaaggaggccgagacagacagcgacagcgactag

SEQ ID NO: 169988 - DNA, 2325 bp, synthetic construct
  misc_feature 1..2325: note = Description of Artificial Sequence: Synthetic coding sequence
  source 1..2325: mol_type = other DNA
atgatgatcctgtactgcaccctgctggccagcgcccagagcgaggccgagaaggagcgcatcatgggcaagatggaggccgaccctgagctgagcaagttcctgtaccagctgcatgaaacagagaaggaggacctgatccgggaggagaggagcagaagagagcgggtgcggcagagcaggatggacacagacctggagaccatggacctggaccagggcggggaggccctggccccccggcaggtgctggacctggaggacctggtgttcacccagggcagccacttcatggccaacaagcgctgccagctgcctgatggcagcttccggcggcagaggaagggctatgaggaggtgcacgtgcctgccctgaagcccaagcccttcggcagcgaggagcagctgctgcctgtggagaagctgcccaagtatgcccaggccggctttgagggcttcaagaccctgaaccgcatccagagcaagctgtaccgggccgccctggagacagatgagaacctgctgctgtgtgcccccaccggggccggcaagaccaacgtggccctgatgtgcatgctgcgggagatcggcaagcacatcaacatggatggcaccatcaacgtggatgacttcaagatcatctacatcgcccccatgaggagcctggtgcaggagatggtgggcagctttgggaagaggctggccacctacggcatcaccgtggccgagctgactggagaccaccagctgtgcaaggaggagatcagcgccacccagatcatcgtgtgcaccccagagaagtgggacatcatcaccaggaagggcggggagaggacctacacccagctggtgcggctcatcatcctggatgagatccacctgctgcatgatgaccggggccctgtgctggaggccctggtggcccgggccatccggaacatcgagatgacccaggaggatgtgcggctcatcggcctgagcgccaccctgcccaactatgaagatgtggccaccttcctgcgggtggaccctgccaagggcctcttctactttgacaacagcttccggcctgtgcccctggagcagacctacgtgggcatcacagagaagaaggccatcaagcgcttccagatcatgaatgagatcgtgtatgagaagatcatggagcacgccggcaagaaccaggtgctggtgtttgtgcacagcaggaaggagaccgggaagacagcccgggccatccgggacatgtgcctggagaaggacaccctgggcctcttcctgcgggagggcagcgccagcacagaggtgctgaggacagaagctgagcagtgcaagaacctggagctgaaggacctgctgccctacggctttgccatccaccacgccggcatgaccagggtggacaggaccctggtggaggacctgtttgctgacaagcacatccaggtgctggtgtccacagccaccctggcctggggcgtgaacctgcctgcccacacagtcatcatcaagggcacccaggtgtacagccctgagaagggccgctggacagagctgggcgccctggacatcctgcagatgctgggccgggccggccggccccagtatgacaccaagggggagggcatcctgatcaccagccacggggagctgcagtactacctgagcctgctgaaccagcagctgcccatcgagagccagatggtgtccaagctgcctgacatgctgaatgctgagatcgtgctgggcaatgtgcagaatgccaaggatgctgtgaactggctgggctacgcctacctgtacatccgcatgctgcggagccccaccctgtatggcatcagccatgatgacctgaagggggaccccctgctggaccagaggcggctggacctggtgcacacagctgccctgatgctggacaagaacaacctggtgaagtatgacaagaagacaggcaacttccaggtgacagagctgggccgcatcgccagccactactacatcaccaatgacacagtgcagacctacaaccagctgctgaagcccaccctgtctgaaattgagctgttccgggtcttcagcctgagcagcgagttcaagaacatcaccgtgcgggaggaggagaagctggagctgcagaagctgctggagcgggtgcccatccctgtgaaggagagcattgaggagcccagcgccaagatcaacgtgctgctgcaggccttcatcagccagctgaagctggagggctttgccctgatggctgacatggtgtatgtgacccagagcgctggccgcctgatgagggccatcctgaagctgtcctag

SEQ ID NO: 169989 - DNA, 2160 bp, synthetic construct
  misc_feature 1..2160: note = Description of Artificial Sequence: Synthetic coding sequence
  source 1..2160: mol_type = other DNA
atgctgctgcagagcagcgagggccgctgtgtgtacatcacccccatggaggccctggccgagcaggtgtacatggactggtatgagaagttccaggaccggctgaacaagaaggtggtgctgctgactggagaaaatggacctgtgctggaggtgatctgcagcaggatgagatacatcagcagccagatcgagcggcccatccgcatcgtggccctgagcagcagcctgagcaatgccaaggatgtggcccactggctgggctgcagcgccaccagcaccttcaacttccaccccaacgtgcggcctgtgcccctggagctgcacatccagggcttcaacatcagccacacccagacccggctgctgtccatggccaagcctgtgtaccacgccatcaccaagcacagccccaagaagcctgtgattgtgtttgtgcccagcaggaagcagacccggctgacagccatcgacatcctgaccacctgtgccgctgacatccagaggcagcgcttcctgcactgcacagagaaggacctgatcccctacctggagaagctgagtgacagcaccctgaaggagaccctgctgaatggagtgggctacctgcacgagggcctgagccccatggagcggcggctggtggagcagctgttcagcagcggggccatccaggtggtggtggccagccgcagcctgtgctggggcatgaatgtggccgcccacctggtgatcatcatggacacccagtactacaacgggaagatccacgcctacgtggactaccccatctatgatgtgctgcagatggtgggccacgccaaccggcccctgcaggatgatgagggccgctgtgtgatcatgtgccagggcagcaagaaggacttcttcaagaagttcctgtatgagcccctgcctgtggagagccacctggaccactgcatgcatgaccacttcaatgctgagatcgtgaccaagaccatcgagaacaagcaggatgctgtggactacctgacctggaccttcctgtacagaaggatgacccagaaccccaactactacaacctgcagggcatcagccaccgccacctgagtgaccacctgtctgagctggtggagcagaccctgagtgacctggagcagagcaagtgcatcagcattgaagatgagatggatgtggcccccctgaacctgggcatgattgctgcctactactacatcaactacaccaccatcgagctgttctccatgagcctgaatgccaagaccaaggtgcggggcctgattgagatcatcagcaatgctgctgaatatgagaacatccccatccgccaccacgaggacaacctgctgcggcagctggcccagaaggtgccccacaagctgaacaaccccaagttcaatgacccccacgtgaagaccaacctgctgctgcaggcccacctgagcaggatgcagctgtctgctgagctgcagagcgacacagaggagatcctgagcaaggccatccgcctcatccaggcctgtgtggatgtgctgagcagcaatggctggctgagccctgccctggccgccatggagctggcccagatggtgacccaggccatgtggagcaaggacagctacctgaagcagctgccccacttcaccagcgagcacatcaagcgctgcacagacaagggcgtggagagcgtgtttgacatcatggagatggaggatgaggagagaaatgccctgctgcagctgacagacagccagattgctgatgtggcccgcttctgcaaccgctaccccaacatcgagctgtcctatgaggtggtggacaaggacagcatccgcagcggcggccctgtggtggtgctggtgcagctggagcgggaggaggaggtgactggacctgtgattgcccccctcttcccccagaagcgggaggagggctggtgggtggtgattggagatgccaagagcaacagcctcatcagcatcaagaggctgaccctgcagcagaaggccaaggtgaagctggactttgtggccccagccaccggggcccacaactacaccctgtacttcatgtctgatgcctacatgggctgtgaccaggagtacaagttctctgtggatgtgaaggaggccgagacagacagcgacagcgactag

SEQ ID NO: 169990 - DNA, 1074 bp, synthetic construct
  misc_feature 1..1074: note = Description of Artificial Sequence: Synthetic coding sequence
  source 1..1074: mol_type = other DNA
atgattgagcagcagaagaggaagggccctgagctgcccctggtgcctgtgaagaggcagagacatgagctgctgctgggcgccggcagcggccctggggccggccagcagcaggccacccctggggccctgctgcaggccggccccccacgctgcagcagcctgcaggcccccatcatgctgctgagcggccatgaaggagaggtgtactgctgcaagttccaccccaacggcagcaccctggccagcgctggctttgacaggctcatcctgctgtggaatgtgtatggagactgtgacaactatgccaccctgaagggccacagcggggctgtgatggagctgcactacaacacagatggctccatgctgttcagcgccagcacagacaagacagtggccgtgtgggacagcgagaccggggagcgggtgaagaggctgaagggccacaccagctttgtgaacagctgctacccagcccggcggggcccccagctggtgtgcaccggcagtgatgatggcaccgtgaagctgtgggacatcaggaagaaggccgccatccagaccttccagaacacctaccaggtgctggccgtgaccttcaatgacaccagtgaccagatcatcagcggcggcatcgacaatgacatcaaggtgtgggacctgcggcagaacaagctgacctacaccatgaggggccatgctgacagcgtgacaggcctgagcctgagcagcgagggcagctacctgctgagcaatgccatggacaacacagtgcgggtgtgggatgtgcggccctttgcccccaaggagcgctgtgtgaagatcttccagggcaatgtgcacaactttgagaagaacctgctgcgctgctcctggagcccagatggcagcaagattgctgctggcagcgctgacagatttgtgtatgtgtgggacaccaccagccgccgcatcctgtacaagctgcccggccatgctggcagcatcaatgaggtggccttccacccagatgagcccatcatcatcagcgccagcagtgacaagaggctgtacatgggagagatccagtag

SEQ ID NO: 169991 - DNA, 384 bp, synthetic construct
  misc_feature 1..384: note = Description of Artificial Sequence: Synthetic coding sequence
  source 1..384: mol_type = other DNA
atgatcctgatctctgctggctgccctgggggcctgtggcccatcgtggtgctggtgggcctcttcatctggatctgctttgctgtgcgggtgtgggatgtgcggccctttgcccccaaggagcgctgtgtgaagatcttccagggcaatgtgcacaactttgagaagaacctgctgcgctgctcctggagcccagatggcagcaagattgctgctggcagcgctgacagatttgtgtatgtgtgggacaccaccagccgccgcatcctgtacaagctgcccggccatgctggcagcatcaatgaggtggccttccacccagatgagcccatcatcatcagcgccagcagtgacaagaggctgtacatgggagagatccagtag

SEQ ID NO: 169992 - DNA, 1230 bp, synthetic construct
  misc_feature 1..1230: note = Description of Artificial Sequence: Synthetic coding sequence
  source 1..1230: mol_type = other DNA
atgattgagcagcagaagaggaagggccctgagctgcccctggtgcctgtgaagaggcagagacatgagctgctgctgggcgccggcagcggccctggggccggccagcagcaggccacccctggggccctgctgcaggccggccccccacgctgcagcagcctgcaggcccccatcatgctgctgagcggccatgaaggagaggtgtactgctgcaagttccaccccaacggcagcaccctggccagcgctggctttgacaggctcatcctgctgtggaatgtgtatggagactgtgacaactatgccaccctgaagggccacagcggggctgtgatggagctgcactacaacacagatggctccatgctgttcagcgccagcacagacaagacagtggccgtgtgggacagcgagaccggggagcgggtgaagaggctgaagggccacaccagctttgtgaacagctgctacccagcccggcggggcccccagctggtgtgcaccggcagtgatgatggcaccgtgaagctgtgggacatcaggaagaaggccgccatccagaccttccagaacacctaccaggtgctggccgtgaccttcaatgacaccagtgaccagatcatcagcggcggcatcgacaatgacatcaaggtgtgggacctgcggcagaacaagctgacctacaccatgaggggccatgctgacagcgtgacaggcctgagcctgagcagcgagggcagctacctgctgagcaatgccatggacaacacagtgcgggtgtgggatgtgcggccctttgcccccaaggagcgctgtgtgaagatcttccagggcaatgtgcacaactttgagaagaacctgctgcgctgctcctggagcccagatggcagcaagattgctgctggcagcgctgacagatttgtgtatgtgtgggacaccaccagccgccgcatcctgtacaagctgcccggccatgctggcagcatcaatgaggtggccttccacccagatgagcccatcatcgagaccggcttccacagaattggccagggcggccacgagctgctgaccagcagcaaccccccagccagcgccagccagagcgctggcatcactggagtgagccactgtgcccagctgcagacagtgttcatgtgggtgtccatgtctgtgagccccctgctgatcagcggggagagcaagagcaatgcccccttcagcagctag

SEQ ID NO: 169993 - DNA, 849 bp, synthetic construct
  misc_feature 1..849: note = Description of Artificial Sequence: Synthetic coding sequence
  source 1..849: mol_type = other DNA
atggctgtgcctgagacccggcccaaccacaccatctacatcaacaacctgaatgagaagatcaagaaggatgagctgaagaagagcctgtatgccatcttcagccagtttggccagatcctggacatcctggtgagccgcagcctgaagatgaggggccaggccttcgtcatcttcaaggaggtgagcagcgccaccaatgccctgcgctccatgcagggcttccccttctatgacaagcccatgaggatccagtatgccaagacagacagcgacatcatcgccaagatgaagggcacctttgtggagcgggacaggaagcgggagaagaggaagcccaagagccaggagaccccagccaccaagaaggctgtgcagggcggcggggccacccctgtggtgggcgctgtgcagggccctgtgcccggcatgccacccatgacccaggccccccgcatcatgcaccacatgcctggccagcccccctacatgcctcctcctggcatgatccccccacctggcctggcccctggccagatccccccaggggccatgccaccccagcagctgatgcctggccagatgcccccagcccagcccctgtctgaaaatccacccaaccacatcctcttcctgaccaacctgcctgaggagaccaatgagctgatgctgtccatgctgttcaaccagtttcctggcttcaaggaggtgcggctggtgcccggcagacatgacatcgcctttgtggagtttgacaatgaggtgcaggccggggccgccagagatgccctgcagggcttcaagatcacccagaacaatgccatgaagatcagctttgccaagaagtag

SEQ ID NO: 169994 - DNA, 612 bp, synthetic construct
  misc_feature 1..612: note = Description of Artificial Sequence: Synthetic coding sequence
  source 1..612: mol_type = other DNA
atggctgtgcctgagacccggcccaaccacaccatctacatcatcgccaagatgaagggcacctttgtggagcgggacaggaagcgggagaagaggaagcccaagagccaggagaccccagccaccaagaaggctgtgcagggcggcggggccacccctgtggtgggcgctgtgcagggccctgtgcccggcatgccacccatgacccaggccccccgcatcatgcaccacatgcctggccagcccccctacatgcctcctcctggcatgatccccccacctggcctggcccctggccagatccccccaggggccatgccaccccagcagctgatgcctggccagatgcccccagcccagcccctgtctgagaacccccccaaccacatcctcttcctgaccaacctgcctgaggagaccaatgagctgatgctgtccatgctgttcaaccagtttcctggcttcaaggaggtgcggctggtgcccggcagacatgacatcgcctttgtggagtttgacaatgaggtgcaggccggggccgccagagatgccctgcagggcttcaagatcacccagaacaatgccatgaagatcagctttgccaagaagtag

SEQ ID NO: 169995 - DNA, 768 bp, synthetic construct
  misc_feature 1..768: note = Description of Artificial Sequence: Synthetic coding sequence
  source 1..768: mol_type = other DNA
atggtgaagctgacagctgagctgattgagcaggccgcccagtacaccaatgctgtgcgggaccgggagctggacctgcggggctacaagatccctgtgattgagaacctgggcgccaccctggaccagtttgatgccatcgacttcagtgacaatgagatcaggaagctggatggcttccccctgctgcggcggctgaagaccctgctggtgaacaacaaccgcatctgcagaattggagagggcctggaccaggccctgccctgcctgacagagctgatcctgaccaacaacagcctggtggagctgggggacctggaccccctggccagcctgaagagcctgacctacctgagcatcctgaggaaccctgtgaccaacaagaagcactaccgcctgtatgtgatctacaaggtgccccaggtgcgggtgctggacttccagaaggtgaagctgaaggagcggcaggaggccgagaagatgttcaagggcaagagaggagcccagctggccaaggacatcgcccggcgcagcaagaccttcaaccctggagctggcctgcccacagacaagaagaagggcggccccagccctggagatgtggaggccatcaagaatgccatcgccaatgccagcaccctggccgaggtggagcggctgaagggcctgctgcagagcggccagatccctggccgggagcggcgcagcggccccacagatgatggagaggaggagatggaggaggacacagtgaccaacggcagctag

SEQ ID NO: 169996 - DNA, 480 bp, synthetic construct
  misc_feature 1..480: note = Description of Artificial Sequence: Synthetic coding sequence
  source 1..480: mol_type = other DNA
atgcccaagttctactgtgactactgtgacacctacctgacccatgacagccccagcgtgaggaagacccactgcagcggcaggaagcacaaggaaaatgtgaaggactactaccagaagtggatggaggagcaggcccagagcctgattgacaagaccacagctgccttccagcagggcaagatcccccccacccccttcagcgcccctcctcctgctggggccatgatccccccaccacccagcctgcccggcccccccaggcctggcatgatgcctgccccccacatgggcggcccccccatgatgcccatgatgggccccccacctcctggcatgatgcctgtgggccctgcccctggcatgaggcctcccatgggcggccacatgcccatgatgcctggcccccccatgatgaggcccccagcccggcccatgatggtgcccacccggcccggcatgaccaggccagacagatag

SEQ ID NO: 169997 - DNA, 543 bp, synthetic construct
  misc_feature 1..543: note = Description of Artificial Sequence: Synthetic coding sequence
  source 1..543: mol_type = other DNA
atgaacagcgcctctgtggatggccacctgagcggctgccgcctcttcctgttcctgagccccctcttccgcttctactgtgactactgtgacacctacctgacccatgacagccccagcgtgaggaagacccactgcagcggcaggaagcacaaggaaaatgtgaaggactactaccagaagtggatggaggagcaggcccagagcctgattgacaagaccacagctgccttccagcagggcaagatcccccccacccccttcagcgcccctcctcctgctggggccatgatccccccaccacccagcctgcccggccccccccggcccggcatgatgcctgccccccacatgggcggcccccccatgatgcccatgatgggccccccacctcctggcatgatgcctgtgggccctgcccctggcatgaggcctcccatgggcggccacatgcccatgatgcctggcccccccatgatgaggcccccagcccggcccatgatggtgcccaccaggcctggcatgaccaggccagacagatag

SEQ ID NO: 169998 - DNA, 357 bp, synthetic construct
  misc_feature 1..357: note = Description of Artificial Sequence: Synthetic coding sequence
  source 1..357: mol_type = other DNA
atggaggagcaggcccagagcctgattgacaagaccacagctgccttccagcagggcaagatcccccccacccccttcagcgcccctcctcctgctggggccatgatccccccaccacccagcctgcccggccccccccggcccggcatgatgcctgccccccacatgggcggcccccccatgatgcccatgatgggccccccacctcctggcatgatgcctgtgggccctgcccctggcatgaggcctcccatgggcggccacatgcccatgatgcctggcccccccatgatgaggcccccagcccggcccatgatggtgcccaccaggcctggcatgaccaggccagacagatag

SEQ ID NO: 169999 - DNA, 159 bp, synthetic construct
  misc_feature 1..159: note = Description of Artificial Sequence: Synthetic coding sequence
  source 1..159: mol_type = other DNA
atgagaattgagggctgcatcatcggctttgatgagtacatgaacctggtgctggatgatgctgaggagatccacagcaagaccaagagcaggaagcagctgggccgcatcatgctgaagggggacaacatcaccctgctgcagagcgtgagcaactag

SEQ ID NO: 170000 - DNA, 279 bp, synthetic construct
  misc_feature 1..279: note = Description of Artificial Sequence: Synthetic coding sequence
  source 1..279: mol_type = other DNA
atggcctaccggggccagggccagaaggtgcagaaggtgatggtgcagcccatcaacctgatcttccgctacctgcagaacagaagccgcatccaggtgtggctgtatgagcaggtgaacatgagaattgagggctgcatcatcggctttgatgagtacatgaacctggtgctggatgatgctgaggagatccacagcaagaccaagagcaggaagcagctgggccgcatcatgctgaagggggacaacatcaccctgctgcagagcgtgagcaactag

SEQ ID NO: 170001 - DNA, 723 bp, synthetic construct
  misc_feature 1..723: note = Description of Artificial Sequence: Synthetic coding sequence
  source 1..723: mol_type = other DNA
atgacagtgggcaagagcagcaagatgctgcagcacatcgactacaggatgcgctgcatcctgcaggacggccgcatcttcatcggcaccttcaaggcctttgacaagcacatgaacctgatcctgtgtgactgtgatgagttcaggaagatcaagcccaagaatgccaagcagcctgagcgggaggagaagagggtgctgggcctggtgctgctgcggggggagaacctggtgtccatgacagtggagggccccccacccaaggacaccggcatcgcccgggtgcccctggccggggctgctgggggccctggggtgggccgggccgccggccggggcgtgcctgctggggtgcccatcccccaggccccagctggcctggccggccctgtgcggggcgtgggcggccccagccagcaggtgatgaccccccagggccggggcaccgtggccgctgctgctgtggccgccacagccagcattgctggggcccccacccagtacccacctggccggggcaccccacctcctcctgtgggccgggccaccccacctcctggcatcatggcccctcctcctggcatgaggcctcccatgggcccccccatcggcctgcccccagcccggggcacccccatcggcatgcctcctcctggcatgaggcctcctcctcctggcatccggggccccccacctcctggcatgaggcctccccggccctag

SEQ ID NO: 170002 - DNA, 723 bp, synthetic construct; identical to SEQ ID NO: 170001
  misc_feature 1..723: note = Description of Artificial Sequence: Synthetic coding sequence
  source 1..723: mol_type = other DNA

SEQ ID NO: 170003 - DNA, 723 bp, synthetic construct; identical to SEQ ID NO: 170001
  misc_feature 1..723: note = Description of Artificial Sequence: Synthetic coding sequence
  source 1..723: mol_type = other DNA

SEQ ID NO: 170004 - DNA, 723 bp, synthetic construct; identical to SEQ ID NO: 170001
  misc_feature 1..723: note = Description of Artificial Sequence: Synthetic coding sequence
  source 1..723: mol_type = other DNA

SEQ ID NO: 170005 - DNA, 735 bp, synthetic construct
  misc_feature 1..735: note = Description of Artificial Sequence: Synthetic coding sequence
  source 1..735: mol_type = other DNA
atgatggacagccagacagtgggcaagagcagcaagatgctgcagcacatcgactacaggatgcgctgcatcctgcaggacggccgcatcttcatcggcaccttcaaggcctttgacaagcacatgaacctgatcctgtgtgactgtgatgagttcaggaagatcaagcccaagaatgccaagcagcctgagcgggaggagaagagggtgctgggcctggtgctgctgcggggggagaacctggtgtccatgacagtggagggccccccacccaaggacaccggcatcgcccgggtgcccctggccggggctgctgggggccctggggtgggccgggccgccggccggggcgtgcctgctggggtgcccatcccccaggccccagctggcctggccggccctgtgcggggcgtgggcggccccagccagcaggtgatgaccccccagggccggggcaccgtggccgctgctgctgtggccgccacagccagcattgctggggcccccacccagtacccacctggccggggcaccccacctcctcctgtgggccgggccaccccacctcctggcatcatggcccctcctcctggcatgaggcctcccatgggcccccccatcggcctgcccccagcccggggcacccccatcggcatgcctcctcctggcatgaggcctcctcctcctggcatccggggccccccacctcctggcatgaggcctccccggccctag

SEQ ID NO: 170006 - DNA, 945 bp, synthetic construct; identical to SEQ ID NO: 148610
  misc_feature 1..945: note = Description of Artificial Sequence: Synthetic coding sequence
  source 1..945: mol_type = other DNA

SEQ ID NO: 170007 - DNA, 1248 bp, synthetic construct
  misc_feature 1..1248: note = Description of Artificial Sequence: Synthetic coding sequence
  source 1..1248: mol_type = other DNA
atggccaccgtgggggagtggagctgtgtgcgctgcaccttcctgaacccagctggccagaggcagtgcagcatctgtgaggcccccaggcacaagccagacctgaaccacatcctgcggctgtctgtggaggagcagaagtggccctgtgcccgctgcaccttcaggaacttcctgggcaaggaggcctgtgaggtgtgtggcttcaccccagagcccgcccctggagctgccttcctgcctgtgctgaatggagtgctgcccaagcccccagccatcctgggggagcccaagggcagctgccaggaggaggccggccctgtgaggacagctggcctggtggccacagagcccgcccggggccagtgtgaggacaaggatgaggaggagaaggaggagcaggaggaggaggagggcgctgctgagccccggggcggctgggcctgcccccgctgcaccctgcacaacacccctgtggccagcagctgcagcgtgtgtggcggcccccggcggctgagcctgccccgcatccccccagaggccctggtggtgcctgaggtggtggccccagctggcttccacgtggtgcctgctgcccctcctcctggcctgcctggagagggcgctgaggccaaccccccagccaccagccagggccctgctgctgagcctgagcccccccgggtgccccccttcagccccttcagcagcaccctgcagaacaaccctgtgcccaggagccggcgggaggtgcccccccagctgcagccccctgtgcctgaggccgcccagcccagccccagcgctggctgccgcggggccccccagggcagcggctgggccggggccagccggctggccgagctgctgagcggcaagaggctgtctgtgctggaggaggaggccacagaaggaggcaccagccgggtggaggccggcagcagcaccagcggcagtgacatcatcgacctggccggggacacagtgcgctacaccccagccagccccagcagcccagacttcaccacctggagctgtgccaagtgcaccctgaggaaccccagcccccccagcctgcagcccctgggccggggccctgagagcctgcccagggctgctggccccagggctggctgtgtgcagctggaggccggccacggcggggcccggggcagccctgctgaccatgctggaagaagacaccacccagcccaccgggagcccaggagagctgcccggggcccctag

SEQ ID NO: 170008 - DNA, 270 bp, synthetic construct
  misc_feature 1..270: note = Description of Artificial Sequence: Synthetic coding sequence
  source 1..270: mol_type = other DNA
atgagcagccagcagcagaagcagccctgcaccccaccaccccagctgcagcagcagcaggtgaagcagccctgccagcccccaccccaggagccctgcatccccaagaccaaggagccctgccaccccaaggtgcctgagccctgccaccccaaggtgcctgagccctgccagcccaaggtgcctgagccctgccaccccaaggtgcctgagccctgccccagcatcgtgaccccagccccagcccagcagaagaccaagcagaagtag

SEQ ID NO: 170009 - DNA, 222 bp, synthetic construct
  misc_feature 1..222: note = Description of Artificial Sequence: Synthetic coding sequence
  source 1..222: mol_type = other DNA
atgagcagccagcagcagaagcagccctgcaccccaccaccccagctgcagcagcagcaggtgaagcagccctgccagcccccaccccaggagccctgcatccccaagaccaaggagccctgccaccccaaggtgcctgagccctgccaccccaaggtgcctgagccctgccccagcatcgtgaccccagccccagcccagcagaagaccaagcagaagtag

SEQ ID NO: 170010 - DNA, 219 bp, synthetic construct
  misc_feature 1..219: note = Description of Artificial Sequence: Synthetic coding sequence
  source 1..219: mol_type = other DNA
atgagctaccagcagcagcagtgcaagcagccctgccagcccccacctgtgtgccccacccccaagtgcccagagccctgccccccacccaagtgcccagagccctgccccccacccaagtgcccccagccctgccccccccagcagtgccagcagaagtacccacctgtgacccccagccccccctgccagagcaagtacccacccaagagcaagtag

SEQ ID NO: 170011 - DNA, 219 bp, synthetic construct
  misc_feature 1..219: note = Description of Artificial Sequence: Synthetic coding sequence
  source 1..219: mol_type = other DNA
atgagctaccagcagcagcagtgcaagcagccctgccagcccccacctgtgtgccccacccccaagtgcccagagccctgccccccacccaagtgcccagagccctgccccccacccaagtgcccccagccctgccccccccagcagtgccagcagaagtacccacctgtgacccccagccccccctgccagcccaagtacccacccaagagcaagtag

SEQ ID NO: 170012 - DNA, 219 bp, synthetic construct; identical to SEQ ID NO: 170011
  misc_feature 1..219: note = Description of Artificial Sequence: Synthetic coding sequence
  source 1..219: mol_type = other DNA

SEQ ID NO: 170013 - DNA, 219 bp, synthetic construct; identical to SEQ ID NO: 170011
  misc_feature 1..219: note = Description of Artificial Sequence: Synthetic coding sequence
  source 1..219: mol_type = other DNA

SEQ ID NO: 170014 - DNA, 510 bp, synthetic construct
  misc_feature 1..510: note = Description of Artificial Sequence: Synthetic coding sequence
  source 1..510: mol_type = other DNA
atgagcagctaccagcagaagcagaccttcaccccaccaccccagctgcagcagcagcaggtgaagcagcccagccagcccccaccccaggagatctttgtgcccaccaccaaggagccctgccacagcaaggtgccccagcccggcaacaccaagatccctgagcccggctgcaccaaggtgcctgagcccggctgcaccaaggtgcctgagcccggctgcaccaaggtgcctgagcccggctgcaccaaggtgcctgagcccggctgcaccaaggtgcctgagcccggctgcaccaaggtgcctgagcccggctacaccaaggtgcctgagcccggcagcatcaaggtgcctgaccagggcttcatcaagtttcctgagcccggggccatcaaggtgcctgagcagggctacaccaaggtgcctgtgcccggctacaccaagctgcctgagccctgccccagcacagtgaccccaggccctgcccagcagaagaccaagcagaagtag

SEQ ID NO: 170015 - DNA, 510 bp, synthetic construct; identical to SEQ ID NO: 170014
  misc_feature 1..510: note = Description of Artificial Sequence: Synthetic coding sequence
  source 1..510: mol_type = other DNA

SEQ ID NO: 170016 - DNA, 480 bp, synthetic construct
  misc_feature 1..480: note = Description of Artificial Sequence: Synthetic coding sequence
  source 1..480: mol_type = other DNA
atgagcagctaccagcagaagcagaccttcaccccaccaccccagctgcagcagcagcaggtgaagcagcccagccagcccccaccccaggagatctttgtgcccaccaccaaggagccctgccacagcaaggtgccccagcccggcaacaccaagatccctgagcccggctgcaccaaggtgcctgagcccggctgcaccaaggtgcctgagcccggctgcaccaaggtgcctgagcccggctgcaccaaggtgcctgagcccggctgcaccaaggtgcctgagcccggctgcaccaaggtgcctgagcccggctacaccaaggtgcctgagcccggcagcatcaaggtgcctgaccagggcttcatcaagtttcctgagcccggggccatcaaggtgcctgagcagggctacaccaaggtgcctgtgcccggctacaccaagctgcctgagccctgccccagcacagtgaccccctag

SEQ ID NO: 170017 - DNA, 486 bp, synthetic construct
  misc_feature 1..486: note = Description of Artificial Sequence: Synthetic coding sequence
  source 1..486: mol_type = other DNA
atgagcagctaccagcagaagcagaccttcaccccaccaccccagctgcagcagcagcaggtgaagcagcccagccagcccccaccccaggagatctttgtgcccaccaccaaggagccctgccacagcaaggtgccccagcccggcaacaccaagatccctgagcccggctgcaccaaggtgcctgagcccggctgcaccaaggtgcctgagcccggctgcaccaaggtgcctgagcccggctgcaccaaggtgcctgagcccggctgcaccaaggtgcctgagcccggctacaccaaggtgcctgagcccggcagcatcaaggtgcctgaccagggcttcatcaagtttcctgagcccggggccatcaaggtgcctgagcagggctacaccaaggtgcctgtgcccggctacaccaagctgcctgagccctgccccagcacagtgaccccaggccctgcccagcagaagaccaagcagaagtag

SEQ ID NO: 170018 - DNA, 10989 bp, synthetic construct
  misc_feature 1..10989: note = Description of Artificial Sequence: Synthetic coding sequence
  source 1..10989: mol_type = other DNA
atgagcagaagagcccctggcagccggctgagcagcggcggcggcggcggcggcaccaagtaccccaggtcctggaatgactggcagcccaggacagacagcgccagcgctgaccctgacaacctgaagtacagcagcagccgggacagaggaggcagcagcagctatggcctgcagcccagcaacagcgctgtggtgtcccggcagagacatgatgacaccagggtgcacgccgacatccagaatgatgagaagggcggctacagcgtgaatggaggcagcggggagaacacctacggcaggaagagcctgggccaggagctgcgggtgaacaacgtgaccagccctgagttcacctctgtgcagcacggcagccgggccctggccaccaaggacatgaggaagagccaggagaggtccatgagctacagtgatgagagccggctgagcaacctgctgcggcgcatcaccagagaagatgaccgggaccggcggctggccaccgtgaagcagctgaaggagttcatccagcagcctgagaacaagctggtgctggtgaagcagctggacaacatcctggccgctgtgcatgatgtgctgaatgaaagcagcaagctgctgcaggagctgcggcaggagggcgcctgctgcctgggcctgctgtgtgccagcctgtcctatgaagctgagaagatcttcaagtggatcttcagcaagttcagcagcagcgccaaggatgaggtgaagctgctgtacctgtgtgccacctacaaggccctggagaccgtgggggagaagaaggccttcagctctgtgatgcagctggtgatgaccagcctgcagagcatcctggagaatgtggacaccccagagctgctgtgcaagtgtgtgaagtgcatcctgctggtggcccgctgctacccccacatcttcagcaccaacttccgggacacagtggacatcctggtgggctggcacatcgaccacacccagaagcccagcctgacccagcaggtgtctggctggctgcagagcctggagcccttctgggtggccgacctggccttcagcaccaccctgctgggccagttcctggaggacatggaggcctatgcagaggacctgagccacgtggccagcggggagagcgtggatgaagatgtgcccccacccagcgtgtccctgcccaagctggccgccctgctgcgggtcttcagcacagtggtgcgcagcatcggggagcgcttcagccccatccggggcccccccatcacagaggcctacgtgacagatgtgctgtacagagtgatgagatgtgtgacagctgccaaccaggtgttcttcagcgaggccgtgctgacagctgccaatgaatgtgtgggcgtgctgctgggcagcctggaccccagcatgaccatccactgtgacatggtgatcacctacggcctggaccagctggagaactgccagacctgtggcacagactacatcatctctgtgctgaacctgctgaccctgattgtggagcagatcaacaccaagctgcccagcagctttgtggagaagctgttcatccccagcagcaagctgctcttcctgcgctaccacaaggagaaggaggtggtggccgtggcccatgctgtgtaccaggccgtgctgagcctgaagaacatccctgtgctggagacagcctacaagctgatcctgggggagatgacctgtgccctgaacaacctgctgcacagcctgcagctgcctgaggcctgcagcgagatcaagcatgaggccttcaagaaccacgtgttcaacgtggacaatgccaagtttgtggtgatctttgacctgagcgccctgaccaccatcggaaatgccaagaacagcctgattggcatgtgggccctgagccccaccgtgtttgccctgctgagcaagaacctgatgattgtgcacagcgacctggccgtgcacttccctgccatccagtatgctgtgctgtacaccctgtacagccactgcaccaggcatgaccacttcatcagcagcagcctgagcagcagcagccccagcctgtttgatggagctgtgatcagcacagtgaccacagccaccaagaagcacttcagcatcatcctgaacctgctgggcatcctgctgaagaaggacaacctgaaccaggacaccaggaagctgctgatgacctgggccctggaggccgctgtgctgatgaagaagtctgagacctacgcccccctcttcagcctgcccagcttccacaagttctgcaagggcctgctggccaacaccctggtggaggatgtgaacatctgcctgcaggcctgcagcagcctgcacgccctgagcagcagcctgcctgatgacctgctgcagagatgtgtggatgtgtgccgggtgcagctggtgcacagcggcacccgcatccggcaggccttcggcaagctgctgaagagcatccccctggatgtggtgctgagcaacaacaaccacacagagatccaggagatcagcctggccctgcggagccacatgagcaaggcccccagcaacaccttccacccccaggacttcagtgatgtgatctccttcatcctgtatggcaacagccacaggacaggcaaggacaactggctggagcggctcttctacagctgccagaggctggacaagagggaccagagcaccatccccaggaacctgctgaagacagatgctgtgctgtggcagtgggccatctgggaggccgcccagttcaccgtgctgagcaagctgcggacccccctgggccgggcccaggacaccttccagaccatcgagggcatcatccgcagcctggccgcccacaccctgaacccagaccaggatgtgtcccagtggaccacagctgacaatgatgagggccacggcaacaaccagctgcggctggtgctgctgctgcagtacctggagaacctggagaagctgatgtacaatgcctatgagggctgtgccaatgccctgaccagcccccccaaggtgatccgcaccttcttctacaccaaccggcagacctgccaggactggctgacccgcatccggctgagcatcatgagggtgggcctgctggccggccagcctgctgtgacagtgcgccacggctttgacctgctgacagagatgaagaccaccagcctgagccagggcaatgagctggaggtgaccatcatgatggtggtggaggccctgtgtgagctgcactgcccagaggccatccagggcattgctgtgtggagcagcagcatcgtgggcaagaacctgctgtggatcaacagcgtggcccagcaggccgagggccgctttgagaaggcctctgtggagtaccaggagcacctgtgtgccatgactggagtggactgctgcatcagcagctttgacaagtctgtgctgaccctggccaatgccggcaggaacagcgccagccccaagcacagcctgaatggagagagcaggaagacagtgctgagcaagcccacagacagcagccctgaggtgatcaactacctgggcaacaaggcctgtgagtgctacatcagcattgctgactgggccgctgtgcaggagtggcagaatgccatccatgacctgaagaagagcaccagcagcaccagcctgaacctgaaggctgacttcaactacatcaagagcctgagcagctttgaaagtggcaagtttgtggagtgcacagagcagctggagctgctgcctggagagaacatcaacctgctggccggcggcagcaaggagaagattgacatgaagaagctgctgcccaacatgctgagcccagacccccgggagctgcagaagagcattgaggtgcagctgctgcggagctctgtgtgcctggccacagccctgaaccccatcgagcaggaccagaagtggcagagcatcacagaaaatgtggtgaagtacctgaagcagaccagccgcatcgccatcggccccctgcggctgagcaccctgactgtgtcccagagcctgcctgtgctgagcaccctgcagctgtactgcagcagcgccctggagaacacagtgagcaaccggctgagcacagaggactgcctgatccccctcttcagcgaggccctgcggagctgcaagcagcatgatgtgcggccctggatgcaggccctgcgctacaccatgtaccagaaccagctgctggagaagatcaaggagcagacagtgcccatccgcagccacctgatggagctgggcctgacagctgccaagtttgccaggaagagaggaaatgtgtccctggccacccggctgctggcccagtgcagcgaggtgcagctgggcaagaccaccacagcccaggacctggtgcagcacttcaagaagctgagcacccagggccaggtggatgagaagtggggccctgagctggacatcgagaagaccaagctgctgtacacagctggccagagcacccacgccatggagatgctgagcagctgtgccatctccttctgcaagtctgtgaaggccgagtatgctgtggccaagagcatcctgaccctggccaagtggatccaggccgagtggaaggagatcagcggccagctgaagcaggtgtaccgggcccagcaccagcagaacttcaccggcctgagcaccctgagcaagaacatcctgaccctgattgagctgcccagcgtgaacaccatggaggaggagtacccccgcatcgagagcgagagcacagtgcacatcggcgtgggggagccagacttcatcctgggccagctgtaccacctgagctctgtgcaggcccctgaggtggccaagtcctgggccgccctggcctcctgggcctaccgctggggcaggaaggtggtggacaatgccagccagggcgagggcgtgcggctgctgccccgggagaagtctgaggtgcagaacctgctgcctgacaccatcacagaggaggagaaggagcgcatctacggcatcctgggccaggccgtgtgcaggcctgctggcatccaggatgaggacatcaccctgcagatcacagaaagtgaggacaatgaggaggatgacatggtggatgtgatctggaggcagctgatcagcagctgcccctggctgtctgagctggatgagagcgccacagagggcgtcatcaaggtgtggaggaaggtggtggaccgcatcttcagcctgtacaagctgagctgcagcgcctacttcaccttcctgaagctgaatgccggccagatccccctggatgaagatgacccccggctgcacctgagccaccgggtggagcagagcacagatgacatgattgtgatggccaccctgcggctgctgcggctgctggtgaagcacgccggggagctgcggcagtacctggagcacggcctggagaccacccccacagccccctggaggggcatcatcccccagctgttcagccggctgaaccaccctgaggtgtatgtgcggcagagcatctgcaacctgctgtgccgggtggcccaggacagcccccacctgatcctgtacccagccatcgtgggcaccatcagcctgagcagcgagagccaggccagcggcaacaagttcagcacagccatccccaccctgctgggcaacatccagggcgaggagctgctggtgtctgaatgtgagggcggcagccccccagccagccaggacagcaacaaggatgagcccaagagcggcctgaatgaagaccaggccatgatgcaggactgctacagcaagatcgtggacaagctgagcagcgccaaccccaccatggtgctgcaggtgcagatgctggtggccgagctgcggcgggtgacagtgctgtgggatgagctgtggctgggcgtgctgctgcagcagcacatgtatgtgctgcggcgcatccagcagctggaggatgaggtgaagagggtgcagaacaacaacaccctgaggaaggaggagaagatcgccatcatgagggagaagcacacagccctgatgaagcccatcgtgtttgccctggagcacgtgcgcagcatcacagctgccccagctgagacccctcatgagaagtggttccaggacaactatggagatgccattgaaaatgccctggagaagctgaagacccccctgaacccagccaagccaggcagctcctggatccccttcaaggagatcatgctgagcctgcagcagagggcccagaagagggccagctacatcctgcggctggaggagatcagcccctggctggccgccatgaccaacacagaaattgccctgcccggggaggtgtctgcccgggacacagtgaccatccacagcgtgggcggcaccatcaccatcctgcccaccaagaccaagcccaagaagctgctcttcctgggcagtgatggcaagagctacccctacctgttcaagggcctggaggacctgcacctggatgagcgcatcatgcagttcctgagcatcgtgaacaccatgtttgccaccatcaaccggcaggagaccccccgcttccacgcccggcactacagcgtgacccccctgggcaccaggagcggcctcatccagtgggtggatggagccacccccctgtttggcctgtacaagcgctggcagcagcgggaggccgccctgcaggcccagaaggcccaggacagctaccagaccccccagaaccctggcatcgtgccccggcccagcgagctgtactacagcaagattggccctgccctgaagacagtgggcctgagcctggatgtgtcccggcgggactggcccctgcacgtgatgaaggctgtgctggaggagctgatggaggccaccccacccaacctgctggccaaggagctgtggagcagctgcaccaccccagatgagtggtggagggtgacccagagctatgcccggagcacagctgtgatgtccatggtgggctacatcatcggcctgggggacagacacctggacaacgtgctgattgacatgaccactggagaggtggtgcacatcgactacaacgtgtgctttgagaagggcaagagcctgcgggtgcctgagaaggtgcccttcaggatgacccagaacattgaaacagccctgggcgtgactggagtggagggcgtcttccggctgagctgtgagcaggtgctgcacatcatgaggcggggccgggagaccctgctgaccctgctggaggcctttgtgtatgaccccctggtggactggacagctggaggagaggccggctttgctggagctgtgtatggaggcggcggccagcaggccgagagcaagcagagcaagcgggagatggagcgggagatcaccaggagcctcttcagcagccgggtggccgagatcaaggtgaactggttcaagaacagagatgagatgctggtggtgctgcccaagctggatggcagcctggatgagtacctgagcctgcaggagcagctgacagatgtggagaagctgcagggcaagctgctggaggagattgagttcctggagggcgctgagggcgtggaccaccccagccacaccctgcagcaccgctacagcgagcacacccagctgcagacccagcagagagctgtgcaggaggccatccaggtgaagctgaatgaatttgagcagtggatcacccactaccaggccgccttcaacaacctggaggccacccagctggccagcctgctgcaggagatcagcacccagatggacctgggcccccccagctatgtgcctgccacagccttcctgcagaatgccggccaggcccacctgatcagccagtgtgagcagctggagggggaggtgggcgccctgctgcagcagaggagatctgtgctgcggggctgcctggagcagctgcaccactacgccaccgtggccctgcagtaccccaaggccatcttccagaagcacagaattgagcagtggaagacctggatggaggagctgatctgcaacaccaccgtggagcgctgccaggagctgtacagaaaatatgagatgcagtatgccccccagcccccacccaccgtgtgccagttcatcacagccacagagatgaccctgcagagatatgctgctgacatcaacagccgcctcatccggcaggtggagcggctgaagcaggaggccgtgacagtgcctgtgtgtgaggaccagctgaaggagattgagcgctgcatcaaggtgttcctgcatgaaaatggagaggagggcagcctgagcctggccagcgtcatcatcagcgccctgtgcaccctgaccaggaggaacctgatgatggagggcgccgccagcagcgctggggagcagctggtggacctgaccagcagagatggagcctggttcctggaggagctgtgcagcatgtctggaaatgtgacctgcctggtgcagctgctgaagcagtgccacctggtgccccaggacctggacatccccaaccccatggaggccagcgagaccgtgcacctggccaacggggtgtacaccagcctgcaggagctgaacagcaacttccggcagatcatcttccctgaggccctgcgctgcctgatgaagggggagtacaccctggagagcatgctgcacgagctggatggcctgattgagcagaccacagatggagtgcccctgcagaccctggtggagagcctgcaggcctacctgagaaatgctgccatgggcctggaggaggagacccacgcccactacattgatgtggcccggctgctgcacgcccagtatggagagctgatccagcccagaaatggatctgtggatgagacccccaagatgtctgctggccagatgctgctggtggcctttgatggcatgtttgcccaggtggagacagccttcagcctgctggtggagaagctgaacaagatggagatccccatcgcctggaggaagattgacatcatccgggaggcccggagcacccaggtgaacttctttgatgatgacaaccaccggcaggtgctggaggagatcttcttcctgaagaggctgcagaccatcaaggagttcttccggctgtgtggcaccttcagcaagaccctgagcggcagcagcagcctggaggaccagaacacagtgaatggacctgtgcagatcgtgaatgtgaagaccctcttcaggaacagctgcttcagcgaggaccagatggccaagcccatcaaggccttcaccgctgactttgtgcggcagctgctgattggcctgcccaaccaggccctgggcctgaccctgtgcagcttcatcagcgccctgggcgtggacatcatcgcccaggtggaggccaaggactttggagctgagagcaaggtgtctgtggatgacctgtgcaagaaggctgtggagcacaacatccagatcggcaagttcagccagctggtgatgaacagagccaccgtgctggccagcagctatgacacagcctggaagaagcatgacctggtgcggcggctggagaccagcatcagcagctgcaagaccagcctgcagagggtgcagctgcacatcgccatgttccagcagtggcagcacgaggacctgctgatcaaccggccccaggccatgtctgtgaccccaccacccaggtctgccatcctgacctccatgaagaagaagctgcacaccctgagccagatcgagaccagcatcgccaccgtgcaggagaagctggccgccctggagagcagcattgagcagaggctgaagtgggccggcggggccaacccagccctggcccctgtgctgcaggactttgaggccaccatcgccgagaggaggaacctggtgctgaaggagagccagagggccagccaggtgaccttcctgtgcagcaacatcatccactttgagagcctgcggaccaggacagctgaggccctgaacctggatgctgccctgtttgagctgatcaagcgctgccagcagatgtgcagctttgccagccagttcaacagctctgtgtctgagctggagctgcggctgctgcagagggtggacaccggcctggagcaccccatcggcagcagcgagtggctgctgagcgcccacaagcagctgacccaggacatgagcacccagagggccatccagacagagaaggagcagcagatcgagaccgtgtgtgagaccatccagaacctggtggacaacatcaagacagtgctgaccggccacaaccggcagctgggagatgtgaagcacctgctgaaggccatggccaaggatgaggaggccgccctggctgatggagaagatgtgccctatgagaacagcgtgcggcagttcctgggggagtacaagtcctggcaggacaacatccagacagtgctcttcaccctggtgcaggccatgggccaggtgcgcagccaggagcacgtggagatgctgcaggagatcacccccaccctgaaggagctgaagacccagagccagagcatctacaacaacctggtgtcctttgccagccccctggtgacagatgccaccaatgaatgtagcagccccaccagcagcgccacctaccagcccagctttgctgctgctgtgcgcagcaacacaggccagaagacccagccagatgtgatgagccagaatgccaggaagctgatccagaagaacctggccaccagcgctgacaccccacccagcacagtgcccggcaccgggaagtctgtggcctgcagccccaagaaggctgtgcgggaccccaagacaggcaaggctgtgcaggagaggaacagctatgctgtgtctgtgtggaagagggtgaaggccaagctggagggcagagatgtggaccccaacagaaggatgtctgtggccgagcaggtggactatgtgatcaaggaggccaccaacctggacaacctggcccagctgtatgagggctggacagcctgggtgtag

SEQ ID NO: 170019 - DNA, 10986 bp, synthetic construct
  misc_feature 1..10986: note = Description of Artificial Sequence: Synthetic coding sequence
  source 1..10986: mol_type = other DNA
atgagcagaagagcccctggcagccggctgagcagcggcggcggcggcggcggcaccaagtaccccaggtcctggaatgactggcagcccaggacagacagcgccagcgctgaccctgacaacctgaagtacagcagcagccgggacagaggaggcagcagcagctatggcctgcagcccagcaacagcgctgtggtgtcccggcagagacatgatgacaccagggtgcacgccgacatccagaatgatgagaagggcggctacagcgtgaatggaggcagcggggagaacacctacggcaggaagagcctgggccaggagctgcgggtgaacaacgtgaccagccctgagttcacctctgtgcagcacggcagccgggccctggccaccaaggacatgaggaagagccaggagaggtccatgagctacagtgatgagagccggctgagcaacctgctgcggcgcatcaccagagaagatgaccgggaccggcggctggccaccgtgaagcagctgaaggagttcatccagcagcctgagaacaagctggtgctggtgaagcagctggacaacatcctggccgctgtgcatgatgtgctgaatgaaagcagcaagctgctgcaggagctgcggcaggagggcgcctgctgcctgggcctgctgtgtgccagcctgtcctatgaagctgagaagatcttcaagtggatcttcagcaagttcagcagcagcgccaaggatgaggtgaagctgctgtacctgtgtgccacctacaaggccctggagaccgtgggggagaagaaggccttcagctctgtgatgcagctggtgatgaccagcctgcagagcatcctggagaatgtggacaccccagagctgctgtgcaagtgtgtgaagtgcatcctgctggtggcccgctgctacccccacatcttcagcaccaacttccgggacacagtggacatcctggtgggctggcacatcgaccacacccagaagcccagcctgacccagcaggtgtctggctggctgcagagcctggagcccttctgggtggccgacctggccttcagcaccaccctgctgggccagttcctggaggacatggaggcctatgcagaggacctgagccacgtggccagcggggagagcgtggatgaagatgtgcccccacccagcgtgtccctgcccaagctggccgccctgctgcgggtcttcagcacagtggtgcgcagcatcggggagcgcttcagccccatccggggcccccccatcacagaggcctacgtgacagatgtgctgtacagagtgatgagatgtgtgacagctgccaaccaggtgttcttcagcgaggccgtgctgacagctgccaatgaatgtgtgggcgtgctgctgggcagcctggaccccagcatgaccatccactgtgacatggtgatcacctacggcctggaccagctggagaactgccagacctgtggcacagactacatcatctctgtgctgaacctgctgaccctgattgtggagcagatcaacaccaagctgcccagcagctttgtggagaagctgttcatccccagcagcaagctgctcttcctgcgctaccacaaggagaaggaggtggtggccgtggcccatgctgtgtaccaggccgtgctgagcctgaagaacatccctgtgctggagacagcctacaagctgatcctgggggagatgacctgtgccctgaacaacctgctgcacagcctgcagctgcctgaggcctgcagcgagatcaagcatgaggccttcaagaaccacgtgttcaacgtggacaatgccaagtttgtggtgatctttgacctgagcgccctgaccaccatcggaaatgccaagaacagcctgattggcatgtgggccctgagccccaccgtgtttgccctgctgagcaagaacctgatgattgtgcacagcgacctggccgtgcacttccctgccatccagtatgctgtgctgtacaccctgtacagccactgcaccaggcatgaccacttcatcagcagcagcctgagcagcagcagccccagcctgtttgatggagctgtgatcagcacagtgaccacagccaccaagaagcacttcagcatcatcctgaacctgctgggcatcctgctgaagaaggacaacctgaaccaggacaccaggaagctgctgatgacctgggccctggaggccgctgtgctgatgaagaagtctgagacctacgcccccctcttcagcctgcccagcttccacaagttctgcaagggcctgctggccaacaccctggtggaggatgtgaacatctgcctgcaggcctgcagcagcctgcacgccctgagcagcagcctgcctgatgacctgctgcagagatgtgtggatgtgtgccgggtgcagctggtgcacagcggcacccgcatccggcaggccttcggcaagctgctgaagagcatccccctggatgtggtgctgagcaacaacaaccacacagagatccaggagatcagcctggccctgcggagccacatgagcaaggcccccagcaacaccttccacccccaggacttcagtgatgtgatctccttcatcctgtatggcaacagccacaggacaggcaaggacaactggctggagcggctcttctacagctgccagaggctggacaagagggaccagagcaccatccccaggaacctgctgaagacagatgctgtgctgtggcagtgggccatctgggaggccgcccagttcaccgtgctgagcaagctgcggacccccctgggccgggcccaggacaccttccagaccatcgagggcatcatccgcagcctggccgcccacaccctgaacccagaccaggatgtgtcccagtggaccacagctgacaatgatgagggccacggcaacaaccagctgcggctggtgctgctgctgcagtacctggagaacctggagaagctgatgtacaatgcctatgagggctgtgccaatgccctgaccagcccccccaaggtgatccgcaccttcttctacaccaaccggcagacctgccaggactggctgacccgcatccggctgagcatcatgagggtgggcctgctggccggccagcctgctgtgacagtgcgccacggctttgacctgctgacagagatgaagaccaccagcctgagccagggcaatgagctggaggtgaccatcatgatggtggtggaggccctgtgtgagctgcactgcccagaggccatccagggcattgctgtgtggagcagcagcatcgtgggcaagaacctgctgtggatcaacagcgtggcccagcaggccgagggccgctttgagaaggcctctgtggagtaccaggagcacctgtgtgccatgactggagtggactgctgcatcagcagctttgacaagtctgtgctgaccctggccaatgccggcaggaacagcgccagccccaagcacagcctgaatggagagagcaggaagacagtgctgagcaagcccacagacagcagccctgaggtgatcaactacctgggcaacaaggcctgtgagtgctacatcagcattgctgactgggccgctgtgcaggagtggcagaatgccatccatgacctgaagaagagcaccagcagcaccagcctgaacctgaaggctgacttcaactacatcaagagcctgagcagctttgaaagtggcaagtttgtggagtgcacagagcagctggagctgctgcctggagagaacatcaacctgctggccggcggcagcaaggagaagattgacatgaagaagctgctgcccaacatgctgagcccagacccccgggagctgcagaagagcattgaggtgcagctgctgcggagctctgtgtgcctggccacagccctgaaccccatcgagcaggaccagaagtggcagagcatcacagaaaatgtggtgaagtacctgaagcagaccagccgcatcgccatcggccccctgcggctgagcaccctgactgtgtcccagagcctgcctgtgctgagcaccctgcagctgtactgcagcagcgccctggagaacacagtgagcaaccggctgagcacagaggactgcctgatccccctcttcagcgaggccctgcggagctgcaagcagcatgatgtgcggccctggatgcaggccctgcgctacaccatgtaccagaaccagctgctggagaagatcaaggagcagacagtgcccatccgcagccacctgatggagctgggcctgacagctgccaagtttgccaggaagagaggaaatgtgtccctggccacccggctgctggcccagtgcagcgaggtgcagctgggcaagaccaccacagcccaggacctggtgcagcacttcaagaagctgagcacccagggccaggtggatgagaagtggggccctgagctggacatcgagaagaccaagctgctgtacacagctggccagagcacccacgccatggagatgctgagcagctgtgccatctccttctgcaagtctgtgaaggccgagtatgctgtggccaagagcatcctgaccctggccaagtggatccaggccgagtggaaggagatcagcggccagctgaagcaggtgtaccgggcccagcaccagcagaacttcaccggcctgagcaccctgagcaagaacatcctgaccctgattgagctgcccagcgtgaacaccatggaggaggagtacccccgcatcgagagcgagagcacagtgcacatcggcgtgggggagccagacttcatcctgggccagctgtaccacctgagctctgtgcaggcccctgaggtggccaagtcctgggccgccctggcctcctgggcctaccgctggggcaggaaggtggtggacaatgccagccagggcgagggcgtgcggctgctgccccgggagaagtctgaggtgcagaacctgctgcctgacaccatcacagaggaggagaaggagcgcatctacggcatcctgggccaggccgtgtgcaggcctgctggcatccaggatgaggacatcaccctgcagatcacagaaagtgaggacaatgaggaggatgacatggtggatgtgatctggaggcagctgatcagcagctgcccctggctgtctgagctggatgagagcgccacagagggcgtcatcaaggtgtggaggaaggtggtggaccgcatcttcagcctgtacaagctgagctgcagcgcctacttcaccttcctgaagctgaatgccggccagatccccctggatgaagatgacccccggctgcacctgagccaccgggtggagcagagcacagatgacatgattgtgatggccaccctgcggctgctgcggctgctggtgaagcacgccggggagctgcggcagtacctggagcacggcctggagaccacccccacagccccctggaggggcatcatcccccagctgttcagccggctgaaccaccctgaggtgtatgtgcggcagagcatctgcaacctgctgtgccgggtggcccaggacagcccccacctgatcctgtacccagccatcgtgggcaccatcagcctgagcagcgagagccaggccagcggcaacaagttcagcacagccatccccaccctgctgggcaacatccagggcgaggagctgctggtgtctgaatgtgagggcggcagccccccagccagccaggacagcaacaaggatgagcccaagagcggcctgaatgaagaccaggccatgatgcaggactgctacagcaagatcgtggacaagctgagcagcgccaaccccaccatggtgctgcaggtgcagatgctggtggccgagctgcggcgggtgacagtgctgtgggatgagctgtggctgggcgtgctgctgcagcagcacatgtatgtgctgcggcgcatccagcagctggaggatgaggtgaagagggtgcagaacaacaacaccctgaggaaggaggagaagatcgccatcatgagggagaagcacacagccctgatgaagcccatcgtgtttgccctggagcacgtgcgcagcatcacagctgccccagctgagacccctcatgagaagtggttccaggacaactatggagatgccattgaaaatgccctggagaagctgaagacccccctgaacccagccaagccaggcagctcctggatccccttcaaggagatcatgctgagcctgcagcagagggcccagaagagggccagctacatcctgcggctggaggagatcagcccctggctggccgccatgaccaacacagaaattgccctgcccggggaggtgtctgcccgggacacagtgaccatccacagcgtgggcggcaccatcaccatcctgcccaccaagaccaagcccaagaagctgctcttcctgggcagtgatggcaagagctacccctacctgttcaagggcctggaggacctgcacctggatgagcgcatcatgcagttcctgagcatcgtgaacaccatgtttgccaccatcaaccggcaggagaccccccgcttccacgcccggcactacagcgtgacccccctgggcaccaggagcggcctcatccagtgggtggatggagccacccccctgtttggcctgtacaagcgctggcagcagcgggaggccgccctgcaggcccagaaggcccaggacagctaccagaccccccagaaccctggcatcgtgccccggcccagcgagctgtactacagcaagattggccctgccctgaagacagtgggcctgagcctggatgtgtcccggcgggactggcccctgcacgtgatgaaggctgtgctggaggagctgatggaggccaccccacccaacctgctggccaaggagctgtggagcagctgcaccaccccagatgagtggtggagggtgacccagagctatgcccggagcacagctgtgatgtccatggtgggctacatcatcggcctgggggacagacacctggacaacgtgctgattgacatgaccactggagaggtggtgcacatcgactacaacgtgtgctttgagaagggcaagagcctgcgggtgcctgagaaggtgcccttcaggatgacccagaacattgaaacagccctgggcgtgactggagtggagggcgtcttccggctgagctgtgagcaggtgctgcacatcatgaggcggggccgggagaccctgctgaccctgctggaggcctttgtgtatgaccccctggtggactggacagctggaggagaggccggctttgctggagctgtgtatggaggcggcggccagcaggccgagagcaagcagagcaagcgggagatggagcgggagatcaccaggagcctcttcagcagccgggtggccgagatcaaggtgaactggttcaagaacagagatgagatgctggtggtgctgcccaagctggatggcagcctggatgagtacctgagcctgcaggagcagctgacagatgtggagaagctgcagggcaagctgctggaggagattgagttcctggagggcgctgagggcgtggaccaccccagccacaccctgcagcaccgctacagcgagcacacccagctgcagacccagcagagagctgtgcaggaggccatccaggtgaagctgaatgaatttgagcagtggatcacccactaccaggccgccttcaacaacctggaggccacccagctggccagcctgctgcaggagatcagcacccagatggacctgggcccccccagctatgtgcctgccacagccttcctgcagaatgccggccaggcccacctgatcagccagtgtgagcagctggagggggaggtgggcgccctgctgcagcagaggagatctgtgctgcggggctgcctggagcagctgcaccactacgccaccgtggccctgcagtaccccaaggccatcttccagaagcacagaattgagcagtggaagacctggatggaggagctgatctgcaacaccaccgtggagcgctgccaggagctgtacagaaaatatgagatgcagtatgccccccagcccccacccaccgtgtgccagttcatcacagccacagagatgaccctgcagagatatgctgctgacatcaacagccgcctcatccggcaggtggagcggctgaagcaggaggccgtgacagtgcctgtgtgtgaggaccagctgaaggagattgagcgctgcatcaaggtgttcctgcatgaaaatggagaggagggcagcctgagcctggccagcgtcatcatcagcgccctgtgcaccctgaccaggaggaacctgatgatggagggcgccgccagcagcgctggggagcagctggtggacctgaccagcagagatggagcctggttcctggaggagctgtgcagcatgtctggaaatgtgacctgcctggtgcagctgctgaagcagtgccacctggtgccccaggacctggacatccccaaccccatggaggccagcgagaccgtgcacctggccaacggggtgtacaccagcctgcaggagctgaacagcaacttccggcagatcatcttccctgaggccctgcgctgcctgatgaagggggagtacaccctggagagcatgctgcacgagctggatggcctgattgagcagaccacagatggagtgcccctgcagaccctggtggagagcctgcaggcctacctgagaaatgctgccatgggcctggaggaggagacccacgcccactacattgatgtggcccggctgctgcacgcccagtatggagagctgatccagcccagaaatggatctgtggatgagacccccaagatgtctgctggccagatgctgctggtggcctttgatggcatgtttgcccaggtggagacagccttcagcctgctggtggagaagctgaacaagatggagatccccatcgcctggaggaagattgacatcatccgggaggcccggagcacccaggtgaacttctttgatgatgacaaccaccggcaggtgctggaggagatcttcttcctgaagaggctgcagaccatcaaggagttcttccggctgtgtggcaccttcagcaagaccctgagcggcagcagcagcctggaggaccagaacacagtgaatggacctgtgcagatcgtgaatgtgaagaccctcttcaggaacagctgcttcagcgaggaccagatggccaagcccatcaaggccttcaccgctgactttgtgcggcagctgctgattggcctgcccaaccaggccctgggcctgaccctgtgcagcttcatcagcgccctgggcgtggacatcatcgcccaggtggaggccaaggactttggagctgagagcaaggtgtctgtggatgacctgtgcaagaaggctgtggagcacaacatccagatcggcaagttcagccagctggtgatgaacagagccaccgtgctggccagcagctatgacacagcctggaagaagcatgacctggtgcggcggctggagaccagcatcagcagctgcaagaccagcctgcagagggtgcagctgcacatcgccatgttccagtggcagcacgaggacctgctgatcaaccggccccaggccatgtctgtgaccccaccacccaggtctgccatcctgacctccatgaagaagaagctgcacaccctgagccagatcgagaccagcatcgccaccgtgcaggagaagctggccgccctggagagcagcattgagcagaggctgaagtgggccggcggggccaacccagccctggcccctgtgctgcaggactttgaggccaccatcgccgagaggaggaacctggtgctgaaggagagccagagggccagccaggtgaccttcctgtgcagcaacatcatccactttgagagcctgcggaccaggacagctgaggccctgaacctggatgctgccctgtttgagctgatcaagcgctgccagcagatgtgcagctttgccagccagttcaacagctctgtgtctgagctggagctgcggctgctgcagagggtggacaccggcctggagcaccccatcggcagcagcgagtggctgctgagcgcccacaagcagctgacccaggacatgagcacccagagggccatccagacagagaaggagcagcagattgaaacagtgtgtgagaccatccagaacctggtggacaacatcaagacagtgctgaccggccacaaccggcagctgggagatgtgaagcacctgctgaaggccatggccaaggatgaggaggccgccctggctgatggagaagatgtgccctatgaaaattctgtgcggcagttcctgggggagtacaagtcctggcaggacaacatccagacagtgctcttcaccctggtgcaggccatgggccaggtgcgcagccaggagcacgtggagatgctgcaggagatcacccccaccctgaaggagctgaagacccagagccagagcatctacaacaacctggtgtcctttgccagccccctggtgacagatgccaccaatgaatgtagcagccccaccagcagcgccacctaccagcccagctttgctgctgctgtgcgcagcaacacaggccagaagacccagccagatgtgatgagccagaatgccaggaagctgatccagaagaacctggccaccagcgctgacaccccacccagcacagtgcccggcaccgggaagtctgtggcctgcagccccaagaaggctgtgcgggaccccaagacaggcaaggctgtgcaggagagaaattcctatgctgtgtctgtgtggaagagggtgaaggccaagctggagggcagagatgtggaccccaacagaaggatgtctgtggccgagcaggtggactatgtgatcaaggaggccaccaacctggacaacctggcccagctgtatgagggctggacagcctgggtgtag

SEQ ID NO: 170020 - DNA, 3051 bp, synthetic construct
  misc_feature 1..3051: note = Description of Artificial Sequence: Synthetic coding sequence
  source 1..3051: mol_type = other DNA
atgagccagggccccccaactggagagagcagcgagcctgaggccaaggtgctgcacaccaagaggctgtacagagctgtggtggaggccgtgcaccggctggacctgatcctgtgcaacaagacagcctaccaggaggtgttcaagccagagaacatcagcctgaggaacaagctgcgggagctgtgtgtgaagctgatgttcctgcaccctgtggactatggcaggaaggccgaggagctgctgtggaggaaggtgtactatgaggtgatccagctgatcaagaccaacaagaagcacatccacagccgcagcaccctggagtgtgcctaccgcacccacctggtggccggcatcggcttctaccagcacctgctgctgtacatccagagccactaccagctggagctgcagtgctgcatcgactggacccacgtgacagaccccctgattggctgcaagaagcctgtgtctgccagcggcaaggagatggactgggcccagatggcctgccaccgctgcctggtgtacctgggggacctgagccgctaccagaatgagctggccggcgtggacacagagctgctggccgagcgcttctactaccaggccctgtctgtggccccccagatcggcatgcccttcaaccagctgggcaccctggccggcagcaagtactacaacgtggaggccatgtactgctacctgcgctgcatccagagcgaggtgtcctttgaaggagcctacggcaacctgaagaggctgtatgacaaggccgccaagatgtaccaccagctgaagaagtgtgagaccaggaagctgagccctgggaagaagcgctgcaaggacatcaagaggctgctggtgaacttcatgtacctgcagagcctgctgcagcccaagagcagctctgtggacagcgagctgaccagcctgtgccagagcgtgctggaggacttcaacctgtgcctcttctacctgcccagcagccccaacctgagcctggcctctgaagatgaggaggagtatgaaagtggctacgccttcctgcctgacctgctgatcttccagatggtgatcatctgcctgatgtgtgtgcacagcctggagcgggccggcagcaagcagtacagcgctgccatcgccttcaccctggccctcttcagccacctggtgaaccacgtgaacatccggctgcaggccgagctggaggagggagaaaatcctgtgcctgccttccagagtgatggaacagatgagcctgagagcaaggagcctgtggagaaggaggaggagccagaccctgagcccccacctgtgaccccccaggtgggggagggcaggaagagcaggaagttcagccggctgagctgcctgcggcggcggcggcacccccccaaggtgggagatgacagcgacctgtctgagggctttgaaagtgacagcagccatgacagcgcccgggccagcgagggcagtgacagcggcagtgacaagagcctggagggcggcggcacagcctttgatgctgagacagacagcgagatgaacagccaggagagcagaagtgacctggaggacatggaggaggaggagggcaccaggagccccaccctggagcccccccggggccgctctgaggccccagacagcctgaatggccccctgggccccagcgaggccagcatcgccagcaacctgcaggccatgagcacccagatgttccagaccaagcgctgcttccggctggcccccaccttcagcaacctgctgctgcagcccaccaccaacccccacaccagcgccagccaccggccctgtgtgaatggagatgtggacaagcccagcgagcccgccagcgaggagggcagcgagagcgagggcagcgagagcagcggccgcagctgcagaaatgaaagaagcatccaggagaagctgcaggtgctgatggccgagggcctgctgcctgctgtgaaggtgttcctggactggctgcggaccaacccagacctgatcatcgtgtgtgcccagagcagccagagcctgtggaaccggctgtctgtgctgctgaacctgctgcctgctgctggggagctgcaggagagcggcctggccctgtgcccagaggtgcaggacctgctggagggctgtgagctgcctgacctgcccagcagcctgctgctgcctgaggacatggccctgaggaacctgccccccctgcgggccgcccaccggcgcttcaactttgacacagaccggcccctgctgagcaccctggaggagagcgtggtgcgcatctgctgcatccgcagctttggccacttcatcgcccggctgcagggcagcatcctgcagttcaaccctgaggtgggcatctttgtgtccatcgcccagagcgagcaggagagcctgctgcagcaggcccaggcccagttcaggatggcccaggaggaggcccggaggaaccggctgatgagggacatggcccagctgcggctgcagctggaggtgtcccagctggagggcagcctgcagcagcccaaggcccagagcgccatgagcccctacctggtgcctgacacccaggccctgtgccaccacctgcctgtgatccggcagctggccaccagcggccgcttcatcgtcatcatccccaggacagtgattgatggcctggacctgctgaagaaggagcaccctggggccagagatggcatccgctacctggaggccgagttcaagaagggcaaccgctacatccgctgccagaaggaggtgggcaagagctttgagcggcacaagctgaagaggcaggatgctgatgcctggaccctgtacaagatcctggacagctgcaagcagctgaccctggcccagggcgctggggaggaggaccccagcggcatggtgaccatcatcaccggcctgcccctggacaaccccagcgtgctgagcggccccatgcaggccgccctgcaggccgccgcccacgcctctgtggacatcaagaatgtgctggacttctacaagcagtggaaggagattggatag

SEQ ID NO: 170021 - DNA, 1125 bp, synthetic construct
  misc_feature 1..1125: note = Description of Artificial Sequence: Synthetic coding sequence
  source 1..1125: mol_type = other DNA
atgagccagggccccccaactggagagagcagcgagcctgaggccaaggtgctgcacaccaagaggctgtacagagctgtggtggaggccgtgcaccggctggacctgatcctgtgcaacaagacagcctaccaggaggtgttcaagccagagaacatcagcctgaggaacaagctgcgggagctgtgtgtgaagctgatgttcctgcaccctgtggactatggcaggaaggccgaggagctgctgtggaggaaggtgtactatgaggtgatccagctgatcaagaccaacaagaagcacatccacagccgcagcaccctggagtgtgcctaccgcacccacctggtggccggcatcggcttctaccagcacctgctgctgtacatccagagccactaccagctggagctgcagtgctgcatcgactggacccacgtgacagaccccctgattggctgcaagaagcctgtgtctgccagcggcaaggagatggactgggcccagatggcctgccaccgctgcctggtgtacctgggggacctgagccgctaccagaatgagctggccggcgtggacacagagctgctggccgagcgcttctactaccaggccctgtctgtggccccccagatcggcatgcccttcaaccagctgggcaccctggccggcagcaagtactacaacgtggaggccatgtactgctacctgcgctgcatccagagcgaggtgtcctttgaaggagcctacggcaacctgaagaggctgtatgacaaggccgccaagatgtaccaccagctgaagaagtgtgagaccaggaagctgagccctgggaagaagcgctgcaaggacatcaagaggctgctggtgaacttcatgtacctgcagagcctgctgcagcccaagagccggggctgcaccagccactgccccaccagcgccctgtgcctgcccctgagcagcttccagggccgggagcaggccccacccagggctgctggcagcctggcctgtgccagcacagtgtcctgtgcccaccagccccaccgctgctgtgccctgtgctcctggctgctgtgctgggacaggatgggctgccaggaggagaagaagggcggcgctgtgtag

SEQ ID NO: 170022 - DNA, 417 bp, synthetic construct
  misc_feature 1..417: note = Description of Artificial Sequence: Synthetic coding sequence
  source 1..417: mol_type = other DNA
tgatttattgtcatcatccccaggacagtgattgatggcctggacctgctgaagaaggagcaccctggggccagagatggcatccgctacctggaggccgagttcaagaagggcaaccgctacatccgctgccagaaggaggtgggcaagagctttgagcggcacaagctgaagaggcaggatgctgatgcctggaccctgtacaagatcctggacagctgcaagcagctgaccctggcccagggcgctggggaggaggaccccagcggcatggtgaccatcatcaccggcctgcccctggacaaccccagcgtgctgagcggccccatgcaggccgccctgcaggccgccgcccacgcctctgtggacatcaagaatgtgctggacttctacaagcagtggaaggagattggatag

SEQ ID NO: 170023 - DNA, 3438 bp, synthetic construct
  misc_feature 1..3438: note = Description of Artificial Sequence: Synthetic coding sequence
  source 1..3438: mol_type = other DNA
atgctggtgacagacctggagtatgccctggacaagaaggtggagcaggacctgtggaaccacgccttcaagaaccagatcaccaccctgcagggccaggccaagaacagagccaaccccaacagaagtgaggtgcaggccaacctgagcctcttcctggaggccgccagcggcttctacacccagctgctgcaggagctgtgcaccgtcttcaacgtggacctgccctgccgggtgaagagcagccagctgggcatcatcagcaacaagcagacccacaccagcgccatcgtgaagccccagagcagcagctgcagctacatctgccagcactgcctggtgcacctgggggacatcgcccgctacagaaaccagaccagccaggccgagagctactacagacatgctgcccagctggtgcccagcaatggccagccctacaaccagctggccatcctggccagcagcaaaggagaccacctgaccaccatcttctactactgccgcagcattgctgtgaagttccccttccctgctgccagcaccaacctgcagaaggccctgagcaaggccctggagagcagagatgaggtgaagaccaagtggggcgtgtctgacttcatcaaggccttcatcaagttccacggccacgtgtacctgagcaagagcctggagaagctgagccccctgcgggagaagctggaggagcagttcaagaggctgctcttccagaaggccttcaacagccagcagctggtgcacgtgaccgtcatcaacctcttccagctgcaccacctgcgggacttcagcaatgaaacagagcagcacacctacagccaggatgagcagctgtgctggacccagctgctggccctcttcatgtccttcctgggcatcctgtgcaagtgccccctgcagaatgaaagccaggaggagagctacaatgcctaccccctgcctgctgtgaaggtgtccatggactggctgcggctgcggcccagggtcttccaggaggccgtggtggatgagcggcagtacatctggccctggctgatcagcctgctgaacagcttccacccccatgaggaggacctgagcagcatcagcgccacccccctgcctgaggagtttgagctgcagggcttcctggccctgcggcccagcttcaggaacctggacttcagcaagggccaccagggcatcaccggggacaaggagggccagcagaggcgcatccggcagcagaggctcatcagcatcggcaagtggattgctgacaaccagcccaggctcatccagtgtgaaaatgaggtgggcaagctgctcttcatcacagagatccctgagctgatcctggaggaccccagcgaggccaaggagaacctgatcctgcaggagaccagcgtcatcgagagcctggccgcagatggcagccctggcctgaagtctgtgctgagcaccagcaggaacctgagcaacaactgtgacacaggagagaagcctgtggtgaccttcaaggagaacatcaagacccgggaggtgaacagagaccagggccgctccttcccccccaaggaggtgcggcgggactacagcaagggcatcaccgtgaccaagaatgatggcaagaaggacaacaacaagaggaagacagagaccaagaagtgcaccctggagaagctgcaggagaccgggaagcagaatgtggccgtgcaggtgaagagccagacagagctgaggaagacccctgtgtctgaggccaggaagacccctgtgacccagacccccacccaggccagcaacagccagttcatccccatccaccaccctggggccttcccccccctgcccagccggcccggcttccccccacccacctacgtgatccccccacctgtggccttctccatgggcagcggctacaccttccctgctggggtgtctgtgcccggcaccttcctgcagcccacagcccacagccctgctggcaaccaggtgcaggccggcaagcagagccacatcccctacagccagcagaggcccagcggccctggccccatgaaccagggcccccagcagagccagccccccagccagcagcccctgaccagcctgcctgcccagcccacagcccagagcaccagccagctgcaggtgcaggccctgacccagcagcagcagagccccaccaaggctgtgcctgccctgggcaagagccccccccaccacagcggcttccagcagtaccagcaggctgatgccagcaagcagctgtggaaccccccccaggtgcagggccccctgggcaagatcatgcctgtgaagcagccctactacctgcagacccaggaccccatcaagctgtttgagcccagcctgcagccccctgtgatgcagcagcagcccctggagaagaagatgaagcccttccccatggagccctacaaccacaaccccagcgaggtgaaggtgcctgagttctactgggacagcagctacagcatggctgacaacagatctgtgatggcccagcaggccaacatcgaccggcggggcaagaggagccctggggtcttccggcctgagcaggaccctgtgcccaggatgccctttgaggaccccaagagcagccccctgctgcccccagacctgctgaagagcctggccgccctggaggaggaggaggagctgatcttcagcaaccccccagacctgtacccagccctgctgggccccctggccagcctgcccggccgcagcctcttcaagagcctgctggagaagcccagcgagctgatgagccacagcagcagcttcctgagcctgaccggcttcagcctgaaccaggagcgctaccccaacaacagcatgtttaatgaggtgtatggcaagaacctgaccagcagcagcaaggccgagctgagccccagcatggccccccaggagaccagcctgtacagcctgtttgagggcaccccctggagccccagcctgcctgccagcagtgaccacagcaccccagccagccagagcccccacagcagcaaccccagcagcctgcccagcagcccccccacccacaaccacaacagcgtgcccttcagcaactttggccccatcggcaccccagacaacagagacagaagaacagctgaccgctggaagacagacaagccagccatgggcggcttcggcatcgactacctgagcgccaccagcagcagcgagagctcctggcaccaggccagcacccccagcggcacctggacaggccacggccccagcatggaggacagcagcgctgtgctgatggagagcctgaagagcatctggagcagctccatgatgcaccctggccccagcgccctggagcagctgctgatgcagcagaagcagaagcagcagaggggccagggcaccatgaaccccccccactag

SEQ ID NO: 170024 - DNA, 3414 bp, synthetic construct
  misc_feature 1..3414: note = Description of Artificial Sequence: Synthetic coding sequence
  source 1..3414: mol_type = other DNA
atgagcctgcagagcgcccagtacctgcggcaggccgaggtgctgaaggctgacatgacagacagcaagctgggccctgctgaggtgtggaccagccggcaggccctgcaggacctgtaccagaagatgctggtgacagacctggagtatgccctggacaagaaggtggagcaggacctgtggaaccacgccttcaagaaccagatcaccaccctgcagggccaggccaagaacagagccaaccccaacagaagtgaggtgcaggccaacctgagcctcttcctggaggccgccagcggcttctacacccagctgctgcaggagctgtgcaccgtcttcaacgtggacctgccctgccgggtgaagagcagccagctgggcatcatcagcaacaagcagacccacaccagcgccatcgtgaagccccagagcagcagctgcagctacatctgccagcactgcctggtgcacctgggggacatcgcccgctacagaaaccagaccagccaggccgagagctactacagacatgctgcccagctggtgcccagcaatggccagccctacaaccagctggccatcctggccagcagcaaaggagaccacctgaccaccatcttctactactgccgcagcattgctgtgaagttccccttccctgctgccagcaccaacctgcagaaggccctgagcaaggccctggagagcagagatgaggtgaagaccaagtggggcgtgtctgacttcatcaaggccttcatcaagttccacggccacgtgtacctgagcaagagcctggagaagctgagccccctgcgggagaagctggaggagcagttcaagaggctgctcttccagaaggccttcaacagccagcagctggtgcacgtgaccgtcatcaacctcttccagctgcaccacctgcgggacttcagcaatgaaacagagcagcacacctacagccaggatgagcagctgtgctggacccagctgctggccctcttcatgtccttcctgggcatcctgtgcaagtgccccctgcagaatgaaagccaggaggagagctacaatgcctaccccctgcctgctgtgaaggtgtccatggactggctgcggctgcggcccagggtcttccaggaggccgtggtggatgagcggcagtacatctggccctggctgatcagcctgctgaacagcttccacccccatgaggaggacctgagcagcatcagcgccacccccctgcctgaggagtttgagctgcagggcttcctggccctgcggcccagcttcaggaacctggacttcagcaagggccaccagggcatcaccggggacaaggagggccagcagaggcgcatccggcagcagaggctcatcagcatcggcaagtggattgctgacaaccagcccaggctcatccagtgtgaaaatgaggtgggcaagctgctcttcatcacagagatccctgagctgatcctggaggaccccagcgaggccaaggagaacctgatcctgcaggagaccagcgtcatcgagagcctggccgcagatggcagccctggcctgaagtctgtgctgagcaccagcaggaacctgagcaacaactgtgacacaggagagaagcctgtggtgaccttcaaggagaacatcaagacccgggaggtgaacagagaccagggccgctccttcccccccaaggaggtgcggcgggactacagcaagggcatcaccgtgaccaagaatgatggcaagaaggacaacaacaagaggaagacagagaccaagaagtgcaccctggagaagctgcaggagaccgggaagcagaatgtggccgtgcaggtgaagagccagacagagctgaggaagacccctgtgtctgaggccaggaagacccctgtgacccagacccccacccaggccagcaacagccagttcatccccatccaccaccctggggccttcccccccctgcccagccggcccggcttccccccacccacctacgtgatccccccacctgtggccttctccatgggcagcggctacaccttccctgctggggtgtctgtgcccggcaccttcctgcagcccacagcccacagccctgctggcaaccaggtgcaggccggcaagcagagccacatcccctacagccagcagaggcccagcggccctggccccatgaaccagggcccccagcagagccagccccccagccagcagcccctgaccagcctgcctgcccagcccacagcccagagcaccagccagctgcaggtgcaggccctgacccagcagcagcagagccccaccaaggctgtgcctgccctgggcaagagccccccccaccacagcggcttccagcagtaccagcaggctgatgccagcaagcagctgtggaaccccccccaggtgcagggccccctgggcaagatcatgcctgtgaagcagccctactacctgcagacccaggaccccatcaagctgtttgagcccagcctgcagccccctgtgatgcagcagcagcccctggagaagaagatgaagcccttccccatggagccctacaaccacaaccccagcgaggtgaaggtgcctgagttctactgggacagcagctacagcatggctgacaacagatctgtgatggcccagcaggccaacatcgaccggcggggcaagaggagccctggggtcttccggcctgagcaggaccctgtgcccaggatgccctttgagaagagcctgctggagaagcccagcgagctgatgagccacagcagcagcttcctgagcctgaccggcttcagcctgaaccaggagcgctaccccaacaacagcatgtttaatgaggtgtatggcaagaacctgaccagcagcagcaaggccgagctgagccccagcatggccccccaggagaccagcctgtacagcctgtttgagggcaccccctggagccccagcctgcctgccagcagtgaccacagcaccccagccagccagagcccccacagcagcaaccccagcagcctgcccagcagcccccccacccacaaccacaacagcgtgcccttcagcaactttggccccatcggcaccccagacaacagagacagaagaacagctgaccgctggaagacagacaagccagccatgggcggcttcggcatcgactacctgagcgccaccagcagcagcgagagctcctggcaccaggccagcacccccagcggcacctggacaggccacggccccagcatggaggacagcagcgctgtgctgatggagagcctgaagagcatctggagcagctccatgatgcaccctggccccagcgccctggagcagctgctgatgcagcagaagcagaagcagcagaggggccagggcaccatgaaccccccccactag

SEQ ID NO: 170025 - DNA, 3513 bp, synthetic construct
  misc_feature 1..3513: note = Description of Artificial Sequence: Synthetic coding sequence
  source 1..3513: mol_type = other DNA
atgaggaactggatgttcctgcagatcgtgattgtgggggagaatgtgtccttcaagagccagatgaggacagagaacctgaagtctgaggagcacctgaagagcagcaacatccggcaggccgaggtgctgaaggctgacatgacagacagcaagctgggccctgctgaggtgtggaccagccggcaggccctgcaggacctgtaccagaagatgctggtgacagacctggagtatgccctggacaagaaggtggagcaggacctgtggaaccacgccttcaagaaccagatcaccaccctgcagggccaggccaagaacagagccaaccccaacagaagtgaggtgcaggccaacctgagcctcttcctggaggccgccagcggcttctacacccagctgctgcaggagctgtgcaccgtcttcaacgtggacctgccctgccgggtgaagagcagccagctgggcatcatcagcaacaagcagacccacaccagcgccatcgtgaagccccagagcagcagctgcagctacatctgccagcactgcctggtgcacctgggggacatcgcccgctacagaaaccagaccagccaggccgagagctactacagacatgctgcccagctggtgcccagcaatggccagccctacaaccagctggccatcctggccagcagcaagggggaccacctgaccaccatcttctactactgccgcagcattgctgtgaagttccccttccctgctgccagcaccaacctgcagaaggccctgagcaaggccctggagagcagagatgaggtgaagaccaagtggggcgtgtctgacttcatcaaggccttcatcaagttccacggccacgtgtacctgagcaagagcctggagaagctgagccccctgcgggagaagctggaggagcagttcaagaggctgctcttccagaaggccttcaacagccagcagctggtgcacgtgaccgtcatcaacctcttccagctgcaccacctgcgggacttcagcaatgaaacagagcagcacacctacagccaggatgagcagctgtgctggacccagctgctggccctcttcatgtccttcctgggcatcctgtgcaagtgccccctgcagaatgaaagccaggaggagagctacaatgcctaccccctgcctgctgtgaaggtgtccatggactggctgcggctgcggcccagggtcttccaggaggccgtggtggatgagcggcagtacatctggccctggctgatcagcctgctgaacagcttccacccccatgaggaggacctgagcagcatcagcgccacccccctgcctgaggagtttgagctgcagggcttcctggccctgcggcccagcttcaggaacctggacttcagcaagggccaccagggcatcactggagacaaggagggccagcagaggcgcatccggcagcagaggctcatcagcatcggcaagtggattgctgacaaccagcccaggctcatccagtgtgaaaatgaggtgggcaagctgctcttcatcacagagatccctgagctgatcctggaggaccccagcgaggccaaggaaaatctcatcctgcaggagacctctgtgattgagagcctggccgcagatggcagccctggcctgaagtctgtgctgagcaccagcaggaacctgagcaacaactgtgacaccggggagaagcctgtggtgaccttcaaggagaacatcaagacccgggaggtgaacagagaccagggccgctccttcccccccaaggaggtgaagagccagacagagctgaggaagacccctgtgtctgaggccaggaagacccctgtgacccagacccccacccaggccagcaacagccagttcatccccatccaccaccctggggccttcccccccctgcccagcaggcctggcttccccccacccacctacgtgattcctcctcctgtggccttctccatgggcagcggctacaccttccctgctggggtgtctgtgcccggcaccttcctgcagcccacagcccacagccctgctggcaaccaggtgcaggccggcaagcagagccacatcccctacagccagcagaggccttctggccctggccccatgaaccagggcccccagcagagccagccccccagccagcagcccctgaccagcctgcctgcccagcccacagcccagagcaccagccagctgcaggtgcaggccctgacccagcagcagcagagccccaccaaggctgtgcctgccctgggcaagagccccccccaccacagcggcttccagcagtaccagcaggctgatgccagcaagcagctgtggaaccccccccaggtgcagggccccctgggcaagatcatgcctgtgaagcagccctactacctgcagacccaggaccccatcaagctgtttgagcccagcctgcagccccctgtgatgcagcagcagcccctggagaagaagatgaagcccttccccatggagccctacaaccacaaccccagcgaggtgaaggtgcctgagttctactgggacagcagctacagcatggctgacaacagatctgtgatggcccagcaggccaacatcgacagaagaggcaagaggagccctggggtcttccggcctgagcaggaccctgtgcccaggatgccctttgaggaccccaagagcagccccctgctgcccccagacctgctgaagagcctggccgccctggaggaggaggaggagctgatcttcagcaaccccccagacctgtacccagccctgctgggccccctggccagcctgcccggccgcagcctcttcaagagcctgctggagaagcccagcgagctgatgagccacagcagcagcttcctgagcctgaccggcttcagcctgaaccaggagcgctaccccaacaacagcatgtttaatgaggtgtatggcaagaacctgaccagcagcagcaaggccgagctgagccccagcatggccccccaggagaccagcctgtacagcctgtttgagggcaccccctggagccccagcctgcctgccagcagtgaccacagcaccccagccagccagagcccccacagcagcaaccccagcagcctgcccagcagcccccccacccacaaccacaacagcgtgcccttcagcaactttggccccatcggcaccccagacaacagagacagaagaacagctgaccgctggaagacagacaagccagccatgggcggctttggaattgactacctgagcgccaccagcagcagcgagagctcctggcaccaggccagcaccccatctggcacctggacaggccacggccccagcatggaggacagcagcgctgtgctgatggagagcctgaagagcatctggagcagctccatgatgcaccctggccccagcgccctggagcagctgctgatgcagcagaagcagaagcagcagaggggccagggcaccatgaaccccccccactag

SEQ ID NO: 170026 - DNA, 2274 bp, synthetic construct
  misc_feature 1..2274: note = Description of Artificial Sequence: Synthetic coding sequence
  source 1..2274: mol_type = other DNA
atgctggtgacagacctggagtatgccctggacaagaaggtggagcaggacctgtggaaccacgccttcaagaaccagatcaccaccctgcagggccaggccaagaacagagccaaccccaacagaagtgaggtgcaggccaacctgagcctcttcctggaggccgccagcggcttctacacccagctgctgcaggagctgtgcaccgtcttcaacgtggacctgccctgccgggtgaagagcagccagctgggcatcatcagcaacaagcagacccacaccagcgccatcgtgaagccccagagcagcagctgcagctacatctgccagcactgcctggtgcacctgggggacatcgcccgctacagaaaccagaccagccaggccgagagctactacagacatgctgcccagctggtgcccagcaatggccagccctacaaccagctggccatcctggccagcagcaaaggagaccacctgaccaccatcttctactactgccgcagcattgctgtgaagttccccttccctgctgccagcaccaacctgcagaaggccctgagcaaggccctggagagcagagatgaggtgaagaccaagtggggcgtgtctgacttcatcaaggccttcatcaagttccacggccacgtgtacctgagcaagagcctggagaagctgagccccctgcgggagaagctggaggagcagttcaagaggctgctcttccagaaggccttcaacagccagcagctggtgcacgtgaccgtcatcaacctcttccagctgcaccacctgcgggacttcagcaatgaaacagagcagcacacctacagccaggatgagcagctgtgctggacccagctgctggccctcttcatgtccttcctgggcatcctgtgcaagtgccccctgcagaatgaaagccaggaggagagctacaatgcctaccccctgcctgctgtgaaggtgtccatggactggctgcggctgcggcccagggtcttccaggaggccgtggtggatgagcggcagtacatctggccctggctgatcagcctgctgaacagcttccacccccatgaggaggacctgagcagcatcagcgccacccccctgcctgaggagtttgagctgcagggcttcctggccctgcggcccagcttcaggaacctggacttcagcaagggccaccagggcatcaccggggacaaggagggccagcagaggcgcatccggcagcagaggctcatcagcatcggcaagtggattgctgacaaccagcccaggctcatccagtgtgaaaatgaggtgggcaagctgctcttcatcacagagatccctgagctgatcctggaggaccccagcgaggccaaggagaacctgatcctgcaggagaccagcgtcatcgagagcctggccgcagatggcagccctggcctgaagtctgtgctgagcaccagcaggaacctgagcaacaactgtgacacaggagagaagcctgtggtgaccttcaaggagaacatcaagacccgggaggtgaacagagaccagggccgctccttcccccccaaggaggtgaagagccagacagagctgaggaagacccctgtgtctgaggccaggaagacccctgtgacccagacccccacccaggccagcaacagccagttcatccccatccaccaccctggggccttcccccccctgcccagccggcccggcttccccccacccacctacgtgatccccccacctgtggccttctccatgggcagcggctacaccttccctgctggggtgtctgtgcccggcaccttcctgcagcccacagcccacagccctgctggcaaccaggtgcaggccggcaagcagagccacatcccctacagccagcagaggcccagcggccctggccccatgaaccagggcccccagcagagccagccccccagccagcagcccctgaccagcctgcctgcccagcccacagcccagagcaccagccagctgcaggtgcaggccctgacccagcagcagcagagccccaccaaggctgtgcctgccctgggcaagagccccccccaccacagcggcttccagcagtaccagcaggctgatgccagcaagcagctgtggaaccccccccaggtgcagggccccctgggcaagatcatgcctgtgaagcagccctactacctgcagacccaggaccccatcaagctgtttgagcccagcctgcagccccctgtgatgcagcagcagcccctgtag

SEQ ID NO: 170027 - DNA, 3150 bp, synthetic construct
  misc_feature 1..3150: note = Description of Artificial Sequence: Synthetic coding sequence
  source 1..3150: mol_type = other DNA
atgctggtgacagacctggagtatgccctggacaagaaggtggagcaggacctgtggaaccacgccttcaagaaccagatcaccaccctgcagggccaggccaagaacagagccaaccccaacagaagtgaggtgcaggccaacctgagcctcttcctggaggccgccagcggcttctacacccagctgctgcaggagctgtgcaccgtcttcaacgtggacctgccctgccgggtgaagagcagccagctgggcatcatcagcaacaagcagacccacaccagcgccatcgtgaagccccagagcagcagctgcagctacatctgccagcactgcctggtgcacctgggggacatcgcccgctacagaaaccagaccagccaggccgagagctactacagacatgctgcccagctggtgcccagcaatggccagccctacaaccagctggccatcctggccagcagcaaaggagaccacctgaccaccatcttctactactgccgcagcattgctgtgaagttccccttccctgctgccagcaccaacctgcagaaggccctgagcaaggccctggagagcagagatgaggtgaagaccaagtggggcgtgtctgacttcatcaaggccttcatcaagttccacggccacgtgtacctgagcaagagcctggagaagctgagccccctgcgggagaagctggaggagcagttcaagaggctgctcttccagaaggccttcaacagccagcagctggtgcacgtgaccgtcatcaacctcttccagctgcaccacctgcgggacttcagcaatgaaacagagcagcacacctacagccaggatgagcagctgtgctggacccagctgctggccctcttcatgtccttcctgggcatcctgtgcaagtgccccctgcagaatgaaagccaggaggagagctacaatgcctaccccctgcctgctgtgaaggtgtccatggactggctgcggctgcggcccagggtcttccaggaggccgtggtggatgagcggcagtacatctggccctggctgatcagcctgctgaacagcttccacccccatgaggaggacctgagcagcatcagcgccacccccctgcctgaggagtttgagctgcagggcttcctggccctgcggcccagcttcaggaacctggacttcagcaagggccaccagggcatcaccggggacaaggagggccagcagaggcgcatccggcagcagaggctcatcagcatcggcaagtggattgctgacaaccagcccaggctcatccagtgtgaaaatgaggtgggcaagctgctcttcatcacagagatccctgagctgatcctggaggaccccagcgaggccaaggagaacctgatcctgcaggagaccagcgtcatcgagagcctggccgcagatggcagccctggcctgaagtctgtgctgagcaccagcaggaacctgagcaacaactgtgacacaggagagaagcctgtggtgaccttcaaggagaacatcaagacccgggaggtgaacagagaccagggccgctccttcccccccaaggaggtgaagagccagacagagctgaggaagacccctgtgtctgaggccaggaagacccctgtgacccagacccccacccaggccagcaacagccagttcatccccatccaccaccctggggccttcccccccctgcccagccggcccggcttccccccacccacctacgtgatccccccacctgtggccttctccatgggcagcggctacaccttccctgctggggtgtctgtgcccggcaccttcctgcagcccacagcccacagccctgctggcaaccaggtgcaggccggcaagcagagccacatcccctacagccagcagaggcccagcggccctggccccatgaaccagggcccccagcagagccagccccccagccagcagcccctgaccagcctgcctgcccagcccacagcccagagcaccagccagctgcaggtgcaggccctgacccagcagcagcagagccccaccaaggctgtgcctgccctgggcaagagccccccccaccacagcggcttccagcagtaccagcaggctgatgccagcaagcagctgtggaaccccccccaggtgcagggccccctgggcaagatcatgcctgtgaagcagccctactacctgcagacccaggaccccatcaagctgtttgagcccagcctgcagccccctgtgatgcagcagcagcccctggagaagaagatgaagcccttccccatggagccctacaaccacaaccccagcgaggtgaaggtgcctgagttctactgggacagcagctacagcatggctgacaacagatctgtgatggcccagcaggccaacatcgaccggcggggcaagaggagccctggggtcttccggcctgagcaggaccctgtgcccaggatgccctttgagaagagcctgctggagaagcccagcgagctgatgagccacagcagcagcttcctgagcctgaccggcttcagcctgaaccaggagcgctaccccaacaacagcatgtttaatgaggtgtatggcaagaacctgaccagcagcagcaaggccgagctgagccccagcatggccccccaggagaccagcctgtacagcctgtttgagggcaccccctggagccccagcctgcctgccagcagtgaccacagcaccccagccagccagagcccccacagcagcaaccccagcagcctgcccagcagcccccccacccacaaccacaacagcgtgcccttcagcaactttggccccatcggcaccccagacaacagagacagaagaacagctgaccgctggaagacagacaagccagccatgggcggcttcggcatcgactacctgagcgccaccagcagcagcgagagctcctggcaccaggccagcacccccagcggcacctggacaggccacggccccagcatggaggacagcagcgctgtgctgatggagagcctgaagagcatctggagcagctccatgatgcaccctggccccagcgccctggagcagctgctgatgcagcagaagcagaagcagcagaggggccagggcaccatgaaccccccccactag

SEQ ID NO: 170028 - DNA, 3537 bp, synthetic construct
  misc_feature 1..3537: note = Description of Artificial Sequence: Synthetic coding sequence
  source 1..3537: mol_type = other DNA
atgagcctgcagagcgcccagtacctgcggcaggccgaggtgctgaaggctgacatgacagacagcaagctgggccctgctgaggtgtggaccagccggcaggccctgcaggacctgtaccagaagatgctggtgacagacctggagtatgccctggacaagaaggtggagcaggacctgtggaaccacgccttcaagaaccagatcaccaccctgcagggccaggccaagaacagagccaaccccaacagaagtgaggtgcaggccaacctgagcctcttcctggaggccgccagcggcttctacacccagctgctgcaggagctgtgcaccgtcttcaacgtggacctgccctgccgggtgaagagcagccagctgggcatcatcagcaacaagcagacccacaccagcgccatcgtgaagccccagagcagcagctgcagctacatctgccagcactgcctggtgcacctgggggacatcgcccgctacagaaaccagaccagccaggccgagagctactacagacatgctgcccagctggtgcccagcaatggccagccctacaaccagctggccatcctggccagcagcaaaggagaccacctgaccaccatcttctactactgccgcagcattgctgtgaagttccccttccctgctgccagcaccaacctgcagaaggccctgagcaaggccctggagagcagagatgaggtgaagaccaagtggggcgtgtctgacttcatcaaggccttcatcaagttccacggccacgtgtacctgagcaagagcctggagaagctgagccccctgcgggagaagctggaggagcagttcaagaggctgctcttccagaaggccttcaacagccagcagctggtgcacgtgaccgtcatcaacctcttccagctgcaccacctgcgggacttcagcaatgaaacagagcagcacacctacagccaggatgagcagctgtgctggacccagctgctggccctcttcatgtccttcctgggcatcctgtgcaagtgccccctgcagaatgaaagccaggaggagagctacaatgcctaccccctgcctgctgtgaaggtgtccatggactggctgcggctgcggcccagggtcttccaggaggccgtggtggatgagcggcagtacatctggccctggctgatcagcctgctgaacagcttccacccccatgaggaggacctgagcagcatcagcgccacccccctgcctgaggagtttgagctgcagggcttcctggccctgcggcccagcttcaggaacctggacttcagcaagggccaccagggcatcaccggggacaaggagggccagcagaggcgcatccggcagcagaggctcatcagcatcggcaagtggattgctgacaaccagcccaggctcatccagtgtgaaaatgaggtgggcaagctgctcttcatcacagagatccctgagctgatcctggaggaccccagcgaggccaaggagaacctgatcctgcaggagaccagcgtcatcgagagcctggccgcagatggcagccctggcctgaagtctgtgctgagcaccagcaggaacctgagcaacaactgtgacacaggagagaagcctgtggtgaccttcaaggagaacatcaagacccgggaggtgaacagagaccagggccgctccttcccccccaaggaggtgaagagccagacagagctgaggaagacccctgtgtctgaggccaggaagacccctgtgacccagacccccacccaggccagcaacagccagttcatccccatccaccaccctggggccttcccccccctgcccagccggcccggcttccccccacccacctacgtgatccccccacctgtggccttctccatgggcagcggctacaccttccctgctggggtgtctgtgcccggcaccttcctgcagcccacagcccacagccctgctggcaaccaggtgcaggccggcaagcagagccacatcccctacagccagcagaggcccagcggccctggccccatgaaccagggcccccagcagagccagccccccagccagcagcccctgaccagcctgcctgcccagcccacagcccagagcaccagccagctgcaggtgcaggccctgacccagcagcagcagagccccaccaaggctgtgcctgccctgggcaagagccccccccaccacagcggcttccagcagtaccagcaggctgatgccagcaagcagctgtggaaccccccccaggtgcagggccccctgggcaagatcatgcctgtgaagcagccctactacctgcagacccaggaccccatcaagctgtttgagcccagcctgcagccccctgtgatgcagcagcagcccctggagaagaagatgaagcccttccccatggagccctacaaccacaaccccagcgaggtgaaggtgcctgagttctactgggacagcagctacagcatggctgacaacagatctgtgatggcccagcaggccaacatcgaccggcggggcaagaggagccctggggtcttccggcctgagcaggaccctgtgcccaggatgccctttgaggaccccaagagcagccccctgctgcccccagacctgctgaagagcctggccgccctggaggaggaggaggagctgatcttcagcaaccccccagacctgtacccagccctgctgggccccctggccagcctgcccggccgcagcctcttcaagagcctgctggagaagcccagcgagctgatgagccacagcagcagcttcctgagcctgaccggcttcagcctgaaccaggagcgctaccccaacaacagcatgtttaatgaggtgtatggcaagaacctgaccagcagcagcaaggccgagctgagccccagcatggccccccaggagaccagcctgtacagcctgtttgagggcaccccctggagccccagcctgcctgccagcagtgaccacagcaccccagccagccagagcccccacagcagcaaccccagcagcctgcccagcagcccccccacccacaaccacaacagcgtgcccttcagcaactttggccccatcggcaccccagacaacagagacagaagaacagctgaccgctggaagacagacaagccagccatgggcggcttcggcatcgactacctgagcgccaccagcagcagcgagagctcctggcaccaggccagcacccccagcggcacctggacaggccacggccccagcatggaggacagcagcgctgtgctgatggagagcctgaagaagcagcagcacggcgtgcagcagctgggccccaagaggcagagcgaggaggagggcagcagcagcatctgtgtggcccaccggggcccccggcccctgcccagctgcagcctgcctgccagcaccttccgggtgaagttcaaggccgcccggacctgtgcccaccaggcccagaagaagaccaggagaagacccttctggaagaggaggaagaagggcaagtag

SEQ ID NO: 170029 - DNA, 3276 bp, synthetic construct
  misc_feature 1..3276: note = Description of Artificial Sequence: Synthetic coding sequence
  source 1..3276: mol_type = other DNA
atgagcctgcagagcgcccagtacctgcggcaggccgaggtgctgaaggctgacatgacagacagcaagctgggccctgctgaggtgtggaccagccggcaggccctgcaggacctgtaccagaagatgctggtgacagacctggagtatgccctggacaagaaggtggagcaggacctgtggaaccacgccttcaagaaccagatcaccaccctgcagggccaggccaagaacagagccaaccccaacagaagtgaggtgcaggccaacctgagcctcttcctggaggccgccagcggcttctacacccagctgctgcaggagctgtgcaccgtcttcaacgtggacctgccctgccgggtgaagagcagccagctgggcatcatcagcaacaagcagacccacaccagcgccatcgtgaagccccagagcagcagctgcagctacatctgccagcactgcctggtgcacctgggggacatcgcccgctacagaaaccagaccagccaggccgagagctactacagacatgctgcccagctggtgcccagcaatggccagccctacaaccagctggccatcctggccagcagcaaaggagaccacctgaccaccatcttctactactgccgcagcattgctgtgaagttccccttccctgctgccagcaccaacctgcagaaggccctgagcaaggccctggagagcagagatgaggtgaagaccaagtggggcgtgtctgacttcatcaaggccttcatcaagttccacggccacgtgtacctgagcaagagcctggagaagctgagccccctgcgggagaagctggaggagcagttcaagaggctgctcttccagaaggccttcaacagccagcagctggtgcacgtgaccgtcatcaacctcttccagctgcaccacctgcgggacttcagcaatgaaacagagcagcacacctacagccaggatgagcagctgtgctggacccagctgctggccctcttcatgtccttcctgggcatcctgtgcaagtgccccctgcagaatgaaagccaggaggagagctacaatgcctaccccctgcctgctgtgaaggtgtccatggactggctgcggctgcggcccagggtcttccaggaggccgtggtggatgagcggcagtacatctggccctggctgatcagcctgctgaacagcttccacccccatgaggaggacctgagcagcatcagcgccacccccctgcctgaggagtttgagctgcagggcttcctggccctgcggcccagcttcaggaacctggacttcagcaagggccaccagggcatcaccggggacaaggagggccagcagaggcgcatccggcagcagaggctcatcagcatcggcaagtggattgctgacaaccagcccaggctcatccagtgtgaaaatgaggtgggcaagctgctcttcatcacagagatccctgagctgatcctggaggaccccagcgaggccaaggagaacctgatcctgcaggagaccagcgtcatcgagagcctggccgcagatggcagccctggcctgaagtctgtgctgagcaccagcaggaacctgagcaacaactgtgacacaggagagaagcctgtggtgaccttcaaggagaacatcaagacccgggaggtgaacagagaccagggccgctccttcccccccaaggaggtgaagagccagacagagctgaggaagacccctgtgtctgaggccaggaagacccctgtgacccagacccccacccaggccagcaacagccagttcatccccatccaccaccctggggccttcccccccctgcccagccggcccggcttccccccacccacctacgtgatccccccacctgtggccttctccatgggcagcggctacaccttccctgctggggtgtctgtgcccggcaccttcctgcagcccacagcccacagccctgctggcaaccaggtgcaggccggcaagcagagccacatcccctacagccagcagaggcccagcggccctggccccatgaaccagggcccccagcagagccagccccccagccagcagcccctgaccagcctgcctgcccagcccacagcccagagcaccagccagctgcaggtgcaggccctgacccagcagcagcagagccccaccaaggctgtgcctgccctgggcaagagccccccccaccacagcggcttccagcagtaccagcaggctgatgccagcaagcagctgtggaaccccccccaggtgcagggccccctgggcaagatcatgcctgtgaagcagccctactacctgcagacccaggaccccatcaagctgtttgagcccagcctgcagccccctgtgatgcagcagcagcccctggagaagaagatgaagcccttccccatggagccctacaaccacaaccccagcgaggtgaaggtgcctgagttctactgggacagcagctacagcatggctgacaacagatctgtgatggcccagcaggccaacatcgaccggcggggcaagaggagccctggggtcttccggcctgagcaggaccctgtgcccaggatgccctttgagaagagcctgctggagaagcccagcgagctgatgagccacagcagcagcttcctgagcctgaccggcttcagcctgaaccaggagcgctaccccaacaacagcatgtttaatgaggtgtatggcaagaacctgaccagcagcagcaaggccgagctgagccccagcatggccccccaggagaccagcctgtacagcctgtttgagggcaccccctggagccccagcctgcctgccagcagtgaccacagcaccccagccagccagagcccccacagcagcaaccccagcagcctgcccagcagcccccccacccacaaccacaacagcgtgcccttcagcaactttggccccatcggcaccccagacaacagagacagaagaacagctgaccgctggaagacagacaagccagccatgggcggcttcggcatcgactacctgagcgccaccagcagcagcgagagctcctggcaccaggccagcacccccagcggcacctggacaggccacggccccagcatggaggacagcagcgctgtgctgatggagagcctgaagagcatctggagcagctccatgatgcaccctggccccagcgccctggagcagctgctgatgcagcagaagcagaagcagcagaggggccagggcaccatgaaccccccccactag

SEQ ID NO: 170030 - DNA, 2976 bp, synthetic construct
  misc_feature 1..2976: note = Description of Artificial Sequence: Synthetic coding sequence
  source 1..2976: mol_type = other DNA
atggccggccctgtgtccctgcgggacctgctgatgggcgccagcgcctggatgggcagcgagagccctgggggcagccccacagagggcggcggcagcgctgctgggggccctgagcccccctggagagaagatgagatctgtgtggtgggcatctttgggaagacagccctgcggctgaacagcgagaagttcagcctggtgaacacagtgtgtgaccggcaggtgttccccctcttccgccaccaggaccccggggaccccggccctggcatcagaacagaggccggggctgtgggggaggccggcggcgctgaggaccccggggctgctgctgggggctctgtgcggggcagcggggctgtggccgagggcaacagaacagaggccggcagccaggactacagcctgctgcaggcctactacagccaggagagcaaggtgctgtacctgctgctgaccagcatctgtgacaacagccagctgctgcgggcctgccgggccctgcagagcggggaggccggcggcggcctgagcctgccccatgctgaggcccacgagttctggaagcaccaggagaagctgcagtgcctgagcctgctgtacctgttctctgtgtgccacatcctgctgctggtgcaccccacctgcagctttgacatcacctatgacagagtcttccgggccctggatggcctgcggcagaaggtgctgcccctgctgaagacagccatcaaggactgccctgtgggcaaggactggaagctgaactgccggccctgccccccccggctgctcttcctgttccagctgaatggagccctgaaggtggagcccccaagaaaccaggaccctgcccacccagacaagcccaagaagcacagccccaagaggcggctgcagcacgccctggaggaccagatctaccgcatcttcaggaagagccgggtgctgaccaaccagagcatcaactgcctcttcaccgtgcctgccaaccaggcctttgtgtacatcgtgcccggcagccaggaggaggaccctgtgggcatgctgctggaccagctgcggagccactgcaccgtgaaggaccctgagagcctgctggtgcctgcccccctgagcggcccccggcgctaccaggtgatgaggcagcacagccggcagcagctgtccttccacatcgacagcagcagcagcagcagcagcggccagctggtggacttcaccctgcgggagttcctgtggcagcacgtggagctggtgctgagcaagaagggctttgatgacagcgtgggcaggaacccccagcccagccactttgagctgcccacctaccagaagtggatctctgctgccagcaagctgtatgaggtggccattgatggcaaggaggaggacctgggcagccccactggagagctgaccagcaagatcctgagcagcatcaaggtgctggagggcttcctggacatcgacaccaagttctctgaaaatcgctgccagaaggccctgcccatggcccacagcgcctaccagagcaacctgccccacaactacaccatgacagtgcacaagaaccagctggcccaggccctgcgggtgtacagccagcacgcccggggccctgccttccacaagtatgccatgcagctgcacgaggactgctacaagttctggagcaatggccaccagctgtgtgaggagaggagcctgacagaccagcactgtgtgcacaagttccacagcctgcccaagagcggggagaagccagaggccgacaggaacccccctgtgctgtaccacaacagccgggcccggagcactggagcctgcaactgtggcaggaagcaggcccccagagatgacccctttgacatcaaggccgccaactatgacttctaccagctgctggaggagaagtgctgcggcaagctggaccacatcaacttccctgtgtttgagcccagcaccccagaccctgccccagccaagaatgaaagcagccctgcccccccagacagtgatgctgacaagctgaaggagaaggagccccagacccagggcgagagcaccagcctgagcctggccctgagcctgggccagagcacagacagcctgggcacctacccagctgacccccaggccggcggggacaaccctgaggtgcacggccaggtggaggtgaagacagagaagaggcccaactttgtggaccggcaggccagcacagtggagtacctgcccggcatgctgcacagcaactgccccaagggcctgctgcccaagttcagctcctggagcctggtgaagctgggccctgccaagagctacaacttccacacaggcctggaccagcagggcttcatccctggcaccaactacctgatgccctgggacatcgtcatccgcaccagggcagaagatgaaggagacctggacaccaacagctggccagcccccaacaaggccatccctgggaagaggtctgctgtggtgatgggccggggcagaagaagagatgacatcgcccgggcctttgtgggctttgaatatgaggacagccggggccgccgcttcatgtgcagcggccctgacaaggtgatgaaggtgatgggcagcggccccaaggagagcgccctgaaggccctgaacagcgacatgcccctgtacatcctgagcagcagccagggccggggcctgaagccccactacgcccagctgatgaggctgtttgtggtggtgcctgatgcccccctgcagatcatcctgatgccccaggtgcagcccggccccccaccctgccctgtgttctacccagagaagcaggagatcaccctgcccccagatggcctgtgggtgctgcgcttcccctatgcctacgtgacagagcggggcccctgcttcccccccaaggaaaatgtgcagctgatgagctacaaggtgctgcggggcgtgctgaaggctgtgacccagtag

SEQ ID NO: 170031 - DNA, 2925 bp, synthetic construct
  misc_feature 1..2925: note = Description of Artificial Sequence: Synthetic coding sequence
  source 1..2925: mol_type = other DNA
atggccggccctgtgtccctgcgggacctgctgatgggcgccagcgcctggatgggcagcgagagccctgggggcagccccacagagggcggcggcagcgctgctgggggccctgagcccccctggagagaagatgagatctgtgtggtgggcatctttgggaagacagccctgcggctgaacagcgagaagttcagcctggtgaacacagtgtgtgaccggcaggtgttccccctcttccgccaccaggaccccggggaccccggccctggcatcagaacagaggccggggctgtgggggaggccggcggcgctgaggaccccggggctgctgctgggggctctgtgcggggcagcggggctgtggccgagggcaacagaacagaggccggcagccaggactacagcctgctgcaggcctactacagccaggagagcaaggtgctgtacctgctgctgaccagcatctgtgacaacagccagctgctgcgggcctgccgggccctgcagagcggggaggccggcggcggcctgagcctgccccatgctgaggcccacgagttctggaagcaccaggagaagctgcagtgcctgagcctgctgtacctgttctctgtgtgccacatcctgctgctggtgcaccccacctgcagctttgacatcacctatgacagagtcttccgggccctggatggcctgcggcagaaggtgctgcccctgctgaagacagccatcaaggactgccctgtgggcaaggactggaagctgaactgccggccctgccccccccggctgctcttcctgttccagctgaatggagccctgaaggtggagcccccaagaaaccaggaccctgcccacccagacaagcccaagaagcacagccccaagaggcggctgcagcacgccctggaggaccagatctaccgcatcttcaggaagagccgggtgctgaccaaccagagcatcaactgcctcttcaccgtgcctgccaaccaggcctttgtgtacatcgtgcccggcagccaggaggaggaccctgtgggcatgctgctggaccagctgcggagccactgcaccgtgaaggaccctgagagcctgctggtgcctgcccccctgagcggcccccggcgctaccaggtgatgaggcagcacagccggcagcagctgtccttccacatcgacagcagcagcagcagcagcagcggccagctggtggacttcaccctgcgggagttcctgtggcagcacgtggagctggtgctgagcaagaagggctttgatgacagcgtgggcaggaacccccagcccagccactttgagctgcccacctaccagaagtggatctctgctgccagcaagctgtatgaggtggccattgatggcaaggaggaggacctgggcagccccactggagagctgaccagcaagatcctgagcagcatcaaggtgctggagggcttcctggacatcgacaccaagttctctgaaaatcgctgccagaaggccctgcccatggcccacagcgcctaccagagcaacctgccccacaactacaccatgacagtgcacaagaaccagctggcccaggccctgcgggtgtacagccagcacgcccggggccctgccttccacaagtatgccatgcagctgcacgaggactgctacaagttctggagcaatggccaccagctgtgtgaggagaggagcctgacagaccagcactgtgtgcacaagttccacagcctgcccaagagcggggagaagccagaggccgacaggaacccccctgtgctgtaccacaacagccgggcccggagcactggagcctgcaactgtggcaggaagcaggcccccagagatgacccctttgacatcaaggccgccaactatgacttctaccagctgctggaggagaagtgctgcggcaagctggaccacatcaacttccctgtgtttgagcccagcaccccagaccctgccccagccaagaatgaaagcagccctgcccccccagacagtgatgctgacaagctgaaggagaaggagccccagacccagggcgagagcaccagcctgagcctggccctgagcctgggccagagcacagacagcctgggcacctacccagctgacccccaggccggcggggacaaccctgaggtgcacggccaggtggaggtgaagacagagaagaggcccaactttgtggaccggcaggccagcacagtggagtacctgcccggcatgctgcacagcaactgccccaagggcctgctgcccaagttcagctcctggagcctggtgaagctgggccctgccaagagctacaacttccacacaggcctggaccagcagggcttcatccctggcaccaactacctgatgccctgggacatcgtcatccgcaccagggcagaagatgaaggagacctggacaccaacagctggccagcccccaacaaggccatccctgggaagaggtctgctgtggtgatgggccggggcagaagaagagatgacatcgcccgggcctttgtgggctttgaatatgaggacagccggggccgccgcttcatgtgcagcggccctgacaaggtgatgaaggtgatgggcagcggccccaaggagagcgccctgaaggccctgaacagcgacatgcccctgtacatcctgagcagcagccagggccggggcctgaagccccactacgcccagctgatgaggctgtttgtggtggtgcctgatgcccccctgcagatcatcctgatgccccaggtgcagcccggccccccaccctgccctgtgttctacccagagaagcaggagatcaccctgcccccagatggcctgtgggtgctgcgcttcccctatgcctacctgcgggaggacctggtgagccccctgaggaagatgtgcagctag

SEQ ID NO: 170032 - DNA, 1563 bp, synthetic construct
  misc_feature 1..1563: note = Description of Artificial Sequence: Synthetic coding sequence
  source 1..1563: mol_type = other DNA
atgtctgagagcggccacagccagcccggcctgtatggcatcgagaggagaagacgctggaaggagcccggcagcggcggcccccagaacctgagcggccctgggggccgggagcgggactacatcgccccctgggagcgggagaggagagatgccagcgaggagaccagcacctctgtgatgcagaagacccccatcatcctgagcaagcccccagctgagaggagcaagcagcccccaccacccacagccccagctgcccccccagccccagcccccctggagaagcccatcgtgctgatgaagccccgggaggagggcaagggccctgtggccgtgactggagccagcaccccagagggcacagcccctcctcctcctgctgccccagccccacccaagggggagaaggagggccagaggcccacccagcctgtgtaccagatccagaacagaggcatgggcacagctgccccagctgccatggaccctgtggtgggccaggccaagctgctgcccccagagaggatgaagcacagcatcaagctggtggatgaccagatgaactggtgtgacagcgccatcgagtacctgctggaccagacagatgtgctggtggtgggcgtgctgggcctgcagggcaccgggaagtccatggtgatgagcctgctgagcgccaacaccccagaggaggaccagaggacctacgtgttccgggcccagagcgctgagatgaaggagcggggcggcaaccagaccagcggcatcgacttcttcatcacccaggagagaattgtgttcctggacacccagcccatcctgagccccagcatcctggaccacctgatcaacaatgacaggaagctgcccccagagtacaacctgccccacacctacgtggagatgcagagcctgcagattgctgccttcctgttcaccgtgtgccacgtggtgattgtggtgcaggactggttcacagacctgagcctgtaccgcttcctgcagacagctgagatggtgaagcccagcacccccagccccagccatgagagcagcagcagcagcggcagtgatgagggcacagagtactacccccacctggtgttcctgcagaacaaggcccggcgggaggacttctgccccaggaagctgcggcagatgcacctgatgattgaccagctgatggcccacagccacctgcgctacaagggcaccctgtccatgctgcagtgcaatgtgtttcctggcctgcccccagacttcctggacagcgaggtgaacctcttcctggtgcccttcatggacagcgaggccgagagtgaaaatccaccccgggccggccctggcagcagccccctcttcagcctgctgcccggctaccggggccaccccagcttccagagcctggtgtccaagctgcggagccaggtgatgtccatggcccggccccagctgagccacaccatcctgacagagaagaactggttccactatgctgcccgcatctgggatggagtgaggaagagcagcgccctggccgagtacagccggctgctggcctag

SEQ ID NO: 170033 - DNA, 2742 bp, synthetic construct
  misc_feature 1..2742: note = Description of Artificial Sequence: Synthetic coding sequence
  source 1..2742: mol_type = other DNA
atggctgatgaggccctggccggcctggatgagggcgccctgaggaagctgctggaggtgacagctgacctggccgagcggcggcgcatccgcagcgccatccgggagctgcagaggcaggagctggagcgggaggaggaggccctggccagcaagcgcttccgggcagagcggcaggacaacaaggagaactggctgcacagccagcagcgggaggccgagcagagagctgccctggcccggctggccggccagctggagagcatgaatgatgtggaggagctgacagccctgctgcggtctgctggggagtatgaggagaggaagctgatccgggccgccatccggcgggtgcgggcccaggagattgaagctgccaccctggccggccgcctgtacagcggccggcccaacagcggcagccgggaggacagcaagggcctggccgcccaccggctggagcagtgtgaggtgcctgagcgggaggagcaggagcagcaggccgaggtgtccaagcccacccccaccccagagggcaccagccaggatgtgaccaccgtgaccctgctgctgcgggcccctcctggcagcaccagcagcagccctgccagccccagcagcagccccaccccagccagccctgagccccccctggagcctgctgaggcccagtgcctgacagctgaggtgcccggcagccctgagcccccacccagcccccccaagaccaccagccctgagccccaggagagccccaccctgcccagcacagagggccaggtggtgaacaagctgctgagcggccccaaggagaccccagctgcccagagccccacccggggccccagcgacaccaagagagcagatgtggccggcccccggccctgccagaggagcctgtctgtgctgagcccccggcagcctgcccagaaccgggagagcacccccctggccagcggccccagcagcttccagagagctggctctgtgcgggacagagtgcacaagttcaccagtgacagccccatggccgcccggctgcaggacggcaccccccaggccgccctgagccccctgcccaggaaggcccctggccccctgccccaccagcaccacccctgcctgctgctgcagaggctgctgctgagcggccctgacaccagcagccgcttcagcaaggagcagaggggcgtggcccagcccctggcccagctgcggagctgcccccaggaggagggcccccggggccggggcctggccgcccggcccctggagaacagagctgggggccctgtggcccggtctgaggagcccggggcccccctgcctgtggccgtgggcacagctgagcccggcggctccatgaagaccaccttcaccatcgagatcaaggatggccggggccaggccagcacaggccgggtgctgctgcccactggaaaccagagagctgagctgaccctgggcctgcgggccccacccaccctgctgagcaccagcagcggcggcaagagcaccatcaccagggtgaacagccctggcaccctggcccggctgggctctgtgacccacgtgaccagcttcagccacgccccacccagcagcagaggaggctgcagcatcaagatggaggccgagcctgctgagcccctggccgctgctgtggaggccgccaatggagctgagcagaccagggtgaacaaggcccctgagggccgcagccccctgtctgctgaggagctgatgaccattgaagatgagggcgtgctggacaagatgctggaccagagcacagactttgaggagaggaagctgatccgggccgccctgcgggagctgcggcagaggaagagggaccagagggacaaggagcgggagcggcggctgcaggaggcccggggccggcctggagagggccggggcaacacagccacagagaccaccaccaggcacagccagagagctgctgatggcagcgctgtgtccacagtgaccaagacagagcggctggtgcacagcaatgatggcaccaggacagcccggaccaccaccgtggagagcagctttgtgagaagaagtgaaaatggaagtggcagcaccatgatgcagaccaagaccttcagcagcagcagcagcagcaagaagatgggcagcatctttgaccgggaggaccaggccagcccccgggccggcagcctggccgccctggagaagaggcaggccgagaagaagaaggagctgatgaaggcccagagcctgcccaagaccagcgccagccaggccaggaaggccatgattgagaagctggagaaggagggcgctgctggcagccctgggggccccagggctgctgtgcagaggagcaccagctttggagtgcccaatgccaacagcatcaagcagatgctgctggactggtgccgggccaagacccggggctatgagcacgtggacatccagaacttcagcagctcctggagcgatggcatggccttctgtgccctggtgcacaacttcttccctgaggcctttgattatggccagctgagcccccagaacagacggcagaactttgaggtggccttcagcagcgctgagacccatgctgactgcccccagctgctggacacagaggacatggtgcggctgcgggagccagactggaagtgtgtgtacacctacatccaggagttctaccgctgcctggtgcagaagggcctggtgaagaccaagaagagctag

SEQ ID NO: 170034 - DNA, 2748 bp, synthetic construct
  misc_feature 1..2748: note = Description of Artificial Sequence: Synthetic coding sequence
  source 1..2748: mol_type = other DNA
atggctgatgaggccctggccggcctggatgagggcgccctgaggaagctgctggaggtgacagctgacctggccgagcggcggcgcatccgcagcgccatccgggagctgcagaggcaggagctggagcgggaggaggaggccctggccagcaagcgcttccgggcagagcggcaggacaacaaggagaactggctgcacagccagcagcgggaggccgagcagagagctgccctggcccggctggccggccagctggagagcatgaatgatgtggaggagctgacagccctgctgcggtctgctggggagtatgaggagaggaagctgatccgggccgccatccggcgggtgcgggcccaggagattgaagctgccaccctggccggccgcctgtacagcggccggcccaacagcggcagccgggaggacagcaagggcctggccgcccaccggctggagcagtgtgaggtgcctgagcgggaggagcaggagcagcaggccgaggtgtccaagcccacccccaccccagagggcaccagccaggatgtgaccaccgtgaccctgctgctgcgggcccctcctggcagcaccagcagcagccctgccagccccagcagcagccccaccccagccagccctgagccccccctggagcctgctgaggcccagtgcctgacagctgaggtgcccggcagccctgagcccccacccagcccccccaagaccaccagccctgagccccaggagagccccaccctgcccagcacagagggccaggtggtgaacaagctgctgagcggccccaaggagaccccagctgcccagagccccacccggggccccagcgacaccaagagagcagatgtggccggcccccggccctgccagaggagcctgtctgtgctgagcccccggcagcctgcccagaaccgggagagcacccccctggccagcggccccagcagcttccagagagctggctctgtgcgggacagagtgcacaagttcaccagtgacagccccatggccgcccggctgcaggacggcaccccccaggccgccctgagccccctgaccccagcccggctgctgggccccagcctgaccagcaccaccccagccagcagcagcagcggcagcagcagccggggccccagcgacaccagcagccgcttcagcaaggagcagaggggcgtggcccagcccctggcccagctgcggagctgcccccaggaggagggcccccggggccggggcctggccgcccggcccctggagaacagagctgggggccctgtggcccggtctgaggagcccggggcccccctgcctgtggccgtgggcacagctgagcccggcggctccatgaagaccaccttcaccatcgagatcaaggatggccggggccaggccagcacaggccgggtgctgctgcccactggaaaccagagagctgagctgaccctgggcctgcgggccccacccaccctgctgagcaccagcagcggcggcaagagcaccatcaccagggtgaacagccctggcaccctggcccggctgggctctgtgacccacgtgaccagcttcagccacgccccacccagcagcagaggaggctgcagcatcaagatggaggccgagcctgctgagcccctggccgctgctgtggaggccgccaatggagctgagcagaccagggtgaacaaggcccctgagggccgcagccccctgtctgctgaggagctgatgaccattgaagatgagggcgtgctggacaagatgctggaccagagcacagactttgaggagaggaagctgatccgggccgccctgcgggagctgcggcagaggaagagggaccagagggacaaggagcgggagcggcggctgcaggaggcccggggccggcctggagagggccggggcaacacagccacagagaccaccaccaggcacagccagagagctgctgatggcagcgctgtgtccacagtgaccaagacagagcggctggtgcacagcaatgatggcaccaggacagcccggaccaccaccgtggagagcagctttgtgagaagaagtgaaaatggaagtggcagcaccatgatgcagaccaagaccttcagcagcagcagcagcagcaagaagatgggcagcatctttgaccgggaggaccaggccagcccccgggccggcagcctggccgccctggagaagaggcaggccgagaagaagaaggagctgatgaaggcccagagcctgcccaagaccagcgccagccaggccaggaaggccatgattgagaagctggagaaggagggcgctgctggcagccctgggggccccagggctgctgtgcagaggagcaccagctttggagtgcccaatgccaacagcatcaagcagatgctgctggactggtgccgggccaagacccggggctatgagcacgtggacatccagaacttcagcagctcctggagcgatggcatggccttctgtgccctggtgcacaacttcttccctgaggcctttgattatggccagctgagcccccagaacagacggcagaactttgaggtggccttcagcagcgctgagacccatgctgactgcccccagctgctggacacagaggacatggtgcggctgcgggagccagactggaagtgtgtgtacacctacatccaggagttctaccgctgcctggtgcagaagggcctggtgaagaccaagaagagctag

SEQ ID NO: 170035 - DNA, 2754 bp, synthetic construct
  misc_feature 1..2754: note = Description of Artificial Sequence: Synthetic coding sequence
  source 1..2754: mol_type = other DNA
atggctgatgaggccctggccggcctggatgagggcgccctgaggaagctgctggaggtgacagctgacctggccgagcggcggcgcatccgcagcgccatccgggagctgcagaggcaggagctggagcgggaggaggaggccctggccagcaagcgcttccgggcagagcggcaggacaacaaggagaactggctgcacagccagcagcgggaggccgagcagagagctgccctggcccggctggccggccagctggagagcatgaatgatgtggaggagctgacagccctgctgcggtctgctggggagtatgaggagaggaagctgatccgggccgccatccggcgggtgcgggcccaggagattgaagctgccaccctggccggccgcctgtacagcggccggcccaacagcggcagccgggaggacagcaagggcctggccgcccaccggctggagcagtgtgaggtgcctgagcgggaggagcaggagcagcaggccgaggtgtccaagcccacccccaccccagagggcaccagccaggatgtgaccaccgtgaccctgctgctgcgggcccctcctggcagcaccagcagcagccctgccagccccagcagcagccccaccccagccagccctgagccccccctggagcctgctgaggcccagtgcctgacagctgaggtgcccggcagccctgagcccccacccagcccccccaagaccaccagccctgagccccaggagagccccaccctgcccagcacagagggccaggtggtgaacaagctgctgagcggccccaaggagaccccagctgcccagagccccacccggggccccagcgacaccaagagagcagatgtggccggcccccggccctgccagaggagcctgtctgtgctgagcccccggcagcctgcccagaaccgggagagcacccccctggccagcggccccagcagcttccagagagctggctctgtgcgggacagagtgcacaagttcaccagtgacagccccatggccgcccggctgcaggacggcaccccccaggccgccctgagccccctgaccccagcccggctgctgggccccagcctgaccagcaccaccccagccagcagcagcagcggcagcagcagccggggccccagcgacaccagcagccgcttcagcaaggagcagaggggcgtggcccagcccctggcccagctgcggagctgcccccaggaggagggcccccggggccggggcctggccgcccggcccctggagaacagagctgggggccctgtggcccggtctgaggagcccggggcccccctgcctgtggccgtgggcacagctgagcccggcggctccatgaagaccaccttcaccatcgagatcaaggatggccggggccaggccagcacaggccgggtgctgctgcccactggaaaccagagagctgagctgaccctgggcctgcgggccccacccaccctgctgagcaccagcagcggcggcaagagcaccatcaccagggtgaacagccctggcaccctggcccggctgggctctgtgacccacgtgaccagcttcagccacgccccacccagcagcagaggaggctgcagcatcaagatggaggccgagcctgctgagcccctggccgctgctgtggaggccgccaatggagctgagcagaccagggtgaacaaggcccctgagggccgcagccccctgtctgctgaggagctgatgaccattgaagatgagggcgtgctggacaagatgctggaccagagcacagactttgaggagaggaagctgatccgggccgccctgcgggagctgcggcagaggaagagggaccagagggacaaggagcgggagcggcggctgcaggaggcccggggccggcctggagagggccggggcaacacagccacagagaccaccaccaggcacagccagagagctgctgatggcagcgctgtgtccacagtgaccaagacagagcggctggtgcacagcaatgatggcaccaggacagcccggaccaccaccgtggagagcagctttgtgagaagaagtgaaaatggaagtggcagcaccatgatgcagaccaagaccttcagcagcagcagcagcagcaagaagatgggcagcatctttgaccgggaggaccaggccagcccccgggccggcagcctggccgccctggagaagaggcaggccgagaagaagaaggagctgatgaaggcccagagcctgcccaagaccagcgccagccaggccaggaaggccatgattgagaagctggagaaggagggcgctgctggcagccctgggggccccagggctgctgtgcagaggagcaccagctttggagtgcccaatgccaacagcatcaagcagatgctgctggactggtgccgggccaagacccggggctatgagcacgtggacatccagaacttcagcagctcctggagcgatggcatggccttctgtgccctggtgcacaacttcttccctgaggcctttgattatggccagctgagcccccagaacagacggcagaactttgaggtggccttcagcagcgctgagatgctggtggactgtgtgcccctggtggaggtggatgacatgatgatcatgggcaagaagccagaccccaagtgtgtgttcacctacgtgcagagcctgtacaaccacctgcggagacatgagctgcggctgcggggcaagaatgtgtag

SEQ ID NO: 170036 - DNA, 888 bp, synthetic construct
  misc_feature 1..888: note = Description of Artificial Sequence: Synthetic coding sequence
  source 1..888: mol_type = other DNA
atggaggccgagcctgctgagcccctggccgctgctgtggaggccgccaatggagctgagcagaccagggtgaacaaggcccctgagggccgcagccccctgtctgctgaggagctgatgaccattgaagatgagggcgtgctggacaagatgctggaccagagcacagactttgaggagaggaagctgatccgggccgccctgcgggagctgcggcagaggaagagagatggcagcggcagcaccatgatgcagaccaagaccttcagcagcagcagcagcagcaagaagatgggcagcatctttgaccgggaggaccaggccagcccccgggccggcagcctggccgccctggagaagaggcaggccgagaagaagaaggagctgatgaaggcccagagcctgcccaagaccagcgccagccaggccaggaaggccatgattgagaagctggagaaggagggcgctgctggcagccctgggggccccagggctgctgtgcagaggagcaccagctttggagtgcccaatgccaacagcatcaagcagatgctgctggactggtgccgggccaagacccggggctatgagcacgtggacatccagaacttcagcagctcctggagcgatggcatggccttctgtgccctggtgcacaacttcttccctgaggcctttgattatggccagctgagcccccagaacagacggcagaactttgaggtggccttcagcagcgctgagacccatgctgactgcccccagctgctggacacagaggacatggtgcggctgcgggagccagactggaagtgtgtgtacacctacatccaggagttctaccgctgcctggtgcagaagggcctggtgaagaccaagaagagctag

SEQ ID NO: 170037 - DNA, 2817 bp, synthetic construct
  misc_feature 1..2817: note = Description of Artificial Sequence: Synthetic coding sequence
  source 1..2817: mol_type = other DNA
atgacctgcctgagccaccccctgcagctggaggtgacagctgacctggccgagcggcggcgcatccgcagcgccatccgggagctgcagaggcaggagctggagcgggaggaggaggccctggccagcaagcgcttccgggcagagcggcaggacaacaaggagaactggctgcacagccagcagcgggaggccgagcagagagctgccctggcccggctggccggccagctggagagcatgaatgatgtggaggagctgacagccctgctgcggtctgctggggagtatgaggagaggaagctgatccgggccgccatccggcgggtgcgggcccaggagattgaagctgccaccctggccggccgcctgtacagcggccggcccaacagcggcagccgggaggacagcaagggcctggccgcccaccggctggagcagtgtgaggtgcctgagcgggaggagcaggagcagcaggccgaggtgtccaagcccacccccaccccagagggcaccagccaggatgtgaccaccgtgaccctgctgctgcgggcccctcctggcagcaccagcagcagccctgccagccccagcagcagccccaccccagccagccctgagccccccctggagcctgctgaggcccagtgcctgacagctgaggtgcccggcagccctgagcccccacccagcccccccaagaccaccagccctgagccccaggagagccccaccctgcccagcacagagggccaggtggtgaacaagctgctgagcggccccaaggagaccccagctgcccagagccccacccggggccccagcgacaccaagagagcagatgtggccggcccccggccctgccagaggagcctgtctgtgctgagcccccggcagcctgcccagaaccgggagagcacccccctggccagcggccccagcagcttccagagagctggctctgtgcgggacagagtgcacaagttcaccagtgacagccccatggccgcccggctgcaggacggcaccccccaggccgccctgagccccctgaccccagcccggctgctgggccccagcctgaccagcaccaccccagccagcagcagcagcggcagcagcagccggggccccagcgacaccagcagccgcttcagcaaggagcagaggggcgtggcccagcccctggcccagctgcggagctgcccccaggaggagggcccccggggccggggcctggccgcccggcccctggagaacagagctgggggccctgtggcccggtctgaggagcccggggcccccctgcctgtggccgtgggcacagctgagcccggcggctccatgaagaccaccttcaccatcgagatcaaggatggccggggccaggccagcacaggccgggtgctgctgcccactggaaaccagagagctgagctgaccctgggcctgcgggccccacccaccctgctgagcaccagcagcggcggcaagagcaccatcaccagggtgaacagccctggcaccctggcccggctgggctctgtgacccacgtgaccagcttcagccacgccccacccagcagcagaggaggctgcagcatcaaggccgcagaagatgctggcacccctgtggcccaccccccagccttcagcaccaggagaagaagcagcacaggcaccaccaggagcaccagcctgatggaggccgagcctgctgagcccctggccgctgctgtggaggccgccaacggggctgagcagaccagggtgaacaaggcccctgagggccgcagccccctgtctgctgaggagctgatgaccattgaagatgaaggagtgctggacaagatgctggaccagagcacagactttgaggagaggaagctgatccgggccgccctgcgggagctgcggcagaggaagagggaccagagggacaaggagcgggagcggcggctgcaggaggcccggggccggcctggagagggccggggcaacacagccacagagaccaccaccaggcacagccagagagctgctgatggcagcgctgtgtccacagtgaccaagacagagcggctggtgcacagcaatgatggcaccaggacagcccggaccaccaccgtggagagcagctttgtgcggcggagtgaaaatggcagcggcagcaccatgatgcagaccaagaccttcagcagcagcagcagcagcaagaagatgggcagcatctttgaccgggaggaccaggccagccccagggctggcagcctggccgccctggagaagaggcaggccgagaagaagaaggagctgatgaaggcccagagcctgcccaagaccagcgccagccaggccaggaaggccatgattgagaagctggagaaggagggcgccgccggcagccctgggggccccagggctgctgtgcagaggagcaccagctttggagtgcccaatgccaacagcatcaagcagatgctgctggactggtgccgggccaagacccggggctatgaacatgtggacatccagaacttcagcagctcctggagcgatggcatggccttctgtgccctggtgcacaacttcttccctgaggcctttgattatggccagctgagcccccagaacagacggcagaactttgaggtggccttcagcagcgctgagacccacgccgactgcccccagctgctggacacagaggacatggtgcggctgcgggagccagactggaagtgtgtgtacacctacatccaggagttctaccgctgcctggtgcagaagggcctggtgaagaccaagaagagctag

SEQ ID NO: 170038 - DNA, 114 bp, synthetic construct
  misc_feature 1..114: note = Description of Artificial Sequence: Synthetic coding sequence
  source 1..114: mol_type = other DNA
atggctgatgaggccctggccggcctggatgagggcgccctgaggaagctgctggaggtgacagctgacctggccgagcggcggcgcatccgcagcgccatccgggagctgtag

SEQ ID NO: 170039 - DNA, 2823 bp, synthetic construct
  misc_feature 1..2823: note = Description of Artificial Sequence: Synthetic coding sequence
  source 1..2823: mol_type = other DNA
atggctgatgaggccctggccggcctggatgagggcgccctgaggaagctgctggaggtgacagctgacctggccgagcggcggcgcatccgcagcgccatccgggagctgcagaggcaggagctggagcgggaggaggaggccctggccagcaagcgcttccgggcagagcggcaggacaacaaggagaactggctgcacagccagcagcgggaggccgagcagagagctgccctggcccggctggccggccagctggagagcatgaatgatgtggaggagctgacagccctgctgcggtctgctggggagtatgaggagaggaagctgatccgggccgccatccggcgggtgcgggcccaggagattgaagctgccaccctggccggccgcctgtacagcggccggcccaacagcggcagccgggaggacagcaagggcctggccgcccaccggctggagcagtgtgaggtgcctgagcgggaggagcaggagcagcaggccgaggtgtccaagcccacccccaccccagagggcaccagccaggatgtgaccaccgtgaccctgctgctgcgggcccctcctggcagcaccagcagcagccctgccagccccagcagcagccccaccccagccagccctgagccccccctggagcctgctgaggcccagtgcctgacagctgaggtgcccggcagccctgagcccccacccagcccccccaagaccaccagccctgagccccaggagagccccaccctgcccagcacagagggccaggtggtgaacaagctgctgagcggccccaaggagaccccagctgcccagagccccacccggggccccagcgacaccaagagagcagatgtggccggcccccggccctgccagaggagcctgtctgtgctgagcccccggcagcctgcccagaaccgggagagcacccccctggccagcggccccagcagcttccagagagctggctctgtgcgggacagagtgcacaagttcaccagtgacagccccatggccgcccggctgcaggacggcaccccccaggccgccctgagccccctgaccccagcccggctgctgggccccagcctgaccagcaccaccccagccagcagcagcagcggcagcagcagccggggccccagcgacaccagcagccgcttcagcaaggagcagaggggcgtggcccagcccctggcccagctgcggagctgcccccaggaggagggcccccggggccggggcctggccgcccggcccctggagaacagagctgggggccctgtggcccggtctgaggagcccggggcccccctgcctgtggccgtgggcacagctgagcccggcggctccatgaagaccaccttcaccatcgagatcaaggatggccggggccaggccagcacaggccgggtgctgctgcccactggaaaccagagagctgagctgaccctgggcctgcgggccccacccaccctgctgagcaccagcagcggcggcaagagcaccatcaccagggtgaacagccctggcaccctggcccggctgggctctgtgacccacgtgaccagcttcagccacgccccacccagcagcagaggaggctgcagcatcaagatggaggccgagcctgctgagcccctggccgctgctgtggaggccgccaatggagctgagcagaccagggtgaacaaggcccctgagggccgcagccccctgtctgctgaggagctgatgaccattgaagatgagggcgtgctggacaagatgctggaccagagcacagactttgaggagaggaagctgatccgggccgccctgcgggagctgcggcagaggaagagggaccagagggacaaggagcgggagcggcggctgcaggaggcccggggccggcctggagagggccggggcaacacagccacagagaccaccaccaggcacagccagagagctgctgatggcagcgctgtgtccacagtgaccaagacagagcggctggtgcacagcaatgatggcaccaggacagcccggaccaccaccgtggagagcagctttgtgagaagaagtgaaaatggaagtggcagcaccatgatgcagaccaagaccttcagcagcagcagcagcagcaagaagatgggcagcatctttgaccgggaggaccaggccagcccccgggccggcagcctggccgccctggagaagaggcaggccgagaagaagaaggagctgatgaaggcccagagcctgcccaagaccagcgccagccaggccaggaaggccatgattgagaagctggagaaggagggcgctgctggcagccctgggggccccagggctgctgtgcagaggagcaccagctttggagtgcccaatgccaacagcatcaagcagatgctgctggactggtgccgggccaagacccggggctatgagcacgtggacatccagaacttcagcagctcctggagcgatggcatggccttctgtgccctggtgcacaacttcttccctgaggcctttgattatggccagctgagcccccagaacagacggcagaactttgaggtggccttcagcagcgctgagacccatgctgactgcccccagctgctggacacagaggacatggtgcggctgcgggagccagactggaagatgctggtggactgtgtgcccctggtggaggtggatgacatgatgatcatgggcaagaagccagaccccaagtgtgtgttcacctacgtgcagagcctgtacaaccacctgcggagacatgagctgcggctgcggggcaagaatgtgtag

SEQ ID NO: 170040 - DNA, 1374 bp, synthetic construct
  misc_feature 1..1374: note = Description of Artificial Sequence: Synthetic coding sequence
  source 1..1374: mol_type = other DNA
atggagcagaaggagggcaagctgtctgaagatggcaccaccgtgtccccagctgctgacaaccctgagatgtctgggggcggggccccagctgaggagaccaagggcacagctgggaaggccatcaatgaaggccccccaacagagagcggcaagcaggagaaggccccagcagaagatggcatgtctgctgagctgcagggcgaggccaacggcctggatgaggtgaaggtggagagccagcgggaggccggcggcaaggaggatgctgaggccgagctgaagaaggaggatggagagaaggaggagaccaccgtgggcagccaggagatgacaggcaggaaggaggagaccaagtctgagcccaaggaggccgaggagaaggagagcaccctggccagcgagaagcagaaggccgaggagaaggaggccaagccagagagcggccagaaggcagatgccaatgaccgggacaagccagagcccaaggccaccgtggaggaggaggatgccaagacagccagccaggaggagaccgtggtggaggatgaggccaaggccgagcccaaggagccagatggcaaggaggaggccaagcacggggccaaggaggaggctgatgagcccggcagccccagcgaggagcaggagcaggatgtggagaaggagcctgagggcggggccggggtcatccccagcagccctgaggagtggccagagagccccactggagagggccacaacctgagcacagatggcctgggccctgactgtgtggccagcggccagaccagccccagcgccagcgagagcagccccagtgatgtgccccagagccccccagagagccccagcagcggggagaagaaggagaaggcccctgagcggcgggtgtctgccccagcccggccccggggcccccgggcccagaacaggaaggccatcgtggacaagtttggaggagctgccagcggccccacagccctcttcaggaacaccaaggccgccggggccgccatcggcggcgtgaagaacatgctgctggagtggtgccgggccatgaccaagaagtatgagcacgtggacatccagaacttcagcagctcctggagcagcggcatggccttctgtgccctgatccacaagttcttcccagatgcctttgattatgcagagctggaccctgccaagaggaggcacaacttcaccctggccttcagcacagctgagaagctggccgactgtgcccagctgctggatgtggatgacatggtgcggctggccgtgcctgacagcaaatgtgtgtacacctacatccaggagctgtaccgcagcctggtgcagaagggcctggtgaagaccaagaagaagtag

SEQ ID NO: 170041 - DNA, 1539 bp, synthetic construct
  misc_feature 1..1539: note = Description of Artificial Sequence: Synthetic coding sequence
  source 1..1539: mol_type = other DNA
atgctgcctggagctgtgggggagagtgactgcagcgctgaggcccgggagaagatggagcagaaggagggcaagctgtctgaagatggcaccaccgtgtccccagctgctgacaaccctgagatgtctgggggcggggccccagctgaggagaccaagggcacagctgggaaggccatcaatgaaggccccccaacagagagcggcaagcaggagaaggccccagcagaagatggcatgtctgctgagctgcagggcgaggccaacggcctggatgaggtgaaggtggagagccagcgggaggccggcggcaaggaggatgctgaggccgagctgaagaaggaggatggagagaaggaggagaccaccgtgggcagccaggagatgacaggcaggaaggaggagaccaagtctgagcccaaggaggccgaggagaaggagagcaccctggccagcgagaagcagaaggccgaggagaaggaggccaagccagagagcggccagaaggcagatgccaatgaccgggacaagccagagcccaaggccaccgtggaggaggaggatgccaagacagccagccaggaggagaccggccagaggaaggagtgcagcacagagcccaaggagaaggccacagatgaggaggccaaggccgagagccagaaggctgtggtggaggatgaggccaaggccgagcccaaggagccagatggcaaggaggaggccaagcacggggccaaggaggaggctgatgccaaggaggaggctgaagatgctgaggaggccgagcccggcagccccagcgaggagcaggagcaggatgtggagaaggagcctgagggcggggccggggtcatccccagcagccctgaggagtggccagagagccccaccggggagggccacaacctgagcacagatggcctgggccctgactgtgtggccagcggccagaccagccccagcgccagcgagagcagccccagtgatgtgccccagagccccccagagagccccagcagtggagagaagaaggagaaggcccctgagaggagagtgtctgccccagcccggccccggggcccccgggcccagaacaggaaggccatcgtggacaagtttggaggagctgccagcggccccacagccctcttcaggaacaccaaggctgctggagctgccatcggcggcgtgaagaacatgctgctggagtggtgccgggccatgaccaagaagtatgaacatgtggacatccagaacttcagcagctcctggagcagcggcatggccttctgtgccctgatccacaagttcttcccagatgcctttgattatgcagagctggaccctgccaagagaagacacaacttcaccctggccttcagcacagctgagaagctggccgactgtgcccagctgctggatgtggatgacatggtgcggctggccgtgcctgacagcaaatgtgtgtacacctacatccaggagctgtaccgcagcctggtgcagaagggcctggtgaagaccaagaagaagtag

SEQ ID NO: 170042 - DNA, 1485 bp, synthetic construct
  misc_feature 1..1485: note = Description of Artificial Sequence: Synthetic coding sequence
  source 1..1485: mol_type = other DNA
atggagcagaaggagggcaagctgtctgaagatggcaccaccgtgtccccagctgctgacaaccctgagatgtctgggggcggggccccagctgaggagaccaagggcacagctgggaaggccatcaatgaaggccccccaacagagagcggcaagcaggagaaggccccagcagaagatggcatgtctgctgagctgcagggcgaggccaacggcctggatgaggtgaaggtggagagccagcgggaggccggcggcaaggaggatgctgaggccgagctgaagaaggaggatggagagaaggaggagaccaccgtgggcagccaggagatgacaggcaggaaggaggagaccaagtctgagcccaaggaggccgaggagaaggagagcaccctggccagcgagaagcagaaggccgaggagaaggaggccaagccagagagcggccagaaggcagatgccaatgaccgggacaagccagagcccaaggccaccgtggaggaggaggatgccaagacagccagccaggaggagaccggccagaggaaggagtgcagcacagagcccaaggagaaggccacagatgaggaggccaaggccgagagccagaaggctgtggtggaggatgaggccaaggccgagcccaaggagccagatggcaaggaggaggccaagcacggggccaaggaggaggctgatgccaaggaggaggctgaagatgctgaggaggccgagcccggcagccccagcgaggagcaggagcaggatgtggagaaggagcctgagggcggggccggggtcatccccagcagccctgaggagtggccagagagccccaccggggagggccacaacctgagcacagatggcctgggccctgactgtgtggccagcggccagaccagccccagcgccagcgagagcagccccagtgatgtgccccagagccccccagagagccccagcagtggagagaagaaggagaaggcccctgagaggagagtgtctgccccagcccggccccggggcccccgggcccagaacaggaaggccatcgtggacaagtttggaggagctgccagcggccccacagccctcttcaggaacaccaaggctgctggagctgccatcggcggcgtgaagaacatgctgctggagtggtgccgggccatgaccaagaagtatgaacatgtggacatccagaacttcagcagctcctggagcagcggcatggccttctgtgccctgatccacaagttcttcccagatgcctttgattatgcagagctggaccctgccaagagaagacacaacttcaccctggccttcagcacagctgagaagctggccgactgtgcccagctgctggatgtggatgacatggtgcggctggccgtgcctgacagcaaatgtgtgtacacctacatccaggagctgtaccgcagcctggtgcagaagggcctggtgaagaccaagaagaagtag

SEQ ID NO: 170043 - DNA, 312 bp, synthetic construct
  misc_feature 1..312: note = Description of Artificial Sequence: Synthetic coding sequence
  source 1..312: mol_type = other DNA
atgtctgaggagaagcccaaggagggcgtgaagacagaaaatgaccacatcaacctgaaggtggccggccaggacggctctgtggtgcagttcaagatcaagaggcacacccccctgagcaagctgatgaaggcctactgtgagcggcagggcctgtccatgaggcagatccgcttccgctttgatggccagcccatcaatgaaacagacaccccagcccagctggagatggaggatgaggacaccattgatgtgttccagcagcagacaggaggagtgcctgagagcagcctggccggccacagcttctag

SEQ ID NO: 170044 - DNA, 426 bp, synthetic construct
  misc_feature 1..426: note = Description of Artificial Sequence: Synthetic coding sequence
  source 1..426: mol_type = other DNA
atgtctgaggagaagcccaaggagggcgtgaagacagaaaatgaccacatcaacctgaaggtggccggccaggacggctctgtggtgcagttcaagatcaagaggcacacccccctgagcaagctgatgaaggcctactgtgagcggcaggtgcgccacctggccccaccccagagcctgcctgtgtgtgccctggtgctgtgtgtgcccggcatcccccgggcccgggccagccggggctggacccagatgcagctgcctgagggcctgtccatgaggcagatccgcttccgctttgatggccagcccatcaatgaaacagacaccccagcccagctggagatggaggatgaggacaccattgatgtgttccagcagcagacaggaggagtgcctgagagcagcctggccggccacagcttctag

SEQ ID NO: 170045 - DNA, 288 bp, synthetic construct
  misc_feature 1..288: note = Description of Artificial Sequence: Synthetic coding sequence
  source 1..288: mol_type = other DNA
atggccaatgagaagcccacagaggaggtgaagacagagaacaacaaccacatcaacctgaaggtggccggccaggacggctctgtggtgcagttcaagatcaagaggcagacccccctgagcaagctgatgaaggcctactgtgagccccggggcctgtctgtgaagcagatccgcttccgctttggaggccagcccatcagcggcacagacaagccagcccagctggagatggaggatgaggacaccattgatgtgttccagcagcccactggaggagtgtactag

SEQ ID NO: 170046 - DNA, 411 bp, synthetic construct
  misc_feature 1..411: note = Description of Artificial Sequence: Synthetic coding sequence
  source 1..411: mol_type = other DNA
atggccggggccggcagcgctgctgtgtctggggccggcacccctgtggccggccccaccggccgggacctgtttgctgagggcctgctggagttcctgcggcctgctgtgcagcagctggacagccacgtgcatgctgtgcgggagagccaggtggagctgcgggagcagattgacaacctggccacagagctgtgccgcatcaatgaagaccagaaggtggccctggacctggacccctacgtgaagaagctgctgaatgcccggcggcgggtggtgctggtgaacaacatcctgcagaatgcccaggagcggctgcggcggctgaaccacagcgtggccaaggagacagcccggcggcgggccatgctggacagcggcatctacccacctggcagccctgggaagtag

SEQ ID NO: 170047 - DNA, 2298 bp, synthetic construct
  misc_feature 1..2298: note = Description of Artificial Sequence: Synthetic coding sequence
  source 1..2298: mol_type = other DNA
atggccggcttcaagaggggctatgatggcaagattgctggcctgtatgacctggacaagaccctgggccggggccactttgctgtggtgaagctggcccggcacgtgttcaccggggagaaggtggccgtgaaggtgattgacaagaccaagctggacaccctggccaccggccacctgttccaggaggtgcgctgcatgaagctggtgcagcaccccaacatcgtgcggctgtatgaagtcatcgacacccagaccaagctgtacctgatcctggagctgggagatggaggagacatgtttgactacatcatgaagcatgaggagggcctgaatgaagacctggccaagaagtactttgcccagatcgtgcacgccatctcctactgccacaagctgcacgtggtgcaccgggacctgaagccagaaaatgtggtgttctttgagaagcagggcctggtgaagctgacagactttggcttcagcaacaagttccagcccgggaagaagctgaccaccagctgtggcagcctggcctacagcgcccctgagatcctgctgggagatgaatatgatgccccagctgtggacatctggagcctgggcgtcatcctcttcatgctggtgtgtggccagccccccttccaggaggccaatgattctgagaccctgaccatgatcatggactgcaagtacacagtgcccagccacgtgtccaaagaatgcaaggacctgatcaccaggatgctgcagagggaccccaagaggcgggccagcctggaggagattgagaaccacccctggctgcagggcgtggaccccagccctgccaccaagtacaacatccccctggtgtcctacaagaacctgtctgaggaggagcacaacagcatcatccagaggatggtgctgggggacattgctgacagagatgccatcgtggaggccctggagaccaaccgctacaaccacatcacagccacctacttcctgctggccgagcgcatcctgcgggagaagcaggagaaggagatccagaccaggtctgccagccccagcaacatcaaggcccagttccggcagagctggcccaccaagattgatgtgccccaggacctggaggatgacctgacagccacccccctgagccacgccaccgtgccccagagccctgcccgggctgctgacagcgtgctgaatggccacaggagcaagggcctgtgtgacagcgccaagaaggatgacctgcctgagctggccggccctgccctgagcacagtgcccccagccagcctgaagcccacagccagcggcaggaagtgcctcttccgggtggaggaggatgaggaggaggatgaggaggacaagaagcccatgagcctgagcacccaggtggtgctgcggaggaagcccagcgtgaccaaccggctgaccagcaggaagagcgcccctgtgctgaaccagatctttgaggagggggagagtgatgatgaatttgacatggatgagaacctgccccccaagctgagccggctgaagatgaacatcgccagccctggcaccgtgcacaagcgctaccacaggaggaagagccagggccggggcagcagctgcagcagcagcgagaccagtgatgatgacagcgagagcagaagaaggctggacaaggacagcggcttcacctacagctggcaccggcgggacagcagcgagggccccccaggctctgaaggagatggcggcggccagagcaagcccagcaatgccagcggcggcgtggacaaggccagccccagcgagaacaatgccggcggcggcagccccagcagcggcagcggcggcaaccccaccaacaccagcggcaccacccggcgctgtgccggccccagcaacagcatgcagctggccagccgctctgctggggagctggtggagagcctgaagctgatgagcctgtgcctgggcagccagctgcacggcagcaccaagtacatcatcgacccccagaatggcctgtccttcagctctgtgaaggtgcaggagaagagcacctggaagatgtgcatcagcagcactggaaatgccggccaggtgcctgctgtgggcggcatcaagttcttcagtgaccacatggctgacaccaccacagagctggagcgcatcaagagcaagaacctgaagaacaacgtgctgcagctgcccctgtgtgagaagaccatctctgtgaacatccagaggaaccccaaggagggcctgctgtgtgccagcagccctgccagctgctgccacgtgatctag

SEQ ID NO: 170048 - DNA, 2298 bp, synthetic construct; identical to SEQ ID NO: 170047
  misc_feature 1..2298: note = Description of Artificial Sequence: Synthetic coding sequence
  source 1..2298: mol_type = other DNA

SEQ ID NO: 170049 - DNA, 2298 bp, synthetic construct; identical to SEQ ID NO: 170047
  misc_feature 1..2298: note = Description of Artificial Sequence: Synthetic coding sequence
  source 1..2298: mol_type = other DNA

SEQ ID NO: 170050 - DNA, 9693 bp, synthetic construct
  misc_feature 1..9693: note = Description of Artificial Sequence: Synthetic coding sequence
  source 1..9693: mol_type = other DNA
atgcagagcagccccagccctgcccacccccagctgcctgtgctgcagacccagatggtgtctgatggcatgacaggcagcaaccctgtgtccccagccagcagcagcagccctgccagcagtggagctgggggcatcagcccccagcacatcgcccaggacagcagcctggatggccccccaggccccccagatggagccaccgtgcccctggagggcttcagcctgagccaggccgctgacctggccaacaagggccccaagtgggagaagagccacgccgagattgctgagcaggccaagcatgaggccgagattgagaccagaattgctgagctgaggaaggagggcttctggagcctgaagaggctgcccaaggtgcctgagcccccccggcccaagggccactgggactacctgtgtgaggagatgcagtggctgtctgctgactttgcccaggagcggcgctggaagaggggcgtggccaggaaggtggtgaggatggtgatccgccaccacgaggagcagaggcagaaggaggagcgggcccggcgggaggagcaggccaagctgcggcgcatcgccagcaccatggccaaggatgtgcggcagttctggagcaatgtggagaaggtggtgcagttcaagcagcagagccggctggaggagaagaggaagaaggccctggacctgcacctggacttcatcgtgggccagacagagaagtacagcgacctgctgagccagagcctgaaccagcccctgaccagcagcaaggccggcagcagcccctgcctgggcagcagcagcgctgccagcagccccccacctccagccagccggctggatgatgaagatggagacttccagccccaggaggatgaggaggaggatgatgaggagaccatcgaggtggaggagcagcaggagggcaatgatgctgaggcccagaggcgggagattgagctgctgcggcgggagggggagctgcccctggaggagctgctgcggagcctgcccccccagctgctggagggccccagcagccccagccagacccccagcagccatgacagcgacaccagagatggccctgaggagggcgctgaggaggagcccccccaggtgctggagatcaagcccccacccagcgctgtgacccagaggaacaagcagccctggcacccagatgaagatgatgaggagttcaccgccaatgaggaggaggctgaagatgaggaggacaccatcgctgctgaggagcagctggagggggaggtggaccacgccatggagctgtctgagctggcccgggagggggagctgtccatggaggagctgctgcagcagtatgctggggcctatgcccctggcagcggcagcagtgaagatgaagatgaagatgaggtggatgccaacagcagtgactgtgagcctgagggccctgtggaggccgaggagcccccccaggaggacagcagcagccagagcgacagcgtggaggacagaagtgaagatgaggaggatgagcacagcgaggaggaggagaccagcggcagcagcgccagcgaggagagcgagagcgaggagagtgaagatgcccagagccagagccaggctgatgaggaggaggaggatgatgactttggagtggagtacctgctggccagagatgaggagcagagcgaggctgatgctggcagcggcccccccaccccaggccccaccaccctgggccccaagaaggagatcacagacattgctgctgctgctgagagcctgcagcccaagggctacaccctggccaccacccaggtgaagacccccatccccctgctgctgcggggccagctgcgggagtaccagcacatcggcctggactggctggtgaccatgtatgagaagaagctgaatggcatcctggctgatgagatgggcctgggcaagaccatccagaccatcagcctgctggcccacctggcctgtgagaagggcaactggggcccccacctgatcatcgtgcccacctctgtgatgctgaactgggagatggagctgaagcgctggtgccccagcttcaagatcctgacctactatggagcccagaaggagaggaagctgaagaggcagggctggaccaagcccaatgccttccacgtgtgcatcaccagctacaagctggtgctgcaggaccaccaggccttccggaggaagaactggagatacctgatcctggatgaggcccagaacatcaagaacttcaagagccagcgctggcagagcctgctgaacttcaacagccagaggcggctgctgctgaccggcacccccctgcagaacagcctgatggagctgtggagcctgatgcacttcctgatgcctcatgtgttccagagccaccgggagttcaaggagtggttcagcaaccccctgaccggcatgattgagggcagccaggagtacaatgaaggcctggtgaagaggctgcacaaggtgctgcggcccttcctgctgcggcgggtgaaggtggatgtggagaagcagatgcccaagaagtatgaacatgtgatccgctgccgcctgagcaagaggcagcgctgcctgtatgatgacttcatggcccagaccaccaccaaggagaccctggccaccggccacttcatgtctgtcatcaacatcctgatgcagctgaggaaggtgtgcaaccaccccaacctgtttgaccccaggcctgtgaccagccccttcatcaccccaggcatctgcttcagcacagccagcctggtgctgcgggccacagatgtgcaccccctgcagagaattgacatgggccgctttgacctgattggcctggagggccgggtgagccgctatgaggccgacaccttcctgcccaggcaccggctgagcagaagagtgctgctggaggtggccacagccccagaccccccaccccggcccaagcctgtgaagatgaaggtgaacaggatgctgcagcctgtgcccaagcaggagggccgcacagtggtggtggtgaacaacccccgggcccccctgggccctgtgcctgtgcggcccccacctggccctgagctgagcgcccagcccaccccaggccctgtgccccaggtgctgcctgccagcctgatggtgtctgccagccctgctggccccccactcatcccagccagccggcccccaggccctgtgctgctgccccccctgcagcccaacagcggcagcctgccccaggtgctgcccagccccctgggcgtgctgagcggcaccagcaggcctcccacccccaccctgagcctgaagcccaccccaccagcccctgtgcggctgagccctgcccctcctcctggcagcagcagcctgctgaagcccctgactgtgcccccaggctacaccttccccccagctgctgccaccaccaccagcaccaccacagccacagccaccaccacagctgtgcctgcccccaccccagccccccagaggctcatcctgagcccagacatgcaggcccggctgcccagcggggaggtggtgtccatcggccagctggccagcctggcccagaggcctgtggccaatgccggcggcagcaagcccctgaccttccagatccagggcaacaagctgaccctgactggagcccaggtgcggcagctggccgtgggccagccccggcccctgcagagaaatgtggtgcacctggtgtctgctgggggccagcaccacctgatcagccagcctgcccacgtggccctgatccaggccgtggcccccaccccaggccccacccctgtgtctgtgctgcccagcagcacccccagcaccaccccagcccccaccggcctgagcctgcccctggccgccaaccaggtgccccccaccatggtgaacaacacaggagtggtgaagatcgtggtgcggcaggcccccagagatggcctgacccctgtgccccccctggccccagcccccaggcctcccagcagcggcctgcctgctgtgctgaacccccggcccaccctgaccccaggccgcctgcccacccccaccctgggcacagcccgggcccccatgcccacccccaccctggtgcggcccctgctgaagctggtgcacagccccagccctgaggtgtctgccagcgcccctggggccgcccccctgaccatcagcagccccctgcacgtgcccagcagcctgcccggccctgccagcagccccatgcccatccccaacagcagccccctggccagccctgtgagcagcacagtgtctgtgcccctgagcagcagcctgcccatctctgtgcccaccaccctgcctgccccagccagcgcccccctgaccatccccatcagcgcccccctgactgtgtctgccagcggccctgccctgctgacctctgtgaccccacccctggcccctgtggtgcctgctgcccctggcccccccagcctggcccccagcggggccagccccagcgccagcgccctgaccctgggcctggccacagcccccagcctgagcagcagccagaccccaggccaccccctgctgctggcccccaccagcagccacgtgcccggcctgaacagcacagtggccccagcctgcagccctgtgctggtgcctgccagcgccctggccagccccttccccagcgcccccaacccagccccagcccaggccagcctgctggccccagccagcagcgccagccaggccctggccacccccctggcccccatggccgccccccagacagccatcctggcccccagccctgccccacccctggcccccctgcctgtgctggcccccagccctggggccgcccctgtgctggccagcagccagacccctgtgcctgtgatggcccccagcagcaccccaggcaccagcctggccagcgccagccctgtgcctgcccccacccctgtgctggcccccagcagcacccagaccatgctgcctgcccctgtgcccagccccctgcccagccctgccagcacccagaccctggccctggccccagccctggcccccaccctgggcggcagcagccccagccagaccctgagcctgggcaccggcaacccccagggccccttccccacccagaccctgagcctgaccccagccagcagcctggtgcccaccccagcccagaccctgagcctggcccctggcccccccctgggccccacccagaccctgagcctggccccagccccacccctggccccagccagccctgtgggccctgccccagcccacaccctgaccctggccccagccagcagcagcgccagcctgctggccccagcctctgtgcagaccctgaccctgagccctgcccctgtgcccaccctgggccctgctgctgcccagaccctggccctggccccagccagcacccagagccctgccagccaggccagcagcctggtggtgtctgccagcggggccgcccccctgcctgtgaccatggtgtcccggctgcctgtgtccaaggatgagccagacaccctgaccctgcggagcggcccccccagcccccccagcacagccaccagctttggaggcccccggccccggcggcagcccccacctccacccaggagccccttctacctggacagcctggaggagaagaggaagaggcagaggtctgagcggctggagcgcatcttccagctgtctgaggcccatggagccctggcccctgtgtatggaacagaggtgctggacttctgcaccctgccccagcctgtggccagccccatcggccccaggagccctggccccagccaccccaccttctggacctacacagaggccgcccacagagctgtgctcttcccccagcagaggctggaccagctgtctgagatcatcgagcgcttcatctttgtgatgcctcctgtggaggcccccccacccagcctgcacgcctgccaccccccaccctggctggccccccggcaggccgccttccaggagcagctggccagcgagctgtggccccgggcccggcccctgcaccgcatcgtgtgcaacatgaggacccagttcccagacctgcggctcatccagtatgactgtgggaagctgcagaccctggccgtgctgctgcggcagctgaaggccgagggccaccgggtgctgatcttcacccagatgaccaggatgctggatgtgctggagcagttcctgacctaccacggccacctgtacctgcggctggatggcagcaccagggtggagcagaggcaggccctgatggagcgcttcaatgctgacaagaggatcttctgcttcatcctgagcaccaggtctgggggcgtgggcgtgaacctgaccggggctgacacagtggtgttctatgacagcgactggaaccccaccatggatgcccaggcccaggaccgctgccacagaattggccagaccagagatgtgcacatctaccgcctcatcagcgagaggacagtggaggagaacatcctgaagaaggccaaccagaagaggatgctgggggacatggccattgaaggaggcaacttcaccacagcctacttcaagcagcagaccatccgggagctgtttgacatgcccctggaggagcccagcagcagctctgtgcccagcgcccctgaggaggaggaggagaccgtggccagcaagcagacccacatcctggagcaggccctgtgcagagcagaagatgaggaggacatccgggccgccacccaggccaaggccgagcaggtggccgagctggccgagttcaatgaaaatgatggcttccctgctggggagggggaggaggccggccggcctggagcagaagatgaggagatgagcagagctgagcaggagattgctgccctggtggagcagctgacccccatcgagagatatgccatgaagttcctggaggccagcctggaggaggtgtcccgggaggagctgaagcaggccgaggagcaggtggaggccgccaggaaggacctggaccaggccaaggaggaggtgttccggctgccccaggaggaggaggagggccctggagctggagatgagagcagctgtggcaccggcggcggcacccaccggcgcagcaagaaggccaaggcccctgagaggcctggcaccagggtgtctgagcggctgcggggggcccgggcagagacccagggcgccaaccacacccctgtgatcagcgcccaccagaccaggagcaccaccaccccaccccgctgcagccctgcccgggagcgggtgcccaggcctgccccccggccccggcccaccccagccagcgccccagctgccatcccagccctggtgcctgtgcctgtgtctgcccctgtgcccatcagcgcccccaaccccatcaccatcctgcctgtgcacatcctgcccagccccccaccacccagccagatccccccctgcagcagccctgcctgcaccccacctccagcctgcaccccacctccagcccacaccccacctccagcccagacctgcctggtgacccccagcagccccctgctgctgggccccccatctgtgcccatcagcgcctctgtgaccaacctgcccctgggcctgcggcctgaggccgagctgtgtgcccaggccctggccagccctgagagcctggagctggcctctgtggccagcagcgagaccagcagcctgagcctggtgccccccaaggacctgctgcctgtggccgtggagatcctgcctgtgtctgagaagaacctgagcctgaccccatctgcccccagcctgaccctggaggccggcagcatccccaacggccaggagcaggaggccccagattctgctgagggcaccaccctgactgtgctgcctgagggggaggagctgcccctgtgtgtgtctgagagcaatggcctggagctgcccccatctgctgccagtgatgagcccctgcaggagcccctggaggccgacaggaccagcgaggagctgacagaggccaagacccccaccagcagccctgagaagccccaggagctggtgacagctgaggtggccgcccccagcaccagcagcagcgccaccagcagccctgagggccccagccctgcccggcccccaagaagaaggaccagcgcagatgtggagatccggggccagggcaccggccggcccggccagcccccaggccccaaggtgctgaggaagctgcccggccgcctggtgacagtggtggaggagaaggagctggtgagaagaagacggcagcagagaggagctgccagcaccctggtgcctggggtgtctgagaccagcgccagccctggcagccccagcgtgcgctccatgagcggccctgagagcagcccccccatcggcggcccctgtgaggccgcccccagcagcagcctgcccaccccaccccagcagcccttcatcgcccggcggcacatcgagctgggcgtgactggaggcggcagcccagaaaatggagatggagccctgctggccatcaccccacctgctgtgaagagaagaagaggccggccccccaagaagaacagaagccctgcagatgctggccggggcgtggatgaggcccccagcagcaccctgaagggcaagaccaacggggctgaccctgtgcccggccctgagaccctcatcgtggccgaccctgtgctggagccccagctgatccctggcccccagcccctgggcccccagcctgtgcaccggcccaaccccctgctgagccctgtggagaagagaagaagaggccggccccccaaggcccgggacctgcccatccctggcaccatcagcagcgctggagatggcaacagcgagagcaggacccagcccccaccccaccccagccccctgacccccctgccccccctgctggtgtgccccacagccaccgtggccaacacagtgaccaccgtgaccatcagcaccagcccccccaagaggaagaggggccggccccccaagaacccccccagcccccggcccagccagctgcctgtgctggaccgggacagcacctctgtgctggagagctgtggcctgggcagaagacggcagccccagggccagggcgagagcgagggcagcagcagtgatgaagatggcagccggcccctgacccggctggcccggctgcggctggaggccgagggcatgaggggcaggaagagcggcggctccatggtggtggccgtcatccaggatgacctggacctggccgacagcggccctgggggcctggagctgaccccacctgtggtgtccctgacccccaagctgcggagcacccggctgcggcccggcagcctggtgccccccctggagacagagaagctgcccaggaagagagctggggcccctgtgggcggcagccctggcctggccaagaggggccgcctgcagccccccagccccctgggccctgagggctctgtggaggagagcgaggccgaggccagcggggaggaggaggagggagatggcacccccaggagaagacctggcccccggcggctggtgggcaccaccaaccagggcgaccagaggatcctgcggagcagcgccccacccagcctggccggccctgctgtgagccaccggggcaggaaggccaagacctag

SEQ ID NO: 170051 - DNA, 9219 bp, synthetic construct
  misc_feature 1..9219: note = Description of Artificial Sequence: Synthetic coding sequence
  source 1..9219: mol_type = other DNA
atgcagagcagccccagccctgcccacccccagctgcctgtgctgcagacccagatggtgtctgatggcatgacaggcagcaaccctgtgtccccagccagcagcagcagccctgccagcagtggagctgggggcatcagcccccagcacatcgcccaggacagcagcctggatggccccccaggccccccagatggagccaccgtgcccctggagggcttcagcctgagccaggccgctgacctggccaacaagggccccaagtgggagaagagccacgccgagattgctgagcaggccaagcatgaggccgagattgagaccagaattgctgagctgaggaaggagggcttctggagcctgaagaggctgcccaaggtgcctgagcccccccggcccaagggccactgggactacctgtgtgaggagatgcagtggctgtctgctgactttgcccaggagcggcgctggaagaggggcgtggccaggaaggtggtgaggatggtgatccgccaccacgaggagcagaggcagaaggaggagcgggcccggcgggaggagcaggccaagctgcggcgcatcgccagcaccatggccaaggatgtgcggcagttctggagcaatgtggagaaggtggtgcagttcaagcagcagagccggctggaggagaagaggaagaaggccctggacctgcacctggacttcatcgtgggccagacagagaagtacagcgacctgctgagccagagcctgaaccagcccctgaccagcagcaaggccggcagcagcccctgcctgggcagcagcagcgctgccagcagccccccacctccagccagccggctggatgatgaagatggagacttccagccccaggaggatgaggaggaggatgatgaggagaccatcgaggtggaggagcagcaggagggcaatgatgctgaggcccagaggcgggagattgagctgctgcggcgggagggggagctgcccctggaggagctgctgcggagcctgcccccccagctgctggagggccccagcagccccagccagacccccagcagccatgacagcgacaccagagatggccctgaggagggcgctgaggaggagcccccccaggtgctggagatcaagcccccacccagcgctgtgacccagaggaacaagcagccctggcacccagatgaagatgatgaggagttcaccgccaatgaggaggaggctgaagatgaggaggacaccatcgctgctgaggagcagctggagggggaggtggaccacgccatggagctgtctgagctggcccgggagggggagctgtccatggaggagctgctgcagcagtatgctggggcctatgcccctggcagcggcagcagtgaagatgaagatgaagatgaggtggatgccaacagcagtgactgtgagcctgagggccctgtggaggccgaggagcccccccaggaggacagcagcagccagagcgacagcgtggaggacagaagtgaagatgaggaggatgagcacagcgaggaggaggagaccagcggcagcagcgccagcgaggagagcgagagcgaggagagtgaagatgcccagagccagagccaggctgatgaggaggaggaggatgatgactttggagtggagtacctgctggccagagatgaggagcagagcgaggctgatgctggcagcggcccccccaccccaggccccaccaccctgggccccaagaaggagatcacagacattgctgctgctgctgagagcctgcagcccaagggctacaccctggccaccacccaggtgaagacccccatccccctgctgctgcggggccagctgcgggagtaccagcacatcggcctggactggctggtgaccatgtatgagaagaagctgaatggcatcctggctgatgagatgggcctgggcaagaccatccagaccatcagcctgctggcccacctggcctgtgagaagggcaactggggcccccacctgatcatcgtgcccacctctgtgatgctgaactgggagatggagctgaagcgctggtgccccagcttcaagatcctgacctactatggagcccagaaggagaggaagctgaagaggcagggctggaccaagcccaatgccttccacgtgtgcatcaccagctacaagctggtgctgcaggaccaccaggccttccggaggaagaactggagatacctgatcctggatgaggcccagaacatcaagaacttcaagagccagcgctggcagagcctgctgaacttcaacagccagaggcggctgctgctgaccggcacccccctgcagaacagcctgatggagctgtggagcctgatgcacttcctgatgcctcatgtgttccagagccaccgggagttcaaggagtggttcagcaaccccctgaccggcatgattgagggcagccaggagtacaatgaaggcctggtgaagaggctgcacaaggtgctgcggcccttcctgctgcggcgggtgaaggtggatgtggagaagcagatgcccaagaagtatgaacatgtgatccgctgccgcctgagcaagaggcagcgctgcctgtatgatgacttcatggcccagaccaccaccaaggagaccctggccaccggccacttcatgtctgtcatcaacatcctgatgcagctgaggaaggtgtgcaaccaccccaacctgtttgaccccaggcctgtgaccagccccttcatcaccccaggcatctgcttcagcacagccagcctggtgctgcgggccacagatgtgcaccccctgcagagaattgacatgggccgctttgacctgattggcctggagggccgggtgagccgctatgaggccgacaccttcctgcccaggcaccggctgagcagaagagtgctgctggaggtggccacagccccagaccccccaccccggcccaagcctgtgaagatgaaggtgaacaggatgctgcagcctgtgcccaagcaggagggccgcacagtggtggtggtgaacaacccccgggcccccctgggccctgtgcctgtgcggcccccacctggccctgagctgagcgcccagcccaccccaggccctgtgccccaggtgctgcctgccagcctgatggtgtctgccagccctgctggccccccactcatcccagccagccggcccccaggccctgtgctgctgccccccctgcagcccaacagcggcagcctgccccaggccggggaggtggtgtccatcggccagctggccagcctggcccagaggcctgtggccaatgccggcggcagcaagcccctgaccttccagatccagggcaacaagctgaccctgactggagcccaggtgcggcagctggccgtgggccagccccggcccctgcagatgccacccaccatggtgaacaacacaggagtggtgaagatcgtggtgcggcaggcccccagagatggcctgacccctgtgccccccctggccccagcccccaggcctcccagcagcggcctgcctgctgtgctgaacccccggcccaccctgaccccaggccgcctgcccacccccaccctgggcacagcccgggcccccatgcccacccccaccctggtgcggcccctgctgaagctggtgcacagccccagccctgaggtgtctgccagcgcccctggggccgcccccctgaccatcagcagccccctgcacgtgcccagcagcctgcccggccctgccagcagccccatgcccatccccaacagcagccccctggccagccctgtgagcagcacagtgtctgtgcccctgagcagcagcctgcccatctctgtgcccaccaccctgcctgccccagccagcgcccccctgaccatccccatcagcgcccccctgactgtgtctgccagcggccctgccctgctgacctctgtgaccccacccctggcccctgtggtgcctgctgcccctggcccccccagcctggcccccagcggggccagccccagcgccagcgccctgaccctgggcctggccacagcccccagcctgagcagcagccagaccccaggccaccccctgctgctggcccccaccagcagccacgtgcccggcctgaacagcacagtggccccagcctgcagccctgtgctggtgcctgccagcgccctggccagccccttccccagcgcccccaacccagccccagcccaggccagcctgctggccccagccagcagcgccagccaggccctggccacccccctggcccccatggccgccccccagacagccatcctggcccccagccctgccccacccctggcccccctgcctgtgctggcccccagccctggggccgcccctgtgctggccagcagccagacccctgtgcctgtgatggcccccagcagcaccccaggcaccagcctggccagcgccagccctgtgcctgcccccacccctgtgctggcccccagcagcacccagaccatgctgcctgcccctgtgcccagccccctgcccagccctgccagcacccagaccctggccctggccccagccctggcccccaccctgggcggcagcagccccagccagaccctgagcctgggcaccggcaacccccagggccccttccccacccagaccctgagcctgaccccagccagcagcctggtgcccaccccagcccagaccctgagcctggcccctggcccccccctgggccccacccagaccctgagcctggccccagccccacccctggccccagccagccctgtgggccctgccccagcccacaccctgaccctggccccagccagcagcagcgccagcctgctggccccagcctctgtgcagaccctgaccctgagccctgcccctgtgcccaccctgggccctgctgctgcccagaccctggccctggccccagccagcacccagagccctgccagccaggccagcagcctggtggtgtctgccagcggggccgcccccctgcctgtgaccatggtgtcccggctgcctgtgtccaaggatgagccagacaccctgaccctgcggagcggcccccccagcccccccagcacagccaccagctttggaggcccccggccccggcggcagcccccacctccacccaggagccccttctacctggacagcctggaggagaagaggaagaggcagaggtctgagcggctggagcgcatcttccagctgtctgaggcccatggagccctggcccctgtgtatggaacagaggtgctggacttctgcaccctgccccagcctgtggccagccccatcggccccaggagccctggccccagccaccccaccttctggacctacacagaggccgcccacagagctgtgctcttcccccagcagaggctggaccagctgtctgagatcatcgagcgcttcatctttgtgatgcctcctgtggaggcccccccacccagcctgcacgcctgccaccccccaccctggctggccccccggcaggccgccttccaggagcagctggccagcgagctgtggccccgggcccggcccctgcaccgcatcgtgtgcaacatgaggacccagttcccagacctgcggctcatccagtatgactgtgggaagctgcagaccctggccgtgctgctgcggcagctgaaggccgagggccaccgggtgctgatcttcacccagatgaccaggatgctggatgtgctggagcagttcctgacctaccacggccacctgtacctgcggctggatggcagcaccagggtggagcagaggcaggccctgatggagcgcttcaatgctgacaagaggatcttctgcttcatcctgagcaccaggtctgggggcgtgggcgtgaacctgaccggggctgacacagtggtgttctatgacagcgactggaaccccaccatggatgcccaggcccaggaccgctgccacagaattggccagaccagagatgtgcacatctaccgcctcatcagcgagaggacagtggaggagaacatcctgaagaaggccaaccagaagaggatgctgggggacatggccattgaaggaggcaacttcaccacagcctacttcaagcagcagaccatccgggagctgtttgacatgcccctggaggagcccagcagcagctctgtgcccagcgcccctgaggaggaggaggagaccgtggccagcaagcagacccacatcctggagcaggccctgtgcagagcagaagatgaggaggacatccgggccgccacccaggccaaggccgagcaggtggccgagctggccgagttcaatgaaaatgatggcttccctgctggggagggggaggaggccggccggcctggagcagaagatgaggagatgagcagagctgagcaggagattgctgccctggtggagcagctgacccccatcgagagatatgccatgaagttcctggaggccagcctggaggaggtgtcccgggaggagctgaagcaggccgaggagcaggtggaggccgccaggaaggacctggaccaggccaaggaggaggtgttccggctgccccaggaggaggaggagggccctggagctggagatgagagcagctgtggcaccggcggcggcacccaccggcgcagcaagaaggccaaggcccctgagaggcctggcaccagggtgtctgagcggctgcggggggcccgggcagagacccagggcgccaaccacacccctgtgatcagcgcccaccagaccaggagcaccaccaccccaccccgctgcagccctgcccgggagcgggtgcccaggcctgccccccggccccggcccaccccagccagcgccccagctgccatcccagccctggtgcctgtgcctgtgtctgcccctgtgcccatcagcgcccccaaccccatcaccatcctgcctgtgcacatcctgcccagccccccaccacccagccagatccccccctgcagcagccctgcctgcaccccacctccagcctgcaccccacctccagcccacaccccacctccagcccagacctgcctggtgacccccagcagccccctgctgctgggccccccatctgtgcccatcagcgcctctgtgaccaacctgcccctgggcctgcggcctgaggccgagctgtgtgcccaggccctggccagccctgagagcctggagctggcctctgtggccagcagcgagaccagcagcctgagcctggtgccccccaaggacctgctgcctgtggccgtggagatcctgcctgtgtctgagaagaacctgagcctgaccccatctgcccccagcctgaccctggaggccggcagcatccccaacggccaggagcaggaggccccagattctgctgagggcaccaccctgactgtgctgcctgagggggaggagctgcccctgtgtgtgtctgagagcaatggcctggagctgcccccatctgctgccagtgatgagcccctgcaggagcccctggaggccgacaggaccagcgaggagctgacagaggccaagacccccaccagcagccctgagaagccccaggagctggtgacagctgaggtggccgcccccagcaccagcagcagcgccaccagcagccctgagggccccagccctgcccggcccccaagaagaaggaccagcgcagatgtggagatccggggccagggcaccggccggcccggccagcccccaggccccaaggtgctgaggaagctgcccggccgcctggtgacagtggtggaggagaaggagctggtgagaagaagacggcagcagagaggagctgccagcaccctggtgcctggggtgtctgagaccagcgccagccctggcagccccagcgtgcgctccatgagcggccctgagagcagcccccccatcggcggcccctgtgaggccgcccccagcagcagcctgcccaccccaccccagcagcccttcatcgcccggcggcacatcgagctgggcgtgactggaggcggcagcccagaaaatggagatggagccctgctggccatcaccccacctgctgtgaagagaagaagaggccggccccccaagaagaacagaagccctgcagatgctggccggggcgtggatgaggcccccagcagcaccctgaagggcaagaccaacggggctgaccctgtgcccggccctgagaccctcatcgtggccgaccctgtgctggagccccagctgatccctggcccccagcccctgggcccccagcctgtgcaccggcccaaccccctgctgagccctgtggagaagagaagaagaggccggccccccaaggcccgggacctgcccatccctggcaccatcagcagcgctggagatggcaacagcgagagcaggacccagcccccaccccaccccagccccctgacccccctgccccccctgctggtgtgccccacagccaccgtggccaacacagtgaccaccgtgaccatcagcaccagcccccccaagaggaagaggggccggccccccaagaacccccccagcccccggcccagccagctgcctgtgctggaccgggacagcacctctgtgctggagagctgtggcctgggcagaagacggcagccccagggccagggcgagagcgagggcagcagcagtgatgaagatggcagccggcccctgacccggctggcccggctgcggctggaggccgagggcatgaggggcaggaagagcggcggctccatggtggtggccgtcatccaggatgacctggacctggccgacagcggccctgggggcctggagctgaccccacctgtggtgtccctgacccccaagctgcggagcacccggctgcggcccggcagcctggtgccccccctggagacagagaagctgcccaggaagagagctggggcccctgtgggcggcagccctggcctggccaagaggggccgcctgcagccccccagccccctgggccctgagggctctgtggaggagagcgaggccgaggccagcggggaggaggaggagggagatggcacccccaggagaagacctggcccccggcggctggtgggcaccaccaaccagggcgaccagaggatcctgcggagcagcgccccacccagcctggccggccctgctgtgagccaccggggcaggaaggccaagacctag

SEQ ID NO: 170052 - DNA, 9507 bp, synthetic construct
  misc_feature 1..9507: note = Description of Artificial Sequence: Synthetic coding sequence
  source 1..9507: mol_type = other DNA
atgcagagcagccccagccctgcccacccccagctgcctgtgctgcagacccagatggtgtctgatggcatgacaggcagcaaccctgtgtccccagccagcagcagcagccctgccagcagtggagctgggggcatcagcccccagcacatcgcccaggacagcagcctggatggccccccaggccccccagatggagccaccgtgcccctggagggcttcagcctgagccaggccgctgacctggccaacaagggccccaagtgggagaagagccacgccgagattgctgagcaggccaagcatgaggccgagattgagaccagaattgctgagctgaggaaggagggcttctggagcctgaagaggctgcccaaggtgcctgagcccccccggcccaagggccactgggactacctgtgtgaggagatgcagtggctgtctgctgactttgcccaggagcggcgctggaagaggggcgtggccaggaaggtggtgaggatggtgatccgccaccacgaggagcagaggcagaaggaggagcgggcccggcgggaggagcaggccaagctgcggcgcatcgccagcaccatggccaaggatgtgcggcagttctggagcaatgtggagaaggtggtgcagttcaagcagcagagccggctggaggagaagaggaagaaggccctggacctgcacctggacttcatcgtgggccagacagagaagtacagcgacctgctgagccagagcctgaaccagcccctgaccagcagcaaggccggcagcagcccctgcctgggcagcagcagcgctgccagcagccccccacctccagccagccggctggatgatgaagatggagacttccagccccaggaggatgaggaggaggatgatgaggagaccatcgaggtggaggagcagcaggagggcaatgatgctgaggcccagaggcgggagattgagctgctgcggcgggagggggagctgcccctggaggagctgctgcggagcctgcccccccagctgctggagggccccagcagccccagccagacccccagcagccatgacagcgacaccagagatggccctgaggagggcgctgaggaggagcccccccaggtgctggagatcaagcccccacccagcgctgtgacccagaggaacaagcagccctggcacccagatgaagatgatgaggagttcaccgccaatgaggaggaggctgaagatgaggaggacaccatcgctgctgaggagcagctggagggggaggtggaccacgccatggagctgtctgagctggcccgggagggggagctgtccatggaggagctgctgcagcagtatgctggggcctatgcccctggcagcggcagcagtgaagatgaagatgaagatgaggtggatgccaacagcagtgactgtgagcctgagggccctgtggaggccgaggagcccccccaggaggacagcagcagccagagcgacagcgtggaggacagaagtgaagatgaggaggatgagcacagcgaggaggaggagaccagcggcagcagcgccagcgaggagagcgagagcgaggagagtgaagatgcccagagccagagccaggctgatgaggaggaggaggatgatgactttggagtggagtacctgctggccagagatgaggagcagagcgaggctgatgctggcagcggcccccccaccccaggccccaccaccctgggccccaagaaggagatcacagacattgctgctgctgctgagagcctgcagcccaagggctacaccctggccaccacccaggtgaagacccccatccccctgctgctgcggggccagctgcgggagtaccagcacatcggcctggactggctggtgaccatgtatgagaagaagctgaatggcatcctggctgatgagatgggcctgggcaagaccatccagaccatcagcctgctggcccacctggcctgtgagaagggcaactggggcccccacctgatcatcgtgcccacctctgtgatgctgaactgggagatggagctgaagcgctggtgccccagcttcaagatcctgacctactatggagcccagaaggagaggaagctgaagaggcagggctggaccaagcccaatgccttccacgtgtgcatcaccagctacaagctggtgctgcaggaccaccaggccttccggaggaagaactggagatacctgatcctggatgaggcccagaacatcaagaacttcaagagccagcgctggcagagcctgctgaacttcaacagccagaggcggctgctgctgaccggcacccccctgcagaacagcctgatggagctgtggagcctgatgcacttcctgatgcctcatgtgttccagagccaccgggagttcaaggagtggttcagcaaccccctgaccggcatgattgagggcagccaggagtacaatgaaggcctggtgaagaggctgcacaaggtgctgcggcccttcctgctgcggcgggtgaaggtggatgtggagaagcagatgcccaagaagtatgaacatgtgatccgctgccgcctgagcaagaggcagcgctgcctgtatgatgacttcatggcccagaccaccaccaaggagaccctggccaccggccacttcatgtctgtcatcaacatcctgatgcagctgaggaaggtgtgcaaccaccccaacctgtttgaccccaggcctgtgaccagccccttcatcaccccaggcatctgcttcagcacagccagcctggtgctgcgggccacagatgtgcaccccctgcagagaattgacatgggccgctttgacctgattggcctggagggccgggtgagccgctatgaggccgacaccttcctgcccaggcaccggctgagcagaagagtgctgctggaggtggccacagccccagaccccccaccccggcccaagcctgtgaagatgaaggtgaacaggatgctgcagcctgtgcccaagcaggagggccgcacagtggtggtggtgaacaacccccgggcccccctgggccctgtgcctgtgcggcccccacctggccctgagctgagcgcccagcccaccccaggccctgtgccccaggtgctgcctgccagcctgatggtgtctgccagccctgctggccccccactcatcccagccagccggcccccaggccctgtgctgctgccccccctgcagcccaacagcggcagcctgccccaggtgctgcccagccccctgggcgtgctgagcggcaccagcaggcctcccacccccaccctgagcctgaagcccaccccaccagcccctgtgcggctgagccctgcccctcctcctggcagcagcagcctgctgaagcccctgactgtgcccccaggctacaccttccccccagctgctgccaccaccaccagcaccaccacagccacagccaccaccacagctgtgcctgcccccaccccagccccccagaggctcatcctgagcccagacatgcaggcccggctgcccagcggggaggtggtgtccatcggccagctggccagcctggcccagaggcctgtggccaatgccggcggcagcaagcccctgaccttccagatccagggcaacaagctgaccctgactggagcccaggtgcggcagctggccgtgggccagccccggcccctgcagatgccacccaccatggtgaacaacacaggagtggtgaagatcgtggtgcggcaggcccccagagatggcctgacccctgtgccccccctggccccagcccccaggcctcccagcagcggcctgcctgctgtgctgaacccccggcccaccctgaccccaggccgcctgcccacccccaccctgggcacagcccgggcccccatgcccacccccaccctggtgcggcccctgctgaagctggtgcacagccccagccctgaggtgtctgccagcgcccctggggccgcccccctgaccatcagcagccccctgcacgtgcccagcagcctgcccggccctgccagcagccccatgcccatccccaacagcagccccctggccagccctgtgagcagcacagtgtctgtgcccctgagcagcagcctgcccatctctgtgcccaccaccctgcctgccccagccagcgcccccctgaccatccccatcagcgcccccctgactgtgtctgccagcggccctgccctgctgacctctgtgaccccacccctggcccctgtggtgcctgctgcccctggcccccccagcctggcccccagcggggccagccccagcgccagcgccctgaccctgggcctggccacagcccccagcctgagcagcagccagaccccaggccaccccctgctgctggcccccaccagcagccacgtgcccggcctgaacagcacagtggccccagcctgcagccctgtgctggtgcctgccagcgccctggccagccccttccccagcgcccccaacccagccccagcccaggccagcctgctggccccagccagcagcgccagccaggccctggccacccccctggcccccatggccgccccccagacagccatcctggcccccagccctgccccacccctggcccccctgcctgtgctggcccccagccctggggccgcccctgtgctggccagcagccagacccctgtgcctgtgatggcccccagcagcaccccaggcaccagcctggccagcgccagccctgtgcctgcccccacccctgtgctggcccccagcagcacccagaccatgctgcctgcccctgtgcccagccccctgcccagccctgccagcacccagaccctggccctggccccagccctggcccccaccctgggcggcagcagccccagccagaccctgagcctgggcaccggcaacccccagggccccttccccacccagaccctgagcctgaccccagccagcagcctggtgcccaccccagcccagaccctgagcctggcccctggcccccccctgggccccacccagaccctgagcctggccccagccccacccctggccccagccagccctgtgggccctgccccagcccacaccctgaccctggccccagccagcagcagcgccagcctgctggccccagcctctgtgcagaccctgaccctgagccctgcccctgtgcccaccctgggccctgctgctgcccagaccctggccctggccccagccagcacccagagccctgccagccaggccagcagcctggtggtgtctgccagcggggccgcccccctgcctgtgaccatggtgtcccggctgcctgtgtccaaggatgagccagacaccctgaccctgcggagcggcccccccagcccccccagcacagccaccagctttggaggcccccggccccggcggcagcccccacctccacccaggagccccttctacctggacagcctggaggagaagaggaagaggcagaggtctgagcggctggagcgcatcttccagctgtctgaggcccatggagccctggcccctgtgtatggaacagaggtgctggacttctgcaccctgccccagcctgtggccagccccatcggccccaggagccctggccccagccaccccaccttctggacctacacagaggccgcccacagagctgtgctcttcccccagcagaggctggaccagctgtctgagatcatcgagcgcttcatctttgtgatgcctcctgtggaggcccccccacccagcctgcacgcctgccaccccccaccctggctggccccccggcaggccgccttccaggagcagctggccagcgagctgtggccccgggcccggcccctgcaccgcatcgtgtgcaacatgaggacccagttcccagacctgcggctcatccagtatgactgtgggaagctgcagaccctggccgtgctgctgcggcagctgaaggccgagggccaccgggtgctgatcttcacccagatgaccaggatgctggatgtgctggagcagttcctgacctaccacggccacctgtacctgcggctggatggcagcaccagggtggagcagaggcaggccctgatggagcgcttcaatgctgacaagaggatcttctgcttcatcctgagcaccaggtctgggggcgtgggcgtgaacctgaccggggctgacacagtggtgttctatgacagcgactggaaccccaccatggatgcccaggcccaggaccgctgccacagaattggccagaccagagatgtgcacatctaccgcctcatcagcgagaggacagtggaggagaacatcctgaagaaggccaaccagaagaggatgctgggggacatggccattgaaggaggcaacttcaccacagcctacttcaagcagcagaccatccgggagctgtttgacatgcccctggaggagcccagcagcagctctgtgcccagcgcccctgaggaggaggaggagaccgtggccagcaagcagacccacatcctggagcaggccctgtgcagagcagaagatgaggaggacatccgggccgccacccaggccaaggccgagcaggtggccgagctggccgagttcaatgaaaatgatggcttccctgctggggagggggaggaggccggccggcctggagcagaagatgaggagatgagcagagctgagcaggagattgctgccctggtggagcagctgacccccatcgagagatatgccatgaagttcctggaggccagcctggaggaggtgtcccgggaggagctgaagcaggccgaggagcaggtggaggccgccaggaaggacctggaccaggccaaggaggaggtgttccggctgccccaggaggaggaggagggccctggagctggagatgagagcagctgtggcaccggcggcggcacccaccggcgcagcaagaaggccaaggcccctgagaggcctggcaccagggtgtctgagcggctgcggggggcccgggcagagacccagggcgccaaccacacccctgtgatcagcgcccaccagaccaggagcaccaccaccccaccccgctgcagccctgcccgggagcgggtgcccaggcctgccccccggccccggcccaccccagccagcgccccagctgccatcccagccctggtgcctgtgcctgtgtctgcccctgtgcccatcagcgcccccaaccccatcaccatcctgcctgtgcacatcctgcccagccccccaccacccagccagatccccccctgcagcagccctgcctgcaccccacctccagcctgcaccccacctccagcccacaccccacctccagcccagacctgcctggtgacccccagcagccccctgctgctgggccccccatctgtgcccatcagcgcctctgtgaccaacctgcccctgggcctgcggcctgaggccgagctgtgtgcccaggccctggccagccctgagagcctggagctggcctctgtggccagcagcgagaccagcagcctgagcctggtgccccccaaggacctgctgcctgtggccgtggagatcctgcctgtgtctgagaagaacctgagcctgaccccatctgcccccagcctgaccctggaggccggcagcatccccaacggccaggagcaggaggccccagattctgctgagggcaccaccctgactgtgctgcctgagggggaggagctgcccctgtgtgtgtctgagagcaatggcctggagctgcccccatctgctgccagtgatgagcccctgcaggagcccctggaggccgacaggaccagcgaggagctgacagaggccaagacccccaccagcagccctgagaagccccaggagctggtgacagctgaggtggccgcccccagcaccagcagcagcgccaccagcagccctgagggccccagccctgcccggcccccaagaagaaggaccagcgcagatgtggagatccggggccagggcaccggccggcccggccagcccccaggccccaaggtgctgaggaagctgcccggccgcctggtgacagtggtggaggagaaggagctggtgagaagaagacggcagcagagaggagctgccagcaccctggtgcctggggtgtctgagaccagcgccagccctggcagccccagcgtgcgctccatgagcggccctgagagcagcccccccatcggcggcccctgtgaggccgcccccagcagcagcctgcccaccccaccccagcagcccttcatcgcccggcggcacatcgagctgggcgtgactggaggcggcagcccagaaaatggagatggagccctgctggccatcaccccacctgctgtgaagagaagaagaggccggccccccaagaagaacagaagccctgcagatgctggccggggcgtggatgaggcccccagcagcaccctgaagggcaagaccaacggggctgaccctgtgcccggccctgagaccctcatcgtggccgaccctgtgctggagccccagctgatccctggcccccagcccctgggcccccagcctgtgcaccggcccaaccccctgctgagccctgtggagaagagaagaagaggccggccccccaaggcccgggacctgcccatccctggcaccatcagcagcgctggagatggcaacagcgagagcaggacccagcccccaccccaccccagccccctgacccccctgccccccctgctggtgtgccccacagccaccgtggccaacacagtgaccaccgtgaccatcagcaccagcccccccaagaggaagaggggccggccccccaagaacccccccagcccccggcccagccagctgcctgtgctggaccgggacagcacctctgtgctggagagctgtggcctgggcagaagacggcagccccagggccagggcgagagcgagggcagcagcagtgatgaagatggcagccggcccctgacccggctggcccggctgcggctggaggccgagggcatgaggggcaggaagagcggcggctccatggtggtggccgtcatccaggatgacctggacctggccgacagcggccctgggggcctggagctgaccccacctgtggtgtccctgacccccaagctgcggagcacccggctgcggcccggcagcctggtgccccccctggagacagagaagctgcccaggaagagagctggggcccctgtgggcggcagccctggcctggccaagaggggccgcctgcagccccccagccccctgggccctgagggctctgtggaggagagcgaggccgaggccagcggggaggaggaggagggagatggcacccccaggagaagacctggcccccggcggctggtgggcaccaccaaccagggcgaccagaggatcctgcggagcagcgccccacccagcctggccggccctgctgtgagccaccggggcaggaaggccaagacctag

SEQ ID NO: 170053 - DNA, 180 bp, synthetic construct
  misc_feature 1..180: note = Description of Artificial Sequence: Synthetic coding sequence
  source 1..180: mol_type = other DNA
atgcagagcagccccagccctgcccacccccagctgcctgtgctgcagacccagatggtgtctgatggcatgacaggcagcaaccctgtgtccccagccagcagcagcagccctgccagcagtggagctgggggcatcagcccccagcacatcgcccaggacagcagcctggatggatag

SEQ ID NO: 170054 - DNA, 774 bp, synthetic construct
  misc_feature 1..774: note = Description of Artificial Sequence: Synthetic coding sequence
  source 1..774: mol_type = other DNA
atgcacagaagaggagtgggcgctggggccatcgccaagaagaagctggccgaggccaagtacaaggagcggggcaccgtgctggccgaggaccagctggcccagatgagcaagcagctggacatgttcaagaccaacctggaggagtttgccagcaagcacaagcaggagatcaggaagaaccctgagttccgggtgcagttccaggacatgtgtgccaccatcggcgtggaccccctggccagcggcaagggcttctggagcgagatgctgggcgtgggggacttctactatgagctgggcgtgcagatcatcgaggtgtgcctggccctgaagcacagaaatggaggcctcatcaccctggaggagctgcaccagcaggtgctgaagggccggggcaagtttgcccaggatgtgtcccaggatgacctgatccgggccatcaagaagctgaaggccctgggcaccggcttcggcatcatccctgtgggcggcacctacctgatccagagcgtgcctgctgagctgaacatggaccacacagtggtgctgcagctggccgagaatggctacgtgacagtgtctgagatcaaggccagcctgaagtgggagacagagcgggcccggcaggtgctggagcacctgctgaaggagggcctggcctggctggacctgcaggcccctggagaggcccactactggctgcctgccctcttcacagacctgtacagccaggagatcacagctgaggaggcccgggaggccctgccctag

SEQ ID NO: 170055 - DNA, 777 bp, synthetic construct
  misc_feature 1..777: note = Description of Artificial Sequence: Synthetic coding sequence
  source 1..777: mol_type = other DNA
atgcacagaagaggagtgggcgctggggccatcgccaagaagaagctggccgaggccaagtacaaggagcggggcaccgtgctggccgaggaccagctggcccagatgagcaagcagctggacatgttcaagaccaacctggaggagtttgccagcaagcacaagcaggagatcaggaagaaccctgagttccgggtgcagttccaggacatgtgtgccaccatcggcgtggaccccctggccagcggcaagggcttctggagcgagatgctgggcgtgggggacttctactatgagctgggcgtgcagatcatcgaggtgtgcctggccctgaagcacagaaatggaggcctcatcaccctggaggagctgcaccagcaggtgctgaagggccggggcaagtttgcccaggatgtgtcccaggatgacctgatccgggccatcaagaagctgaaggccctgggcaccggcttcggcatcatccctgtgggcggcacctacctgatccagagcgtgcctgctgagctgaacatggaccacacagtggtgctgcagctggccgagaagaatggctacgtgacagtgtctgagatcaaggccagcctgaagtgggagacagagcgggcccggcaggtgctggagcacctgctgaaggagggcctggcctggctggacctgcaggcccctggagaggcccactactggctgcctgccctcttcacagacctgtacagccaggagatcacagctgaggaggcccgggaggccctgccctag

SEQ ID NO: 170056 - DNA, 1611 bp, synthetic construct
  misc_feature 1..1611: note = Description of Artificial Sequence: Synthetic coding sequence
  source 1..1611: mol_type = other DNA
atgagcagcagcctgggcaaggagaaggacagcaaggagaaggaccccaaggtgcccagcgccaaggagcgggagaaggaggccaaggccagcggcggctttgggaaggagagcaaggagaaggagcccaagaccaagggcaaggatgccaaggatggcaagaaggacagcagcgctgcccagcccggggtggccttctctgtggacaacaccatcaagaggcccaacccagcccctggcaccaggaagaagagcagcaatgctgaggtgatcaaggagctgaacaagtgccgggaggagaacagcatgaggctggacctgagcaagaggagcatccacatcctgcccagcagcatcaaggagctgacccagctgacagagctgtacctgtacagcaacaagctgcagagcctgcctgctgaggtgggctgcctggtgaacctgatgaccctggccctgtctgagaacagcctgaccagcctgcctgacagcctggacaacctgaagaagctgaggatgctggacctgcggcacaacaagctgcgggagatccccagcgtggtgtaccgcctggacagcctgaccaccctgtacctgcgcttcaaccgcatcaccaccgtggagaaggacatcaagaacctgagcaagctgtccatgctgagcatccgggagaacaagatcaagcagctgcctgctgagatcggcaacctgagcagcctgagccggctgggcctgcgctacaaccggctgagcgccatccccaggagcctggccaagtgcagcgccctggaggagctgaacctggagaacaacaacatcagcaccctgcctgagagcctgctgagcagcctggtgaagctgaacagcctgaccctggccaggaactgcttccagctgtaccctgtgggcggccccagccagttcagcaccatctacagcctgaacatggagcacaaccgcatcaacaagatccccttcggcatcttcagccgggccaaggtgctgagcaagctgaacatgaaggacaaccagctgaccagcctgcccctggactttggcacctggacctccatggtggagctgaacctggccaccaaccagctgaccaagatcccagaagatgtgtctggcctggtgtccctggaggtgctgatcctgagcaacaacctgctgaagaagctgccccacggcctgggcaacctgaggaagctgcgggagctggacctggaggagaacaagctggagagcctgcccaatgaaattgcctacctgaaggacctgcagaagctggtgctgaccaacaaccagctgaccaccctgccccggggcatcggccacctgaccaacctgacccacctgggcctgggggagaacctgctgacccacctgcctgaggagatcggcaccctggagaacctggaggagctgtacctgaatgacaaccccaacctgcacagcctgccctttgagctggccctgtgcagcaagctgagcatcatgagcattgagaactgccccctgagccacctgcccccccagatcgtggccggcggccccagcttcatcatccagttcctgaagatgcagggcccctaccgggccatggtgtag

SEQ ID NO: 170057 - DNA, 1749 bp, synthetic construct
  misc_feature 1..1749: note = Description of Artificial Sequence: Synthetic coding sequence
  source 1..1749: mol_type = other DNA
atgagcagcagcctgggcaaggagaaggacagcaaggagaaggaccccaaggtgcccagcgccaaggagcgggagaaggaggccaaggccagcggcggctttgggaaggagagcaaggagaaggagcccaagaccaagggcaaggatgccaaggatggcaagaaggacagcagcgctgcccagcccggggtggccttctctgtggacaacaccatcaagaggcccaacccagcccctggcaccaggaagaagagcagcaatgctgaggtgatcaaggagctgaacaagtgccgggaggagaacagcatgaggctggacctgagcaagaggagcatccacatcctgcccagcagcatcaaggagctgacccagctgacagagctgtacctgtacagcaacaagctgcagagcctgcctgctgaggtgggctgcctggtgaacctgatgaccctggccctgtctgagaacagcctgaccagcctgcctgacagcctggacaacctgaagaagctgaggatgctggacctgcggcacaacaagctgcgggagatccccagcgtggtgtaccgcctggacagcctgaccaccctgtacctgcgcttcaaccgcatcaccaccgtggagaaggacatcaagaacctgagcaagctgtccatgctgagcatccgggagaacaagatcaagcagctgcctgctgagatcggggagctgtgcaacctgatcaccctggatgtggcccacaaccagctggagcacctgcccaaggagatcggcaactgcacccagatcaccaacctggacctgcagcacaatgagctgctggacctgcctgacaccatcggcaacctgagcagcctgagccggctgggcctgcgctacaaccggctgagcgccatccccaggagcctggccaagtgcagcgccctggaggagctgaacctggagaacaacaacatcagcaccctgcctgagagcctgctgagcagcctggtgaagctgaacagcctgaccctggccaggaactgcttccagctgtaccctgtgggcggccccagccagttcagcaccatctacagcctgaacatggagcacaaccgcatcaacaagatccccttcggcatcttcagccgggccaaggtgctgagcaagctgaacatgaaggacaaccagctgaccagcctgcccctggactttggcacctggacctccatggtggagctgaacctggccaccaaccagctgaccaagatcccagaagatgtgtctggcctggtgtccctggaggtgctgatcctgagcaacaacctgctgaagaagctgccccacggcctgggcaacctgaggaagctgcgggagctggacctggaggagaacaagctggagagcctgcccaatgaaattgcctacctgaaggacctgcagaagctggtgctgaccaacaaccagctgaccaccctgccccggggcatcggccacctgaccaacctgacccacctgggcctgggggagaacctgctgacccacctgcctgaggagatcggcaccctggagaacctggaggagctgtacctgaatgacaaccccaacctgcacagcctgccctttgagctggccctgtgcagcaagctgagcatcatgagcattgagaactgccccctgagccacctgcccccccagatcgtggccggcggccccagcttcatcatccagttcctgaagatgcagggcccctaccgggccatggtgtag

SEQ ID NO: 170058 - DNA, 1119 bp, synthetic construct
  misc_feature 1..1119: note = Description of Artificial Sequence: Synthetic coding sequence
  source 1..1119: mol_type = other DNA
ctggacaacctgaagaagctgaggatgctggacctgcggcacaacaagctgcgggagatccccagcgtggtgtaccgcctggacagcctgaccaccctgtacctgcgcttcaaccgcatcaccaccgtggagaaggacatcaagaacctgagcaagctgtccatgctgagcatccgggagaacaagatcaagcagctgcctgctgagatcggcaacctgagcagcctgagccggctgggcctgcgctacaaccggctgagcgccatccccaggagcctggccaagtgcagcgccctggaggagctgaacctggagaacaacaacatcagcaccctgcctgagagcctgctgagcagcctggtgaagctgaacagcctgaccctggccaggaactgcttccagctgtaccctgtgggcggccccagccagttcagcaccatctacagcctgaacatggagcacaaccgcatcaacaagatccccttcggcatcttcagccgggccaaggtgctgagcaagctgaacatgaaggacaaccagctgaccagcctgcccctggactttggcacctggacctccatggtggagctgaacctggccaccaaccagctgaccaagatcccagaagatgtgtctggcctggtgtccctggaggtgctgatcctgagcaacaacctgctgaagaagctgccccacggcctgggcaacctgaggaagctgcgggagctggacctggaggagaacaagctggagagcctgcccaatgaaattgcctacctgaaggacctgcagaagctggtgctgaccaacaaccagctgaccaccctgccccggggcatcggccacctgaccaacctgacccacctgggcctgggggagaacctgctgacccacctgcctgaggagatcggcaccctggagaacctggaggagctgtacctgaatgacaaccccaacctgcacagcctgccctttgagctggccctgtgcagcaagctgagcatcatgagcattgagaactgccccctgagccacctgcccccccagatcgtggccggcggccccagcttcatcatccagttcctgaagatgcagggcccctaccgggccatggtgtag

SEQ ID NO: 170059 - DNA, 588 bp, synthetic construct
  misc_feature 1..588: note = Description of Artificial Sequence: Synthetic coding sequence
  source 1..588: mol_type = other DNA
atgctgagagatggccgctttgcctgtgccatctgcccccacaggcctgtgctggacaccctggccatgctgacagcccacagagctgggaagaagcacctgagcagcctgcagctgttctacggcaagaagcagcccgggaaggagaggaagcagaaccccaagcaccagaatgagctgcggcgggaggagaccaaggccgaggcccccctgctgacccagaccaggctcatcacccagagcgccctgcaccgggccccccactacaacagctgctgcaggaggaagtacagacctgaggcccctggccccagcgtgtccctgagccccatgccacccagcgaggtgaagctgcagagcggcaagatcagccgggagcctgagcctgctgctggcccccaggccgaggagagcgccaccgtgtctgccccagcccccatgagccccacccggcggcgggccctggaccactacctgaccctgcggagcagcggctggatcccagatggccggggccgctgggtgaaggatgaaaatgtggagtttgacagtgatgaggaggagcccccagacctgcccctggactag

SEQ ID NO: 170060 - DNA, 693 bp, synthetic construct
  misc_feature 1..693: note = Description of Artificial Sequence: Synthetic coding sequence
  source 1..693: mol_type = other DNA
atgtccttcaagcgggagggagatgactggagccagctgaatgtgctgaagaagagaagagtgggggacctgctggccagctacatcccagaagatgaggccctgatgctgagagatggccgctttgcctgtgccatctgcccccacaggcctgtgctggacaccctggccatgctgacagcccaccgggccggcaagaagcacctgagcagcctgcagctgttctacggcaagaagcagcccgggaaggagaggaagcagaaccccaagcaccagaatgagctgcggcgggaggagaccaaggccgaggcccccctgctgacccagaccaggctcatcacccagagcgccctgcaccgggccccccactacaacagctgctgcaggaggaagtacagacctgaggcccctggccccagcgtgtccctgagccccatgcctccttctgaggtgaagctgcagagcggcaagatcagccgggagcctgagcctgctgctggcccccaggccgaggagagcgccaccgtgtctgccccagcccccatgagccccaccaggagaagagccctggaccactacctgaccctgcggagcagcggctggatcccagatggccggggccgctgggtgaaggatgaaaatgtggagtttgacagtgatgaggaggagcccccagacctgcccctggactag

SEQ ID NO: 170061 - DNA, 1038 bp, synthetic construct
  misc_feature 1..1038: note = Description of Artificial Sequence: Synthetic coding sequence
  source 1..1038: mol_type = other DNA
atgtacaaggactgcatcgagagcactggagactacttcctgctgtgtgatgctgagggcccctggggcatcatcctggagagcctggccatcctgggcatcgtggtgaccatcctgctgctgctggccttcctgttcctgatgaggaagatccaggactgcagccagtggaatgtgctgcccacccagctgctcttcctgctgtctgtgctgggcctgtttggcctggcctttgccttcatcatcgagctgaaccagcagacagcccctgtgcgctacttcctgtttggagtgctgtttgccctgtgcttcagctgcctgctggcccacgccagcaacctggtgaagctggtgcggggctgtgtgtccttctcctggaccaccatcctgtgcatcgccatcggctgcagcctgctgcagatcatcatcgccacagaatatgtgaccctcatcatgacccggggcatgatgtttgtgaacatgaccccctgccagctgaatgtggactttgtggtgctgctggtgtatgtgctcttcctgatggccctgaccttctttgtgtccaaggccaccttctgtggcccctgtgagaactggaagcagcacggccgcctcatcttcatcaccgtgctcttcagcatcatcatctgggtggtgtggatctccatgctgctgcggggcaacccccagttccagaggcagccccagtgggatgatcctgtggtgtgcatcgccctggtgaccaatgcctgggtgttcctgctgctgtacatcgtgcctgagctgtgcatcctgtaccgcagctgccggcaggagtgccccctgcagggcaatgcctgccctgtgacagcctaccagcacagcttccaggtggagaaccaggagctgagccgggcccgggacagtgatggagcagaagaagatgtggccctgaccagctatggcacccccatccagccccagacagtggaccccacccaggagtgcttcatcccccaggccaagctgagcccccagcaggatgctgggggcgtgtag

SEQ ID NO: 170062 - DNA, 2076 bp, synthetic construct
  misc_feature 1..2076: note = Description of Artificial Sequence: Synthetic coding sequence
  source 1..2076: mol_type = other DNA
atggagggcaacaagctggaggagcaggacagcagccccccccagagcaccccaggcctgatgaagggcaacaagcgggaggagcagggcctgggccctgagcctgctgccccccagcagcccacagctgaggaggaggccctgattgagttccacaggagctaccgggagctgtttgagttcttctgcaacaacaccaccatccatggagccatccggctggtgtgcagccagcacaacaggatgaagacagccttctgggccgtgctgtggctgtgcaccttcggcatgatgtactggcagtttggcctgctgtttggagagtacttctcctaccctgtgtccctgaacatcaacctgaacagcgacaagctggtgtttcctgctgtgaccatctgcaccctgaacccctaccgctacccagagatcaaggaggagctggaggagctggaccgcatcacagagcagaccctgtttgacctgtacaagtacagcagcttcaccaccctggtggccggcagccgcagcagaagagacctgcggggcaccctgccccaccccctgcagaggctgcgggtgcccccaccaccccacggggcccggcgggcccggtctgtggccagcagcctgcgggacaacaacccccaggtggactggaaggactggaagattggcttccagctgtgcaaccagaacaagagtgactgcttctaccagacctacagcagtggagtggatgctgtgcgggagtggtaccgcttccactacatcaacatcctgagccggctgcctgagaccctgcccagcctggaggaggacaccctgggcaacttcatctttgcctgccgcttcaaccaggtgtcctgcaaccaggccaactacagccacttccaccaccccatgtatggcaactgctacaccttcaatgacaagaacaacagcaacctgtggatgagctccatgcctggcatcaacaacggcctgagcctgatgctgcgggcagagcagaatgacttcatccccctgctgagcacagtgactggagcccgggtgatggtgcacggccaggatgagcccgccttcatggatgatggcggcttcaacctgcggcctggggtggagaccagcatctccatgaggaaggagaccctggaccggctgggcggggactatggagactgcaccaagaatggaagtgatgtgcctgtggagaacctgtaccccagcaagtacacccagcaggtgtgcatccacagctgcttccaggagagcatgatcaaggaatgtggctgtgcctacatcttctacccccggccccagaatgtggagtactgtgactacaggaagcacagctcctggggccaggtgcgcagcctgacccctgtgatcccagccctgtgggaggccgaggccggccgcagccggggctactgctactacaagctgcaggtggacttcagcagtgaccacctgggctgcttcaccaagtgcaggaagccctgcagcgtgaccagctaccagctgtctgctggctacagccgctggcccagcgtgaccagccaggagtgggtgttccagatgctgagccggcagaacaactacacagtgaacaacaagagaaatggagtggccaaggtgaacatcttcttcaaggagctgaactacaagaccaacagcgagagccccagcgtgaccatggtgaccctgctgagcaacctgggcagccagtggagcctgtggtttggcagctctgtgctgtctgtggtggagatggccgagctggtgtttgacctgctggtgatcatgttcctgatgctgctgcggcgcttccgcagccgctactggagccctggccggggcggccgcggggcccaggaggtggccagcaccctggccagcagcccccccagccacttctgcccccaccccatgagcctgagcctgagccagcccggccctgcccccagccctgccctgacagcccctcctccagcctatgccaccctgggcccccggcccagccctgggggcagcgctggggccagcagcagcacctgccccctgggcggcccctag

SEQ ID NO: 170063 - DNA, 2058 bp, synthetic construct
  misc_feature 1..2058: note = Description of Artificial Sequence: Synthetic coding sequence
  source 1..2058: mol_type = other DNA
atgctgctgcacatcaacccagcctacctgttcaagctgctgcacggcttccccccctggatcatgcccacagatggcaacctgggggacaagaacttccagatgggcaagccaggccaccgggagggcgccaccatgcacgtgaagaagtacctgctgaagggcctgcaccggctgcagaagggccctggctacacctacaaggagctgctggtgtggtactgtgacaacaccaacacccacggccccaagaggatcatctgtgagggccccaagaagaaggccatgtggttcctgctgaccctgctgtttgctgccctggtgtgctggcagtggggcatcttcatccgcacctacctgtcctgggaggtgtctgtgtccctgtctgtgggcttcaagaccatggacttccctgctgtgaccatctgcaatgccagccccttcaagtacagcaagatcaagcacctgctgaaggacctggatgagctgatggaggccgtgctggagcgcatcctggcccctgagctgagccacgccaatgccaccaggaacctgaacttcagcatctggaaccacacccccctggtgctgattgatgaaagaaacccccaccaccccatggtgctggacctgtttggagacaaccacaacggcctgaccagcagcagcgccagcgagaagatctgcaatgcccacggctgcaagatggccatgaggctgtgcagcctgaacagaacccagtgcaccttcaggaacttcaccagcgccacccaggccctgacagagtggtacatcctgcaggccaccaacatctttgcccaggtgccccagcaggagctggtggagatgagctacccaggagagcagatgatcctggcctgcctgtttggagctgagccctgcaactacagaaacttcaccagcatcttctacccccactacggcaactgctacatcttcaactggggcatgacagagaaggccctgcccagcgccaaccctggaacagaatttggcctgaagctgatcctggacatcggccaggaggactatgtgcccttcctggccagcacagctggggtgcggctgatgctgcacgagcagaggagctaccccttcatcagagatgagggcatctatgccatgtctggaacagagaccagcattggagtgctggtggacaagctgcagaggatgggagagccctacagcccctgcaccgtgaatggaagtgaggtgcctgtgcagaacttctacagcgactacaacaccacctacagcatccaggcctgcctgcggagctgcttccaggaccacatgatccggaactgcaactgtggccactacctgtaccccctgcccagaggagagaagtactgcaacaacagagacttcccagactgggcccactgctacagcgacctgcagatgtctgtggcccagcgggagacctgcatcggcatgtgcaaggagagctgcaatgacacccagtacaagatgaccatctccatggctgactggcccagcgaggccagcgaggactggatcttccacgtgctgagccaggagcgggaccagagcaccaacatcaccctgagcaggaaaggaattgtgaagctgaacatctacttccaggagttcaactaccgcaccatcgaggagagcgctgccaacaacatcgtgtggctgctgagcaacctgggcggccagtttggcttctggatgggcggctctgtgctgtgcctgattgaatttggagagatcatcatcgactttgtgtggatcaccatcatcaagctggtggccctggccaagagcctgcggcagaggcgggcccaggccagctatgccggccccccacccaccgtggccgagctggtggaggcccacaccaactttggcttccagcctgacacagcccccaggagccccaacacaggcccctaccccagcgagcaggccctgcccatccctggcaccccaccacccaactatgacagcctgcggctgcagcccctggatgtgattgaaagtgacagtgaaggagatgccatctag

SEQ ID NO: 170064 - DNA, 1923 bp, synthetic construct
  misc_feature 1..1923: note = Description of Artificial Sequence: Synthetic coding sequence
  source 1..1923: mol_type = other DNA
atgcacgtgaagaagtacctgctgaagggcctgcaccggctgcagaagggccctggctacacctacaaggagctgctggtgtggtactgtgacaacaccaacacccacggccccaagaggatcatctgtgagggccccaagaagaaggccatgtggttcctgctgaccctgctgtttgctgccctggtgtgctggcagtggggcatcttcatccgcacctacctgtcctgggaggtgtctgtgtccctgtctgtgggcttcaagaccatggacttccctgctgtgaccatctgcaatgccagccccttcaagtacagcaagatcaagcacctgctgaaggacctggatgagctgatggaggccgtgctggagcgcatcctggcccctgagctgagccacgccaatgccaccaggaacctgaacttcagcatctggaaccacacccccctggtgctgattgatgagaggaacccccaccaccccatggtgctggacctgtttggagacaaccacaacggcctgaccagcagcagcgccagcgagaagatctgcaatgcccacggctgcaagatggccatgaggctgtgcagcctgaacagaacccagtgcaccttcaggaacttcaccagcgccacccaggccctgacagagtggtacatcctgcaggccaccaacatctttgcccaggtgccccagcaggagctggtggagatgagctacccaggagagcagatgatcctggcctgcctgtttggagctgagccctgcaactacagaaacttcaccagcatcttctacccccactacggcaactgctacatcttcaactggggcatgacagagaaggccctgcccagcgccaaccctggaacagaatttggcctgaagctgatcctggacatcggccaggaggactatgtgcccttcctggccagcacagctggggtgcggctgatgctgcacgagcagaggagctaccccttcatcagagatgagggcatctatgccatgagcggcacagagaccagcattggagtgctggtggacaagctgcagaggatgggagagccctacagcccctgcaccgtgaatggcagcgaggtgcctgtgcagaacttctacagcgactacaacaccacctacagcatccaggcctgcctgcggagctgcttccaggaccacatgatccggaactgcaactgtggccactacctgtaccccctgcccagaggagagaagtactgcaacaacagagacttcccagactgggcccactgctacagcgacctgcagatgtctgtggcccagcgggagacctgcatcggcatgtgcaaggagagctgcaatgacacccagtacaagatgaccatctccatggctgactggcccagcgaggccagcgaggactggatcttccacgtgctgagccaggagcgggaccagagcaccaacatcaccctgagcaggaagggcatcgtgaagctgaacatctacttccaggagttcaactaccgcaccatcgaggagagcgctgccaacaacatcgtgtggctgctgagcaacctgggcggccagtttggcttctggatgggcggctctgtgctgtgcctgattgaatttggagagatcatcatcgactttgtgtggatcaccatcatcaagctggtggccctggccaagagcctgcggcagaggcgggcccaggccagctatgccggccccccacccaccgtggccgagctggtggaggcccacaccaactttggcttccagcctgacacagcccccaggagccccaacacaggcccctaccccagcgagcaggccctgcccatccctggcaccccaccacccaactatgacagcctgcggctgcagcccctggatgtgattgaaagtgacagtgaaggagatgccatctag

SEQ ID NO: 170065 - DNA, 2115 bp, synthetic construct
  misc_feature 1..2115: note = Description of Artificial Sequence: Synthetic coding sequence
  source 1..2115: mol_type = other DNA
atggccttcctgagcaggaccagccctgtggccgccgccagcttccagagccggcaggaggcccggggcagcatcctgctgcagagctgccagctgcccccccagtggctgagcacagaggcctggacaggagagtggaagcagccccacggcggggccctgaccagccgcagccctggccctgtggccccccagaggccctgccacctgaagggctggcagcaccggcccacccagcacaatgctgcctgcaagcagggccaggccgccgcccagaccccacccaggcctggccccccatctgcccctcctcctccacccaaggagggccaccaggagggcctggtggagctgcctgccagcttccgggagctgctgaccttcttctgcaccaatgccaccatccacggggccatccggctggtgtgcagccggggcaaccggctgaagaccacctcctggggcctgctgagcctgggcgccctggtggccctgtgctggcagctgggcctgctgtttgagcggcactggcacaggcctgtgctgatggctgtgtctgtgcacagcgagaggaagctgctgcccctggtgaccctgtgtgatggcaacccccggcggcccagccctgtgctgcggcacctggagctgctggatgaatttgccagagaaaatattgacagcctgtacaacgtgaacctgagcaagggccgggccgccctgagcgccaccgtgcccaggcatgagccccccttccacctggaccgggagatccggctgcagaggctgagccacagcggcagccgggtgcgggtgggcttccggctgtgcaacagcactggaggagactgcttctaccggggctacaccagcggcgtggccgctgtgcaggactggtaccacttccactacgtggacatcctggccctgctgcctgctgcctgggaggacagccacggcagccaggacggccactttgtgctgagctgcagctatgatggcctggactgccaggcccggcagttccgcaccttccaccaccccacctacggcagctgctacacagtggatggagtgtggacagcccagaggcctggcatcacccacggcgtgggcctggtgctgcgggtggagcagcagccccacctgcccctgctgagcaccctggccggcatccgggtgatggtgcacggcaggaaccacacccccttcctgggccaccacagcttctctgtgcggcctggaacagaggccaccatcagcatcagagaagatgaggtgcaccggctgggcagcccctacggccactgcacagctggaggagagggcgtggaggtggagctgctgcacaacaccagctacacccggcaggcctgcctggtgtcctgcttccagcagctgatggtggagacctgcagctgtggctactacctgcaccccctgcctgctggagctgagtactgcagcagcgcccggcacccagcctggggccactgcttctaccgcctgtaccaggacctggagacccaccggctgccctgcaccagccgctgcccccggccctgccgggagagcgccttcaagctgagcacaggcaccagccgctggcccagcgccaagtctgctggctggaccctggccaccctgggggagcagggcctgccccaccagagccaccggcagaggagcagcctggccaagatcaacatcgtgtaccaggagctgaactacagatctgtggaggaggcccctgtgtacagcgtgccccagctgctgagcgccatgggcagcctgtgcagcctgtggtttggagcctctgtgctgagcctgctggagctgctggagctgctgctggatgccagcgccctgaccctggtgctgggcggccgccgcctgcggcgggcctggttctcctggccccgggccagccctgccagcggggccagcagcatcaagccagaggccagccagatgcctcctcctgctgggggcaccagtgatgatcctgagcccagcggcccccacctgccccgggtgatgctgcccggggtgctggccggcgtgtctgctgaggagagctgggccggcccccagcccctggagaccctggacacctag

SEQ ID NO: 170066 - DNA, 1917 bp, synthetic construct
  misc_feature 1..1917: note = Description of Artificial Sequence: Synthetic coding sequence
  source 1..1917: mol_type = other DNA
atggccgagcaccgctccatggatggccgcatggaggccgccacccggggcggcagccacctgcaggccgccgcccagaccccacccaggcctggccccccatctgcccctcctcctccacccaaggagggccaccaggagggcctggtggagctgcctgccagcttccgggagctgctgaccttcttctgcaccaatgccaccatccacggggccatccggctggtgtgcagccggggcaaccggctgaagaccacctcctggggcctgctgagcctgggcgccctggtggccctgtgctggcagctgggcctgctgtttgagcggcactggcacaggcctgtgctgatggctgtgtctgtgcacagcgagaggaagctgctgcccctggtgaccctgtgtgatggcaacccccggcggcccagccctgtgctgcggcacctggagctgctggatgaatttgccagagaaaatattgacagcctgtacaacgtgaacctgagcaagggccgggccgccctgagcgccaccgtgcccaggcatgagccccccttccacctggaccgggagatccggctgcagaggctgagccacagcggcagccgggtgcgggtgggcttccggctgtgcaacagcactggaggagactgcttctaccggggctacaccagcggcgtggccgctgtgcaggactggtaccacttccactacgtggacatcctggccctgctgcctgctgcctgggaggacagccacggcagccaggacggccactttgtgctgagctgcagctatgatggcctggactgccaggcccggcagttccgcaccttccaccaccccacctacggcagctgctacacagtggatggagtgtggacagcccagaggcctggcatcacccacggcgtgggcctggtgctgcgggtggagcagcagccccacctgcccctgctgagcaccctggccggcatccgggtgatggtgcacggcaggaaccacacccccttcctgggccaccacagcttctctgtgcggcctggaacagaggccaccatcagcatcagagaagatgaggtgcaccggctgggcagcccctacggccactgcacagctggaggagagggcgtggaggtggagctgctgcacaacaccagctacacccggcaggcctgcctggtgtcctgcttccagcagctgatggtggagacctgcagctgtggctactacctgcaccccctgcctgctggagctgagtactgcagcagcgcccggcacccagcctggggccactgcttctaccgcctgtaccaggacctggagacccaccggctgccctgcaccagccgctgcccccggccctgccgggagagcgccttcaagctgagcacaggcaccagccgctggcccagcgccaagtctgctggctggaccctggccaccctgggggagcagggcctgccccaccagagccaccggcagaggagcagcctggccaagatcaacatcgtgtaccaggagctgaactacagatctgtggaggaggcccctgtgtacagcgtgccccagctgctgagcgccatgggcagcctgtgcagcctgtggtttggagcctctgtgctgagcctgctggagctgctggagctgctgctggatgccagcgccctgaccctggtgctgggcggccgccgcctgcggcgggcctggttctcctggccccgggccagccctgccagcggggccagcagcatcaagccagaggccagccagatgcctcctcctgctgggggcaccagtgatgatcctgagcccagcggcccccacctgccccgggtgatgctgcccggggtgctggccggcgtgtctgctgaggagagctgggccggcccccagcccctggagaccctggacacctag

SEQ ID NO: 170067 - DNA, 927 bp, synthetic construct
  misc_feature 1..927: note = Description of Artificial Sequence: Synthetic coding sequence
  source 1..927: mol_type = other DNA
tgagccacagcccgggccgccacagccttcacagaggccacccggcaggcctggaggctgagcaggacaggcaccaccagcaccatgtggatctcctggccctgctgccccaggcatggccgcacagccaccggggccaggacagccaccagcagcagccctgctgtgaccatggcctggacagcccggccagacagcagcggccccagcaccaccccacccacagctgctgccaccaggtccatggccagcggccagctgagcgccccagccagccccaccgtgggcgccagcccctggcctgtgcggggccagggctgccgcagcggcggcctgaccccagccctgggcctgcccggggtgggcctggtgctgcgggtggagcagcagccccacctgcccctgctgagcaccctggccggcatccgggtgatggtgcatggaagaaaccacacccccttcctgggccaccacagcttctctgtgcggcccggcacagaggccaccatcagcatccgggaggatgaggtgcaccggctgggcagcccctacggccactgcacagctggaggagaaggagtggaggtggagctgctgcacaacaccagctacacccggcaggcctgcctggtgtcctgcttccagcagctgatggtggagacctgcagctgtggctactacctgcaccccctgcctgctggagctgagtactgcagcagcgcccggcacccagcctggggccactgcttctaccgcctgtaccaggacctggagacccaccggctgccctgcaccagccgctgcccccggccctgccgggagagcgccttcaagctgagcacaggcaccagccgctggcccagcgccaagtctgctggctggaccctggccaccctgggggagcagggcctgccccaccagagctag

SEQ ID NO: 170068 - DNA, 2010 bp, synthetic construct
  misc_feature 1..2010: note = Description of Artificial Sequence: Synthetic coding sequence
  source 1..2010: mol_type = other DNA
atggccgagcaccgctccatggatggccgcatggaggccgccacccggggcggcagccacctgcagatcgcctgggcctgtggcagccctgaggccctgcccccagagggcatggccgcccagacccacagcgcccagcgctgcctgcagacaggccctggctgcagcccagatgccccccagcccggcccccccagcgcccctcctcctccacccaaggagggccaccaggagggcctggtggagctgcctgccagcttccgggagctgctgaccttcttctgcaccaatgccaccatccatggagccatccggctggtgtgcagccggggcaaccggctgaagaccacctcctggggcctgctgagcctgggcgccctggtggccctgtgctggcagctgggcctgctgtttgagcggcactggcacaggcctgtgctgatggctgtgtctgtgcacagcgagaggaagctgctgcccctggtgaccctgtgtgatggcaacccccggcggcccagccctgtgctgcggcacctggagctgctggatgaatttgcccgggagaacatcgacagcctgtacaacgtgaacctgagcaagggccgggccgccctgagcgccaccgtgcccaggcatgagccccccttccacctggaccgggagatccggctgcagaggctgagccacagcggcagccgggtgcgggtgggcttccggctgtgcaacagcactggaggagactgcttctaccggggctacaccagcggcgtggccgctgtgcaggactggtaccacttccactacgtggacatcctggccctgctgcctgctgcctgggaggacagccacggcagccaggacggccactttgtgctgagctgcagctatgatggcctggactgccaggcccggcagttccgcaccttccaccaccccacctacggcagctgctacacagtggatggagtgtggacagcccagaggcctggcatcacccatggagtgggcctggtgctgcgggtggagcagcagccccacctgcccctgctgagcaccctggccggcatccgggtgatggtgcatggaagaaaccacacccccttcctgggccaccacagcttctctgtgcggcccggcacagaggccaccatcagcatccgggaggatgaggtgcaccggctgggcagcccctacggccactgcacagctggaggagaaggagtggaggtggagctgctgcacaacaccagctacacccggcaggcctgcctggtgtcctgcttccagcagctgatggtggagacctgcagctgtggctactacctgcaccccctgcctgctggagctgagtactgcagcagcgcccggcacccagcctggggccactgcttctaccgcctgtaccaggacctggagacccaccggctgccctgcaccagccgctgcccccggccctgccgggagagcgccttcaagctgagcacaggcaccagccgctggcccagcgccaagtctgctggctggaccctggccaccctgggggagcagggcctgccccaccagagccaccggcagaggagcagcctggccaagatcaacatcgtgtaccaggagctgaactacagatctgtggaggaggcccctgtgtacagcgtgccccagctgctgagcgccatgggcagcctgtgcagcctgtggtttggagcctctgtgctgagcctgctggagctgctggagctgctgctggatgccagcgccctgaccctggtgctgggcggccggcggctgcggcgggcctggttctcctggccccgggccagccctgccagcggggccagcagcatcaagccagaggccagccagatgcctcctcctgctgggggcaccagtgatgatcctgagcccagcggcccccacctgccccgggtgatgctgcccggggtgctggccggcgtgtctgctgaggagagctgggccggcccccagcccctggagaccctggacacctag

SEQ ID NO: 170069 - DNA, 2409 bp, synthetic construct
  misc_feature 1..2409: note = Description of Artificial Sequence: Synthetic coding sequence
  source 1..2409: mol_type = other DNA
atgagagctgtgctgagccagaagaccacccccctgccccgctacctgtggccaggccacctgagcggcccccggcggctgacctggagctggtgcagcgaccacaggacccccacctgccgggagctgggcagcccccaccccaccccctgcaccggccctgcccggggctggccccggcggggcggcggcccctgtggcttcaccagcgctggccacgtgctgtgtggctaccccctgtgcctgctgagcggccccatccagggctgcggcaccggcctgggggacagctccatggccttcctgagcaggaccagccctgtggccgccgccagcttccagagccggcaggaggcccggggcagcatcctgctgcagagctgccagctgcccccccagtggctgagcacagaggcctggacaggagagtggaagcagccccacggcggggccctgaccagccgcagccctggccctgtggccccccagaggccctgccacctgaagggctggcagcaccggcccacccagcacaatgctgcctgcaagcagggccaggccgccgcccagaccccacccaggcctggccccccatctgcccctcctcctccacccaaggagggccaccaggagggcctggtggagctgcctgccagcttccgggagctgctgaccttcttctgcaccaatgccaccatccacggggccatccggctggtgtgcagccggggcaaccggctgaagaccacctcctggggcctgctgagcctgggcgccctggtggccctgtgctggcagctgggcctgctgtttgagcggcactggcacaggcctgtgctgatggctgtgtctgtgcacagcgagaggaagctgctgcccctggtgaccctgtgtgatggcaacccccggcggcccagccctgtgctgcggcacctggagctgctggatgaatttgccagagaaaatattgacagcctgtacaacgtgaacctgagcaagggccgggccgccctgagcgccaccgtgcccaggcatgagccccccttccacctggaccgggagatccggctgcagaggctgagccacagcggcagccgggtgcgggtgggcttccggctgtgcaacagcactggaggagactgcttctaccggggctacaccagcggcgtggccgctgtgcaggactggtaccacttccactacgtggacatcctggccctgctgcctgctgcctgggaggacagccacggcagccaggacggccactttgtgctgagctgcagctatgatggcctggactgccaggcccggcagttccgcaccttccaccaccccacctacggcagctgctacacagtggatggagtgtggacagcccagaggcctggcatcacccacggcgtgggcctggtgctgcgggtggagcagcagccccacctgcccctgctgagcaccctggccggcatccgggtgatggtgcacggcaggaaccacacccccttcctgggccaccacagcttctctgtgcggcctggaacagaggccaccatcagcatcagagaagatgaggtgcaccggctgggcagcccctacggccactgcacagctggaggagagggcgtggaggtggagctgctgcacaacaccagctacacccggcaggcctgcctggtgtcctgcttccagcagctgatggtggagacctgcagctgtggctactacctgcaccccctgcctgctggagctgagtactgcagcagcgcccggcacccagcctggggccactgcttctaccgcctgtaccaggacctggagacccaccggctgccctgcaccagccgctgcccccggccctgccgggagagcgccttcaagctgagcacaggcaccagccgctggcccagcgccaagtctgctggctggaccctggccaccctgggggagcagggcctgccccaccagagccaccggcagaggagcagcctggccaagatcaacatcgtgtaccaggagctgaactacagatctgtggaggaggcccctgtgtacagcgtgccccagctgctgagcgccatgggcagcctgtgcagcctgtggtttggagcctctgtgctgagcctgctggagctgctggagctgctgctggatgccagcgccctgaccctggtgctgggcggccgccgcctgcggcgggcctggttctcctggccccgggccagccctgccagcggggccagcagcatcaagccagaggccagccagatgcctcctcctgctgggggcaccagtgatgatcctgagcccagcggcccccacctgccccgggtgatgctgcccggggtgctggccggcgtgtctgctgaggagagctgggccggcccccagcccctggagaccctggacacctag

SEQ ID NO: 170070 - DNA, 1917 bp, synthetic construct; identical to SEQ ID NO: 170066
  misc_feature 1..1917: note = Description of Artificial Sequence: Synthetic coding sequence
  source 1..1917: mol_type = other DNA

SEQ ID NO: 170071 - DNA, 1950 bp, synthetic construct
  misc_feature 1..1950: note = Description of Artificial Sequence: Synthetic coding sequence
  source 1..1950: mol_type = other DNA
atggcccctggagagaagatcaaggccaagatcaagaagaacctgcctgtgacaggcccccaggcccccaccatcaaggagctgatgcgctggtactgcctgaacaccaacacccacggctgccgccgcatcgtggtgtcccggggccgcctgcggcggctgctgtggattggcttcaccctgacagctgtggccctgatcctgtggcagtgtgccctgctggtgttctccttctacacagtgtctgtgtccatcaaggtgcacttcaggaagctggacttccctgctgtgaccatctgcaacatcaacccctacaagtacagcacagtgcgccacctgctggccgacctggagcaggagacccgggaggccctgaagagcctgtatggcttccctgagagcaggaagagaagagaggccgagagctggaacagcgtgtctgagggcaagcagccccgcttcagccaccgcatccccctgctgatctttgaccaggatgagaagggcaaggcccgggacttcttcaccggcaggaagaggaaggtgggcggcagcatcatccacaaggccagcaatgtgatgcacatcgagagcaagcaggtggtgggcttccagctgtgcagcaatgacaccagtgactgtgccacctacaccttcagcagcggcatcaatgccatccaggagtggtacaagctgcactacatgaacatcatggcccaggtgcccctggagaagaagatcaacatgagctacagcgctgaggagctgctggtgacctgcttctttgatggagtgtcctgtgatgccaggaacttcaccctcttccaccaccccatgcacggcaactgctacaccttcaacaaccgggagaatgagaccatcctgagcacctccatgggcggctctgaatatggcctgcaggtgatcctgtacatcaatgaggaggagtacaaccccttcctggtgagcagcactggagccaaggtgatcatccaccggcaggatgagtacccctttgtggaggatgtgggcacagaaattgaaacagccatggtgaccagcatcggcatgcacctgacagagagcttcaagctgtctgagccctacagccagtgcacagaagatggcagtgatgtgcccatccggaacatctacaatgctgcctacagcctgcagatctgcctgcacagctgcttccagaccaagatggtggagaagtgtggctgtgcccagtacagccagcccctgcccccagctgccaactactgcaactaccagcagcaccccaactggatgtactgctactaccagctgcaccgggcctttgtgcaggaggagctgggctgccagagcgtgtgcaaggaggcctgcagcttcaaggagtggaccctgaccaccagcctggcccagtggcccagcgtggtgtctgagaagtggctgctgcctgtgctgacctgggaccagggccggcaggtgaacaagaagctgaacaagacagacctggccaagctgctgatcttctacaaggacctgaaccagaggagcatcatggagagccctgccaacagcattgagatgctgctgagcaactttggaggccagctgggcctgtggatgagctgcagcgtggtgtgtgtgattgagatcatcgaggtgttcttcatcgacttcttcagcatcatcgcccggcggcagtggcagaaggccaaggagtggtgggcctggaagcaggccccaccctgcccagaggcccccaggagcccccagggccaggacaacccagccctggacattgatgatgacctgcccaccttcaacagcgccctgcacctgcccccagccctgggcacccaggtgcccggcaccccaccacccaagtacaacaccctgcggctggagcgggccttcagcaaccagctgacagacacccagatgctggatgagctgtag

SEQ ID NO: 170072 - DNA, 5943 bp, synthetic construct
  misc_feature 1..5943: note = Description of Artificial Sequence: Synthetic coding sequence
  source 1..5943: mol_type = other DNA
atggccgcccggctgctggcccctcctggccctgacagcttcaagcccttcaccccagagagcctggccaacattgaaagaagaattgctgagagcaagctgaagaagccacccaaggcagatggcagccaccgggaggatgatgaggacagcaagcccaagcccaacagcgacctggaggccggcaagagcctgcccttcatctatggagacatcccccagggcctggtggccgtgcccctggaggactttgacccctactacctgacccagaagacctttgtggtgctgaacagaggcaagaccctcttccgcttcagcgccaccccagccctgtacatcctgagccccttcaacctgatccgccgcatcgccatcaagatcctgatccacagcgtcttctccatgatcatcatgtgcaccatcctgaccaactgtgtgttcatgaccttcagcaaccccccagactggagcaagaatgtggagtacaccttcaccggcatctacacctttgagagcctggtgaagatcatcgcccggggcttctgcattgatggcttcaccttcctgcgggacccctggaactggctggacttcagcgtcatcatgatggcctacatcacagaatttgtgaacctgggcaatgtgtctgccctgcggaccttccgggtgctgcgggccctgaagaccatcagcgtcatccctggcctgaagaccatcgtgggcgccctgatccagagcgtgaagaagctgagtgatgtgatgatcctgaccgtcttctgcctgtctgtgtttgccctgattggcctgcagctgttcatgggcaacctgaggaacaagtgtgtggtgtggcccatcaacttcaatgaaagctacctggagaatggcaccaagggctttgactgggaggagtacatcaacaacaagaccaacttctacacagtgcccggcatgctggagcccctgctgtgtggcaacagcagtgatgctggccagtgcccagagggctaccagtgcatgaaggccggcaggaaccccaactacggctacaccagctttgacaccttctcctgggccttcctggccctcttccggctgatgacccaggactactgggagaacctgtaccagctgaccctgcgggctgctgggaagacctacatgatcttctttgtgctggtgatctttgtgggcagcttctacctggtgaacctgatcctggccgtggtggccatggcctatgaggagcagaaccaggccaccctggaggaggccgagcagaaggaggccgagttcaaggccatgctggagcagctgaagaagcagcaggaggaggcccaggccgccgccatggccaccagcgctggcaccgtgtctgaagatgccatcgaggaggagggggaggagggcggcggcagccccaggagcagcagcgagatcagcaagctgagcagcaagagcgccaaggagaggaggaacagaaggaagaagaggaagcagaaggagctgtctgagggggaggagaagggggaccctgagaaggtgttcaagtctgagagtgaagatggcatgaggaggaaggccttccggctgcctgacaaccgcatcggcaggaagttcagcatcatgaaccagagcctgctgagcatccctggcagccccttcctgagccgccacaacagcaagagcagcatcttctccttccggggccctggccgcttccgggaccccggctctgaaaatgaatttgctgatgatgagcacagcacagtggaggagagcgagggcagaagagacagcctcttcatccccatccgggcccgggagcggcgcagcagctacagcggctacagcggctacagccagggcagccgcagcagccgcatcttccccagcctgcggcgctctgtgaagaggaacagcacagtggactgcaatggagtggtgtccctcatcggcggccctggcagccacatcggcggccgcctgctgcctgaggccaccacagaggtggagatcaagaagaagggccctggcagcctgctggtgtccatggaccagctggccagctatggcaggaaggaccgcatcaacagcatcatgtctgtggtgaccaacaccctggtggaggagctggaggagagccagaggaagtgccccccctgctggtacaagtttgccaacaccttcctgatctgggagtgccacccctactggatcaagctgaaggagatcgtgaacctgattgtgatggacccctttgtggacctggccatcaccatctgcatcgtgctgaacaccctcttcatggccatggagcaccaccccatgaccccccagtttgaacatgtgctggccgtgggcaacctggtgttcaccggcatcttcaccgctgagatgttcctgaagctgattgccatggacccctactactacttccaggagggctggaacatctttgatggcttcatcgtgtccctgagcctgatggagctgagcctggctgatgtggagggcctgtctgtgctgcgctccttccggctgctgcgggtcttcaagctggccaagtcctggcccaccctgaacatgctgatcaagatcatcggcaacagcgtgggcgccctgggcaacctgaccctggtgctggccatcatcgtgttcatctttgctgtggtgggcatgcagctgtttgggaagagctacaaggaatgtgtgtgcaagatcaaccaggactgtgagctgccccgctggcacatgcatgacttcttccacagcttcctgattgtgttccgggtgctgtgtggggagtggattgagaccatgtgggactgcatggaggtggccggccaggccatgtgcctgattgtgttcatgatggtgatggtgattggcaacctggtggtgctgaacctcttcctggccctgctgctgagcagcttctctgctgacaacctggccgccacagatgatgatggagagatgaacaacctgcagatcagcgtcatccgcatcaagaagggcgtggcctggaccaagctgaaggtgcacgccttcatgcaggcccacttcaagcagcgggaggctgatgaggtgaagcccctggatgagctgtatgagaagaaggccaactgcatcgccaaccacactggagctgacatccacagaaatggagacttccagaagaatggaaatggcaccaccagcggcatcggcagctctgtggagaagtacatcattgatgaggaccacatgtccttcatcaacaaccccaacctgactgtgcgggtgcccatcgctgtgggggagagtgactttgagaacctgaacacagaagatgtgtcctctgagagtgaccctgagggcagcaaggacaagctggatgacaccagcagcagcgagggcagcaccatcgacatcaagccagaggtggaggaggtgcctgtggagcagcctgaggagtacctggaccctgatgcctgcttcacagagggctgtgtgcagcgcttcaagtgctgccaggtgaacatcgaggagggcctgggcaagtcctggtggatcctgaggaagacctgcttcctgattgtggagcacaactggtttgagaccttcatcatcttcatgatcctgctgagcagcggggccctggcctttgaggacatctacatcgagcagaggaagaccatccgcaccatcctggagtatgctgacaaggtgttcacctacatcttcatcctggagatgctgctgaagtggacagcctacggctttgtgaagttcttcaccaatgcctggtgctggctggacttcctgattgtggccgtgtccctggtgtccctcatcgccaatgccctgggctacagcgagctgggcgccatcaagagcctgcggaccctgcgggccctgcggcccctgcgggccctgagcagatttgagggcatgagggtggtggtgaatgccctggtgggcgccatccccagcatcatgaatgtgctgctggtgtgcctgatcttctggctgatcttcagcatcatgggcgtgaacctgtttgctgggaagtaccactactgcttcaatgagaccagcgagatccgctttgaaattgaagatgtgaacaacaagacagaatgtgagaagctgatggagggcaacaacacagagatccgctggaagaatgtgaagatcaactttgacaacgtgggcgccggctacctggccctgctgcaggtggccaccttcaagggctggatggacatcatgtatgctgctgtggacagcaggaagccagatgagcagcccaagtatgaggacaacatctacatgtacatctacttcgtcatcttcatcatcttcggcagcttcttcaccctgaacctcttcatcggggtcatcatcgacaacttcaaccagcagaagaagaagtttggaggccaggacatcttcatgacagaggagcagaagaagtactacaatgccatgaagaagctgggcagcaagaagccccagaagcccatcccccggcccctgaacaagatccagggcatcgtgtttgattttgtgacccagcaggcctttgacatcgtcatcatgatgctgatctgcctgaacatggtgaccatgatggtggagacagacacccagagcaagcagatggagaacatcctgtactggatcaacctggtgtttgtgatcttcttcacctgtgaatgtgtgctgaagatgtttgccctgcggcactactacttcaccatcggctggaacatctttgattttgtggtggtgatcctgagcatcgtgggcatgttcctggccgacatcatcgagaagtactttgtgagccccaccctcttccgggtcatccggctggcccgcatcggccgcatcctgcggctcatcaagggggccaagggcatccgcaccctgctgtttgccctgatgatgagcctgcctgccctcttcaacatcggcctgctgctcttcctggtgatgttcatcttcagcatcttcggcatgagcaactttgcctacgtgaagcatgaggccggcattgatgacatgttcaactttgagacctttggaaacagcatgatctgcctcttccagatcaccaccagcgctggctgggatggcctgctgctgcccatcctgaaccggcccccagactgcagcctggacaaggagcaccctggcagcggcttcaagggggactgtggcaaccccagcgtgggcatcttcttctttgtgtcctacatcatcatctccttcctgattgtggtgaacatgtacatcgccatcatcctggagaacttctctgtggccacagaggagagcgctgaccccctgtctgaagatgactttgagaccttctatgagatctgggagaagtttgatcctgatgccacccagttcatcgagtactgcaagctggccgactttgctgatgccctggagcaccccctgcgggtgcccaagcccaacaccatcgagctgattgccatggacctgcccatggtgtctggggaccgcatccactgcctggacatcctgtttgccttcaccaagagggtgctgggggacagcggggagctggacatcctgcggcagcagatggaggagagatttgtggccagcaaccccagcaaggtgtcctatgagcccatcaccaccaccctgcggaggaagcaggaggaggtgtctgctgtggtgctgcagagggcctaccggggccacctggcccggcggggcttcatctgcaagaagaccaccagcaacaagctggagaatggaggcacccaccgggagaagaaggagagcacccccagcacagccagcctgcccagctatgattctgtgaccaagccagagaaggagaagcagcagagagctgaggagggcagaagagagcgggccaagaggcagaaggaggtgcgggagagcaaatgttag

SEQ ID NO: 170073 - DNA, 4674 bp, synthetic construct
  misc_feature 1..4674: note = Description of Artificial Sequence: Synthetic coding sequence
  source 1..4674: mol_type = other DNA
atggccgcccggctgctggcccctcctggccctgacagcttcaagcccttcaccccagagagcctggccaacattgaaagaagaattgctgagagcaagctgaagaagccacccaaggcagatggcagccaccgggaggatgatgaggacagcaagcccaagcccaacagcgacctggaggccggcaagagcctgcccttcatctatggagacatcccccagggcctggtggccgtgcccctggaggactttgacccctactacctgacccagaagacctttgtggtgctgaacagaggcaagaccctcttccgcttcagcgccaccccagccctgtacatcctgagccccttcaacctgatccgccgcatcgccatcaagatcctgatccacagcgtcttctccatgatcatcatgtgcaccatcctgaccaactgtgtgttcatgaccttcagcaaccccccagactggagcaagaatgtggagtacaccttcaccggcatctacacctttgagagcctggtgaagatcatcgcccggggcttctgcattgatggcttcaccttcctgcgggacccctggaactggctggacttcagcgtcatcatgatggcctacatcacagaatttgtgaacctgggcaatgtgtctgccctgcggaccttccgggtgctgcgggccctgaagaccatcagcgtcatccctggcctgaagaccatcgtgggcgccctgatccagagcgtgaagaagctgagtgatgtgatgatcctgaccgtcttctgcctgtctgtgtttgccctgattggcctgcagctgttcatgggcaacctgaggaacaagtgtgtggtgtggcccatcaacttcaatgaaagctacctggagaatggcaccaagggctttgactgggaggagtacatcaacaacaagaccaacttctacacagtgcccggcatgctggagcccctgctgtgtggcaacagcagtgatgctggccagtgcccagagggctaccagtgcatgaaggccggcaggaaccccaactacggctacaccagctttgacaccttctcctgggccttcctggccctcttccggctgatgacccaggactactgggagaacctgtaccagctgaccctgcgggctgctgggaagacctacatgatcttctttgtgctggtgatctttgtgggcagcttctacctggtgaacctgatcctggccgtggtggccatggcctatgaggagcagaaccaggccaccctggaggaggccgagcagaaggaggccgagttcaaggccatgctggagcagctgaagaagcagcaggaggaggcccaggccgccgccatggccaccagcgctggcaccgtgtctgaagatgccatcgaggaggagggggaggagggcggcggcagccccaggagcagcagcgagatcagcaagctgagcagcaagagcgccaaggagaggaggaacagaaggaagaagaggaagcagaaggagctgtctgagggggaggagaagggggaccctgagaaggtgttcaagtctgagagtgaagatggcatgaggaggaaggccttccggctgcctgacaaccgcatcggcaggaagttcagcatcatgaaccagagcctgctgagcatccctggcagccccttcctgagccgccacaacagcaagagcagcatcttctccttccggggccctggccgcttccgggaccccggctctgaaaatgaatttgctgatgatgagcacagcacagtggaggagagcgagggcagaagagacagcctcttcatccccatccgggcccgggagcggcgcagcagctacagcggctacagcggctacagccagggcagccgcagcagccgcatcttccccagcctgcggcgctctgtgaagaggaacagcacagtggactgcaatggagtggtgtccctcatcggcggccctggcagccacatcggcggccgcctgctgcctgaggccaccacagaggtggagatcaagaagaagggccctggcagcctgctggtgtccatggaccagctggccagctatggcaggaaggaccgcatcaacagcatcatgtctgtggtgaccaacaccctggtggaggagctggaggagagccagaggaagtgccccccctgctggtacaagtttgccaacaccttcctgatctgggagtgccacccctactggatcaagctgaaggagatcgtgaacctgattgtgatggacccctttgtggacctggccatcaccatctgcatcgtgctgaacaccctcttcatggccatggagcaccaccccatgaccccccagtttgaacatgtgctggccgtgggcaacctggtgttcaccggcatcttcaccgctgagatgttcctgaagctgattgccatggacccctactactacttccaggagggctggaacatctttgatggcttcatcgtgtccctgagcctgatggagctgagcctggctgatgtggagggcctgtctgtgctgcgctccttccggctgctgcgggtcttcaagctggccaagtcctggcccaccctgaacatgctgatcaagatcatcggcaacagcgtgggcgccctgggcaacctgaccctggtgctggccatcatcgtgttcatctttgctgtggtgggcatgcagctgtttgggaagagctacaaggaatgtgtgtgcaagatcaaccaggactgtgagctgccccgctggcacatgcatgacttcttccacagcttcctgattgtgttccgggtgctgtgtggggagtggattgagaccatgtgggactgcatggaggtggccggccaggccatgtgcctgattgtgttcatgatggtgatggtgattggcaacctggtggtgctgaacctcttcctggccctgctgctgagcagcttctctgctgacaacctggccgccacagatgatgatggagagatgaacaacctgcagatcagcgtcatccgcatcaagaagggcgtggcctggaccaagctgaaggtgcacgccttcatgcaggcccacttcaagcagcgggaggctgatgaggtgaagcccctggatgagctgtatgagaagaaggccaactgcatcgccaaccacactggagctgacatccacagaaatggagacttccagaagaatggaaatggcaccaccagcggcatcggcagctctgtggagaagtacatcattgatgaggaccacatgtccttcatcaacaaccccaacctgactgtgcgggtgcccatcgctgtgggggagagtgactttgagaacctgaacacagaagatgtgtcctctgagagtgaccctgagggcagcaaggacaagctggatgacaccagcagcagcgagggcagcaccatcgacatcaagccagaggtggaggaggtgcctgtggagcagcctgaggagtacctggaccctgatgcctgcttcacagagggctgtgtgcagcgcttcaagtgctgccaggtgaacatcgaggagggcctgggcaagtcctggtggatcctgaggaagacctgcttcctgattgtggagcacaactggtttgagaccttcatcatcttcatgatcctgctgagcagcggggccctggcctttgaggacatctacatcgagcagaggaagaccatccgcaccatcctggagtatgctgacaaggtgttcacctacatcttcatcctggagatgctgctgaagtggacagcctacggctttgtgaagttcttcaccaatgcctggtgctggctggacttcctgattgtggccgtggtggtgaatgccctggtgggcgccatccccagcatcatgaatgtgctgctggtgtgcctgatcttctggctgatcttcagcatcatgggcgtgaacctgtttgctgggaagtaccactactgcttcaatgagaccagcgagatccgctttgaaattgaagatgtgaacaacaagacagaatgtgagaagctgatggagggcaacaacacagagatccgctggaagaatgtgaagatcaactttgacaacgtgggcgccggctacctggccctgctgcaggtggccaccttcaagggctggatggacatcatgtatgctgctgtggacagcaggaagccagatgagcagcccaagtatgaggacaacatctacatgtacatctactttgtgatcttcatcatcttcggcagcttcttcaccctgaacctcttcatcggggtcatcatcgacaacttcaaccagcagaagaagaagtttggaggccaggacatcttcatgacagaggagcagaagaagtactacaatgccatgaagaagctgggcagcaagaagccccagaagcccatcccccggcccctgaacaagatccagggcatcgtgtttgattttgtgacccagcaggcctttgatattgtcatcatgatgctgatctgcctgaacatggtgaccatgatggtggagacagacacccagagcaagcagatggagaacatcctgtactggatcaacctggtgtttgtgatcttcttcacctgtgaatgtgtgctgaagatgtttgccctgcggcactactacttcaccatcggctggaacatctttgattttgtggtggtgatcctgagcatcgtgtag

SEQ ID NO: 170074 - DNA, 3588 bp, synthetic construct
  misc_feature 1..3588: note = Description of Artificial Sequence: Synthetic coding sequence
  source 1..3588: mol_type = other DNA
ttcctgagcccccagacctttgtggtgctgaacagaggcaagaccctcttccgcttcagcgccaccccagccctgtacatcctgagccccttcaacctgatcagaagaattgccatcaagatcctgatccacagcctcttctccatgatcatcatgtgcaccatcctgaccaactgtgtgttcatgaccttcagcaaccccccagactggagcaagaatgtggagtacaccttcaccggcatctacacctttgagagcctggtgaagatcatcgcccggggcttctgcattgatggcttcaccttcctgcgggacccctggaactggctggacttcagcgtcatcatgatggcctacatcacagaatttgtgaacctgggcaatgtgtctgccctgcggaccttccgggtgctgcgggccctgaagaccatcagcgtcatccctggcctgaagaccatcgtgggcgccctgatccagagcgtgaagaagctgagtgatgtgatgatcctgactgtgttctgcctgtctgtgtttgccctgattggcctgcagctgttcatgggcaacctgagaaataaatgtgtggtgtggcccatcaacttcaatgaaagctacctggagaatggcaccaagggctttgactgggaggagtacatcaacaacaagaccaacttctacacagtgcccggcatgctggagcccctgctgtgtggcaacagcagtgatgctggccagtgcccagagggctaccagtgcatgaaggccggcaggaaccccaactacggctacaccagctttgacaccttctcctgggccttcctggccctcttccggctgatgacccaggactactgggagaacctgtaccagctgaccctgcgggccgccggcaagacctacatgatcttctttgtgctggtgatctttgtgggcagcttctacctggtgaacctgatcctggccgtggtggccatggcctatgaggagcagaaccaggccaccctggaggaggccgagcagaaggaggccgagttcaaggccatgctggagcagctgaagaagcagcaggaggaggcccaggccgccgccatggccaccagcgctggcaccgtgtctgaagatgccatcgaggaggagggggaggagggcggcggcagccccaggagcagcagcgagatcagcaagctgagcagcaagagcgccaaggagaggaggaacagaaggaagaagaggaagcagaaggagctgtctgagggggaggagaagggggaccctgagaaggtgttcaagtctgagagtgaagatggcatgaggaggaaggccttccggctgcctgacaacagaattggaaggaagttcagcatcatgaaccagagcctgctgagcatccctggcagccccttcctgagccgccacaacagcaagagcagcatcttctccttccggggccctggccgcttccgggaccccggctctgaaaatgaatttgctgatgatgagcacagcacagtggaggagagcgagggccggcgggacagcctcttcatccccatccgggcccgggagaggaggagcagctacagcggctacagcggctacagccagggcagccgcagcagccgcatcttccccagcctgcggcgctctgtgaagaggaacagcacagtggactgcaatggagtggtgtccctgattggaggccctggcagccacatcggcggccgcctgctgcctgaggccaccacagaggtggagatcaagaagaagggccctggcagcctgctggtgtccatggaccagctggccagctatggcaggaaggaccgcatcaacagcatcatgtctgtggtgaccaacaccctggtggaggagctggaggagagccagaggaaatgtcctccctgctggtacaagtttgccaacaccttcctgatctgggagtgccacccctactggatcaagctgaaggagatcgtgaacctgattgtgatggacccctttgtggacctggccatcaccatctgcatcgtgctgaacaccctcttcatggccatggagcaccaccccatgaccccccagtttgagcacgtgctggccgtgggcaacctggtgttcaccggcatcttcaccgctgagatgttcctgaagctgattgccatggacccctactactacttccaggagggctggaacatctttgatggcttcatcgtgtccctgagcctgatggagctgagcctggctgatgtggagggcctgtctgtgctgcggagcttccggctgctgcgggtcttcaagctggccaagtcctggcccaccctgaacatgctgatcaagatcatcggcaacagcgtgggcgccctgggcaacctgaccctggtgctggccatcatcgtgttcatctttgctgtggtgggcatgcagctgtttgggaagagctacaaggaatgtgtgtgcaagatcaaccaggactgtgagctgccccgctggcacatgcatgacttcttccacagcttcctgattgtgttccgggtgctgtgtggggagtggattgagaccatgtgggactgcatggaggtggccggccaggccatgtgcctgattgtgttcatgatggtgatggtgattggcaacctggtggtgctgaacctcttcctggccctgctgctgagcagcttctctgctgacaacctggccgccacagatgatgatggagagatgaacaacctgcagatcagcgtcatccgcatcaagaagggcgtggcctggaccaagctgaaggtgcacgccttcatgcaggcccacttcaagcagcgggaggctgatgaggtgaagcccctggatgagctgtatgagaagaaggccaactgcatcgccaaccacactggagctgacatccacagaaatggagacttccagaagaatggaaatggcaccaccagcggcatcggcagctctgtggagaagtacatcattgatgaggaccacatgtccttcatcaacaaccccaacctgactgtgcgggtgcccatcgctgtgggggagagtgactttgagaacctgaacacagaagatgtgagcagcgagagtgaccctgagggcagcaaggacaagctggatgacaccagcagcagcgagggcagcaccatcgacatcaagccagaggtggaggaggtgcctgtggagcagcctgaggagtacctggaccctgatgcctgcttcacagagggctgtgtgcagcgcttcaagtgctgccaggtgaacatcgaggagggcctgggcaagtcctggtggatcctgaggaagacctgcttcctgattgtggagcacaactggtttgagaccttcatcatcttcatgatcctgctgagcagcggggccctggcctttgaggacatctacatcgagcagaggaagaccatccgcaccatcctggagtatgctgacaaggtgttcacctacatcttcatcctggagatgctgctgaagtggacagcctacggctttgtgaagttcttcaccaatgcctggtgctggctggacttcctgattgtggccgtgcccctgaacctgagcggcctcatctag

SEQ ID NO: 170075 - DNA, 5820 bp, synthetic construct
  misc_feature 1..5820: note = Description of Artificial Sequence: Synthetic coding sequence
  source 1..5820: mol_type = other DNA
atggccgcccggctgctggcccctcctggccctgacagcttcaagcccttcaccccagagagcctggccaacattgaaagaagaattgctgagagcaagctgaagaagccacccaaggcagatggcagccaccgggaggatgatgaggacagcaagcccaagcccaacagcgacctggaggccggcaagagcctgcccttcatctatggagacatcccccagggcctggtggccgtgcccctggaggactttgacccctactacctgacccagaagacctttgtggtgctgaacagaggcaagaccctcttccgcttcagcgccaccccagccctgtacatcctgagccccttcaacctgatccgccgcatcgccatcaagatcctgatccacagcgtcttctccatgatcatcatgtgcaccatcctgaccaactgtgtgttcatgaccttcagcaaccccccagactggagcaagaatgtggagtacaccttcaccggcatctacacctttgagagcctggtgaagatcatcgcccggggcttctgcattgatggcttcaccttcctgcgggacccctggaactggctggacttcagcgtcatcatgatggcctacatcacagaatttgtgaacctgggcaatgtgtctgccctgcggaccttccgggtgctgcgggccctgaagaccatcagcgtcatccctggcctgaagaccatcgtgggcgccctgatccagagcgtgaagaagctgagtgatgtgatgatcctgaccgtcttctgcctgtctgtgtttgccctgattggcctgcagctgttcatgggcaacctgaggaacaagtgtgtggtgtggcccatcaacttcaatgaaagctacctggagaatggcaccaagggctttgactgggaggagtacatcaacaacaagaccaacttctacacagtgcccggcatgctggagcccctgctgtgtggcaacagcagtgatgctggccagtgcccagagggctaccagtgcatgaaggccggcaggaaccccaactacggctacaccagctttgacaccttctcctgggccttcctggccctcttccggctgatgacccaggactactgggagaacctgtaccagctgaccctgcgggctgctgggaagacctacatgatcttctttgtgctggtgatctttgtgggcagcttctacctggtgaacctgatcctggccgtggtggccatggcctatgaggagcagaaccaggccaccctggaggaggccgagcagaaggaggccgagttcaaggccatgctggagcagctgaagaagcagcaggaggaggcccaggccgccgccatggccaccagcgctggcaccgtgtctgaagatgccatcgaggaggagggggaggagggcggcggcagccccaggagcagcagcgagatcagcaagctgagcagcaagagcgccaaggagaggaggaacagaaggaagaagaggaagcagaaggagctgtctgagggggaggagaagggggaccctgagaaggtgttcaagtctgagagtgaagatggcatgaggaggaaggccttccggctgcctgacaaccgcatcggcaggaagttcagcatcatgaaccagagcctgctgagcatccctggcagccccttcctgagccgccacaacagcaagagcagcatcttctccttccggggccctggccgcttccgggaccccggctctgaaaatgaatttgctgatgatgagcacagcacagtggaggagagcgagggcagaagagacagcctcttcatccccatccgggcccgggagcggcgcagcagctacagcggctacagcggctacagccagggcagccgcagcagccgcatcttccccagcctgcggcgctctgtgaagaggaacagcacagtggactgcaatggagtggtgtccctcatcggcggccctggcagccacatcggcggccgcctgctgcctgaggccaccacagaggtggagatcaagaagaagggccctggcagcctgctggtgtccatggaccagctggccagctatggcaggaaggaccgcatcaacagcatcatgtctgtggtgaccaacaccctggtggaggagctggaggagagccagaggaagtgccccccctgctggtacaagtttgccaacaccttcctgatctgggagtgccacccctactggatcaagctgaaggagatcgtgaacctgattgtgatggacccctttgtggacctggccatcaccatctgcatcgtgctgaacaccctcttcatggccatggagcaccaccccatgaccccccagtttgaacatgtgctggccgtgggcaacctggtgttcaccggcatcttcaccgctgagatgttcctgaagctgattgccatggacccctactactacttccaggagggctggaacatctttgatggcttcatcgtgtccctgagcctgatggagctgagcctggctgatgtggagggcctgtctgtgctgcgctccttccggctgctgcgggtcttcaagctggccaagtcctggcccaccctgaacatgctgatcaagatcatcggcaacagcgtgggcgccctgggcaacctgaccctggtgctggccatcatcgtgttcatctttgctgtggtgggcatgcagctgtttgggaagagctacaaggaatgtgtgtgcaagatcaaccaggactgtgagctgccccgctggcacatgcatgacttcttccacagcttcctgattgtgttccgggtgctgtgtggggagtggattgagaccatgtgggactgcatggaggtggccggccaggccatgtgcctgattgtgttcatgatggtgatggtgattggcaacctggtggtgctgaacctcttcctggccctgctgctgagcagcttctctgctgacaacctggccgccacagatgatgatggagagatgaacaacctgcagatcagcgtcatccgcatcaagaagggcgtggcctggaccaagctgaaggtgcacgccttcatgcaggcccacttcaagcagcgggaggctgatgaggtgaagcccctggatgagctgtatgagaagaaggccaactgcatcgccaaccacactggagctgacatccacagaaatggagacttccagaagaatggaaatggcaccaccagcggcatcggcagctctgtggagaagtacatcattgatgaggaccacatgtccttcatcaacaaccccaacctgactgtgcgggtgcccatcgctgtgggggagagtgactttgagaacctgaacacagaagatgtgtcctctgagagtgaccctgagggcagcaaggacaagctggatgacaccagcagcagcgagggcagcaccatcgacatcaagccagaggtggaggaggtgcctgtggagcagcctgaggagtacctggaccctgatgcctgcttcacagagggctgtgtgcagcgcttcaagtgctgccaggtgaacatcgaggagggcctgggcaagtcctggtggatcctgaggaagacctgcttcctgattgtggagcacaactggtttgagaccttcatcatcttcatgatcctgctgagcagcggggccctggcctttgaggacatctacatcgagcagaggaagaccatccgcaccatcctggagtatgctgacaaggtgttcacctacatcttcatcctggagatgctgctgaagtggacagcctacggctttgtgaagttcttcaccaatgcctggtgctggctggacttcctgattgtggccgtggtggtgaatgccctggtgggcgccatccccagcatcatgaatgtgctgctggtgtgcctgatcttctggctgatcttcagcatcatgggcgtgaacctgtttgctgggaagtaccactactgcttcaatgagaccagcgagatccgctttgaaattgaagatgtgaacaacaagacagaatgtgagaagctgatggagggcaacaacacagagatccgctggaagaatgtgaagatcaactttgacaacgtgggcgccggctacctggccctgctgcaggtggccaccttcaagggctggatggacatcatgtatgctgctgtggacagcaggaagccagatgagcagcccaagtatgaggacaacatctacatgtacatctactttgtgatcttcatcatcttcggcagcttcttcaccctgaacctcttcatcggggtcatcatcgacaacttcaaccagcagaagaagaagtttggaggccaggacatcttcatgacagaggagcagaagaagtactacaatgccatgaagaagctgggcagcaagaagccccagaagcccatcccccggcccctgaacaagatccagggcatcgtgtttgattttgtgacccagcaggcctttgatattgtcatcatgatgctgatctgcctgaacatggtgaccatgatggtggagacagacacccagagcaagcagatggagaacatcctgtactggatcaacctggtgtttgtgatcttcttcacctgtgaatgtgtgctgaagatgtttgccctgcggcactactacttcaccatcggctggaacatctttgattttgtggtggtgatcctgagcatcgtgggcatgttcctggccgacatcatcgagaagtactttgtgagccccaccctcttccgggtcatccggctggccagaattggccgcatcctgcggctcatcaagggggccaagggcatccgcaccctgctgtttgccctgatgatgagcctgcctgccctcttcaacatcggcctgctgctcttcctggtgatgttcatcttcagcatcttcggcatgagcaactttgcctacgtgaagcatgaagctggcattgatgacatgttcaactttgagaccttcggcaacagcatgatctgcctcttccagatcaccaccagcgctggctgggatggcctgctgctgcccatcctgaacagacctccagactgcagcctggacaaggagcaccctggcagcggcttcaagggggactgtggcaaccccagcgtgggcatcttcttctttgtgtcctacatcatcatctccttcctgattgtggtgaacatgtacatcgccatcatcctggagaacttctctgtggccacagaggagagcgctgaccccctgtctgaagatgactttgagaccttctatgagatctgggagaagtttgatcctgatgccacccagttcatcgagtactgcaagctggccgactttgctgatgccctggagcaccccctgcgggtgcccaagcccaacaccatcgagctgattgccatggacctgcccatggtgtctggggaccgcatccactgcctggacatcctgtttgccttcaccaagagggtgctgggggacagcggggagctggacatcctgcggcagcagatggaggagagatttgtggccagcaaccccagcaaggtgtcctatgagcccatcaccaccaccctgcggaggaagcaggaggaggtgtctgctgtggtgctgcagagggcctaccggggccacctggcccggcggggcttcatctgcaagaagaccaccagcaacaagctggagaatggaggcacccaccgggagaagaaggagagcacccccagcacagccagcctgcccagctatgacagcgtgaccaagccagagaaggagaagcagcagagagctgaggagggccggcgggagcgggccaagaggcagaaggaggtgcgggagagcaagtgctag

SEQ ID NO: 170076 - DNA, 2919 bp, synthetic construct
  misc_feature 1..2919: note = Description of Artificial Sequence: Synthetic coding sequence
  source 1..2919: mol_type = other DNA
atggccgcccggctgctggcccctcctggccctgacagcttcaagcccttcaccccagagagcctggccaacattgaaagaagaattgctgagagcaagctgaagaagccacccaaggcagatggcagccaccgggaggatgatgaggacagcaagcccaagcccaacagcgacctggaggccggcaagagcctgcccttcatctatggagacatcccccagggcctggtggccgtgcccctggaggactttgacccctactacctgacccagaagacctttgtggtgctgaacagaggcaagaccctcttccgcttcagcgccaccccagccctgtacatcctgagccccttcaacctgatccgccgcatcgccatcaagatcctgatccacagcgtcttctccatgatcatcatgtgcaccatcctgaccaactgtgtgttcatgaccttcagcaaccccccagactggagcaagaatgtggagtacaccttcaccggcatctacacctttgagagcctggtgaagatcatcgcccggggcttctgcattgatggcttcaccttcctgcgggacccctggaactggctggacttcagcgtcatcatgatggcctacgtgacagaatttgtggacctgggcaatgtgtctgccctgcggaccttccgggtgctgcgggccctgaagaccatcagcgtcatccctggcctgaagaccatcgtgggcgccctgatccagagcgtgaagaagctgagtgatgtgatgatcctgaccgtcttctgcctgtctgtgtttgccctgattggcctgcagctgttcatgggcaacctgaggaacaagtgtgtggtgtggcccatcaacttcaatgaaagctacctggagaatggcaccaagggctttgactgggaggagtacatcaacaacaagaccaacttctacacagtgcccggcatgctggagcccctgctgtgtggcaacagcagtgatgctggccagtgcccagagggctaccagtgcatgaaggccggcaggaaccccaactacggctacaccagctttgacaccttctcctgggccttcctggccctcttccggctgatgacccaggactactgggagaacctgtaccagctgaccctgcgggctgctgggaagacctacatgatcttctttgtgctggtgatctttgtgggcagcttctacctggtgaacctgatcctggccgtggtggccatggcctatgaggagcagaaccaggccaccctggaggaggccgagcagaaggaggccgagttcaaggccatgctggagcagctgaagaagcagcaggaggaggcccaggccgccgccatggccaccagcgctggcaccgtgtctgaagatgccatcgaggaggagggggaggagggcggcggcagccccaggagcagcagcgagatcagcaagctgagcagcaagagcgccaaggagaggaggaacagaaggaagaagaggaagcagaaggagctgtctgagggggaggagaagggggaccctgagaaggtgttcaagtctgagagtgaagatggcatgaggaggaaggccttccggctgcctgacaaccgcatcggcaggaagttcagcatcatgaaccagagcctgctgagcatccctggcagccccttcctgagccgccacaacagcaagagcagcatcttctccttccggggccctggccgcttccgggaccccggctctgaaaatgaatttgctgatgatgagcacagcacagtggaggagagcgagggcagaagagacagcctcttcatccccatccgggcccgggagcggcgcagcagctacagcggctacagcggctacagccagggcagccgcagcagccgcatcttccccagcctgcggcgctctgtgaagaggaacagcacagtggactgcaatggagtggtgtccctcatcggcggccctggcagccacatcggcggccgcctgctgcctgaggccaccacagaggtggagatcaagaagaagggccctggcagcctgctggtgtccatggaccagctggccagctatggcaggaaggaccgcatcaacagcatcatgtctgtggtgaccaacaccctggtggaggagctggaggagagccagaggaagtgccccccctgctggtacaagtttgccaacaccttcctgatctgggagtgccacccctactggatcaagctgaaggagatcgtgaacctgattgtgatggacccctttgtggacctggccatcaccatctgcatcgtgctgaacaccctcttcatggccatggagcaccaccccatgaccccccagtttgaacatgtgctggccgtgggcaacctggtgttcaccggcatcttcaccgctgagatgttcctgaagctgattgccatggacccctactactacttccaggagggctggaacatctttgatggcttcatcgtgtccctgagcctgatggagctgagcctggctgatgtggagggcctgtctgtgctgcgctccttccggctgctgcgggtcttcaagctggccaagtcctggcccaccctgaacatgctgatcaagatcatcggcaacagcgtgggcgccctgggcaacctgaccctggtgctggccatcatcgtgttcatctttgctgtggtgggcatgcagctgtttgggaagagctacaaggaatgtgtgtgcaagatcaaccaggactgtgagctgccccgctggcacatgcatgacttcttccacagcttcctgattgtgttccgggtgctgtgtggggagtggattgagaccatgtgggactgcatggaggtggccggccaggccatgtgcctgattgtgttcatgatggtgatggtgattggcaacctggtggtgtccaccaacctgtag

SEQ ID NO: 170077 - DNA, 6030 bp, synthetic construct
  misc_feature 1..6030: note = Description of Artificial Sequence: Synthetic coding sequence
  source 1..6030: mol_type = other DNA
atggagcagacagtgctggtgcccccaggccctgacagcttcaacttcttcacccgggagagcctggccgccattgaaagaagaattgctgaggagaaggccaagaaccccaagccagacaagaaggatgatgatgaaaatggccccaagcccaacagcgacctggaggccggcaagaacctgcccttcatctatggagacatccccccagagatggtgtctgagcccctggaggacctggacccctactacatcaacaagaagaccttcatcgtgctgaacaagggcaaggccatcttccgcttcagcgccaccagcgccctgtacatcctgacccccttcaaccccctgaggaagatcgccatcaagatcctggtgcacagcctcttctccatgctgatcatgtgcaccatcctgaccaactgtgtgttcatgaccatgagcaaccccccagactggaccaagaatgtggagtacaccttcaccggcatctacacctttgagagcctcatcaagatcatcgcccggggcttctgcctggaggacttcaccttcctgcgggacccctggaactggctggacttcaccgtcatcacctttgcctacgtgacagaatttgtggacctgggcaatgtgtctgccctgcggaccttccgggtgctgcgggccctgaagaccatcagcgtcatccctggcctgaagaccatcgtgggcgccctgatccagagcgtgaagaagctgagtgatgtgatgatcctgaccgtcttctgcctgtctgtgtttgccctgattggcctgcagctgttcatgggcaacctgaggaacaagtgcatccagtggccacccaccaatgccagcctggaggagcacagcattgagaagaacatcaccgtgaactacaacggcaccctcatcaatgagaccgtgtttgaatttgactggaagagctacatccaggacagccgctaccactacttcctggagggcttcctggatgccctgctgtgtggcaacagcagtgatgctggccagtgcccagagggctacatgtgtgtgaaggccggcaggaaccccaactacggctacaccagctttgacaccttctcctgggccttcctgagcctcttccggctgatgacccaggacttctgggagaacctgtaccagctgaccctgcgggctgctgggaagacctacatgatcttctttgtgctggtgatcttcctgggcagcttctacctgatcaacctgatcctggccgtggtggccatggcctatgaggagcagaaccaggccaccctggaggaggccgagcagaaggaggccgagttccagcagatgattgagcagctgaagaagcagcaggaggccgcccagcaggccgccacagccacagccagcgagcacagccgggagcccagcgctgctggccgcctgagtgacagcagcagcgaggccagcaagctgagcagcaagagcgccaaggagaggaggaacagaaggaagaagaggaagcagaaggagcagagcggcggggaggagaaggatgaagatgagttccagaagtctgagagcgaggacagcatccggaggaagggcttccgcttcagcattgagggcaaccggctgacctatgagaagcgctacagcagcccccaccagagcctgctgagcatccggggcagcctcttcagccccaggaggaacagcaggaccagcctcttctccttccggggccgggccaaggatgtgggctctgaaaatgactttgctgatgatgagcacagcacctttgaagataatgaaagccggcgggacagcctgtttgtgccccggcggcacggggagaggaggaacagcaacctgagccagaccagccgcagcagcaggatgctggccgtgtttcctgccaacgggaagatgcacagcacagtggactgcaatggagtggtgtccctggtgggcggccccagcgtgcccaccagccctgtgggccagctgctgcctgaggtgatcatcgacaagccagccacagatgacaatggcaccaccacagaaacagagatgaggaagaggaggagcagcagcttccacgtgtccatggacttcctggaggaccccagccagaggcagagggccatgagcatcgccagcatcctgaccaacacagtggaggagctggaggagagccggcagaagtgccccccctgctggtacaagttcagcaacatcttcctgatctgggactgcagcccctactggctgaaggtgaagcacgtggtgaacctggtggtgatggacccctttgtggacctggccatcaccatctgcatcgtgctgaacaccctcttcatggccatggagcactaccccatgacagaccacttcaacaacgtgctgactgtgggcaacctggtgttcaccggcatcttcaccgctgagatgttcctgaagatcatcgccatggacccctactactacttccaggagggctggaacatctttgatggcttcatcgtgaccctgagcctggtggagctgggcctggccaacgtggagggcctgtctgtgctgcggagcttccggctgctgcgggtcttcaagctggccaagtcctggcccaccctgaacatgctgatcaagatcatcggcaacagcgtgggcgccctgggcaacctgaccctggtgctggccatcatcgtgttcatctttgctgtggtgggcatgcagctgtttgggaagagctacaaggactgtgtgtgcaagatcgccagtgactgccagctgccccgctggcacatgaatgacttcttccacagcttcctgattgtgttccgggtgctgtgtggggagtggattgagaccatgtgggactgcatggaggtggccggccaggccatgtgcctgaccgtcttcatgatggtgatggtgattggcaacctggtggtgctgaacctcttcctggccctgctgctgagcagcttctctgctgacaacctggccgccacagatgatgacaatgagatgaacaacctgcagattgctgtggacaggatgcacaagggcgtggcctacgtgaagaggaagatctatgagttcatccagcagagcttcatcaggaagcagaagatcctggatgagatcaagcccctggatgacctgaacaacaagaaggacagctgcatgagcaaccacacagctgagatcggcaaggacctggactacctgaaggatgtgaatggcaccaccagcggcatcggcaccggcagctctgtggagaagtacatcattgatgaaagtgactacatgtccttcatcaacaaccccagcctgactgtgacagtgcccatcgctgtgggggagagtgactttgagaacctgaacacagaggacttcagcagcgagagtgacctggaggagagcaaggagaagctgaatgaaagcagcagcagcagcgagggcagcacagtggacattggagcccctgtggaggagcagcctgtggtggagcctgaggagaccctggagcctgaggcctgcttcacagagggctgtgtgcagcgcttcaagtgctgccagatcaacgtggaggagggccggggcaagcagtggtggaacctgcggaggacctgcttccgcatcgtggagcacaactggtttgagaccttcatcgtgttcatgatcctgctgagcagcggggccctggcctttgaggacatctacatcgaccagaggaagaccatcaagaccatgctggagtatgctgacaaggtgttcacctacatcttcatcctggagatgctgctgaagtgggtggcctacggctaccagacctacttcaccaatgcctggtgctggctggacttcctgattgtggatgtgtccctggtgtccctgacagccaatgccctgggctacagcgagctgggcgccatcaagagcctgcggaccctgcgggccctgcggcccctgcgggccctgagcagatttgagggcatgagggtggtggtgaatgccctgctgggcgccatccccagcatcatgaatgtgctgctggtgtgcctgatcttctggctgatcttcagcatcatgggcgtgaacctgtttgctgggaagttctaccactgcatcaacaccaccactggagacagatttgatattgaagatgtgaacaaccacacagactgcctgaagctgattgaaagaaatgaaacagcccgctggaagaatgtgaaggtgaactttgacaacgtgggcttcggctacctgagcctgctgcaggtggccaccttcaagggctggatggacatcatgtatgctgctgtggacagcagaaatgtggagctgcagcccaagtatgaggagagcctgtacatgtacctgtactttgtgatcttcatcatcttcggcagcttcttcaccctgaacctcttcatcggggtcatcatcgacaacttcaaccagcagaagaagaagtttggaggccaggacatcttcatgacagaggagcagaagaagtactacaatgccatgaagaagctgggcagcaagaagccccagaagcccatcccccggcccggcaacaagttccagggcatggtgtttgattttgtgacccggcaggtgtttgacatcagcatcatgatcctgatctgcctgaacatggtgaccatgatggtggagacagatgaccagagtgaatatgtgaccaccatcctgagccgcatcaacctggtgttcatcgtgctcttcaccggagaatgtgtgctgaagctgatcagcctgcggcactactacttcaccatcggctggaacatctttgattttgtggtggtgatcctgagcatcgtgggcatgttcctggccgagctgattgagaagtactttgtgagccccaccctcttccgggtcatccggctggccagaattggccgcatcctgcggctcatcaagggggccaagggcatccgcaccctgctgtttgccctgatgatgagcctgcctgccctcttcaacatcggcctgctgctcttcctggtgatgttcatctatgccatcttcggcatgagcaactttgcctacgtgaagcgggaggtgggcattgatgacatgttcaactttgagaccttcggcaacagcatgatctgcctcttccagatcaccaccagcgctggctgggatggcctgctggcccccatcctgaacagcaagcccccagactgtgaccccaacaaggtgaaccctggcagctctgtgaagggggactgtggcaaccccagcgtgggcatcttcttctttgtgtcctacatcatcatctccttcctggtggtggtgaacatgtacatcgctgtgatcctggagaacttctctgtggccacagaggagagcgctgagcccctgtctgaagatgactttgagatgttttatgaggtgtgggagaagtttgatcctgatgccacccagttcatggagtttgagaagctgagccagtttgctgctgccctggagccccccctgaacctgccccagcccaacaagctgcagctgattgccatggacctgcccatggtgtctggggaccgcatccactgcctggacatcctgtttgccttcaccaagagggtgctgggggagagcggggagatggatgccctgcgcatccagatggaggagcgcttcatggccagcaaccccagcaaggtgtcctaccagcccatcaccaccaccctgaagaggaagcaggaggaggtgtctgctgtgatcatccagagggcctacagaagacacctgctgaagaggacagtgaagcaggccagcttcacctacaacaagaacaagatcaagggcggggccaacctgctgatcaaggaggacatgatcatcgaccgcatcaatgaaaacagcatcacagagaagacagacctgaccatgagcacagctgcctgccccccatcctatgacagagtgaccaagcccatcgtggagaagcatgagcaggagggcaaggatgagaaggccaagggcaagtag

SEQ ID NO: 170078 - DNA, 5997 bp, synthetic construct
  misc_feature 1..5997: note = Description of Artificial Sequence: Synthetic coding sequence
  source 1..5997: mol_type = other DNA
atggagcagacagtgctggtgcccccaggccctgacagcttcaacttcttcacccgggagagcctggccgccattgaaagaagaattgctgaggagaaggccaagaaccccaagccagacaagaaggatgatgatgaaaatggccccaagcccaacagcgacctggaggccggcaagaacctgcccttcatctatggagacatccccccagagatggtgtctgagcccctggaggacctggacccctactacatcaacaagaagaccttcatcgtgctgaacaagggcaaggccatcttccgcttcagcgccaccagcgccctgtacatcctgacccccttcaaccccctgaggaagatcgccatcaagatcctggtgcacagcctcttctccatgctgatcatgtgcaccatcctgaccaactgtgtgttcatgaccatgagcaaccccccagactggaccaagaatgtggagtacaccttcaccggcatctacacctttgagagcctcatcaagatcatcgcccggggcttctgcctggaggacttcaccttcctgcgggacccctggaactggctggacttcaccgtcatcacctttgcctacgtgacagaatttgtggacctgggcaatgtgtctgccctgcggaccttccgggtgctgcgggccctgaagaccatcagcgtcatccctggcctgaagaccatcgtgggcgccctgatccagagcgtgaagaagctgagtgatgtgatgatcctgaccgtcttctgcctgtctgtgtttgccctgattggcctgcagctgttcatgggcaacctgaggaacaagtgcatccagtggccacccaccaatgccagcctggaggagcacagcattgagaagaacatcaccgtgaactacaacggcaccctcatcaatgagaccgtgtttgaatttgactggaagagctacatccaggacagccgctaccactacttcctggagggcttcctggatgccctgctgtgtggcaacagcagtgatgctggccagtgcccagagggctacatgtgtgtgaaggccggcaggaaccccaactacggctacaccagctttgacaccttctcctgggccttcctgagcctcttccggctgatgacccaggacttctgggagaacctgtaccagctgaccctgcgggctgctgggaagacctacatgatcttctttgtgctggtgatcttcctgggcagcttctacctgatcaacctgatcctggccgtggtggccatggcctatgaggagcagaaccaggccaccctggaggaggccgagcagaaggaggccgagttccagcagatgattgagcagctgaagaagcagcaggaggccgcccagcaggccgccacagccacagccagcgagcacagccgggagcccagcgctgctggccgcctgagtgacagcagcagcgaggccagcaagctgagcagcaagagcgccaaggagaggaggaacagaaggaagaagaggaagcagaaggagcagagcggcggggaggagaaggatgaagatgagttccagaagtctgagagcgaggacagcatccggaggaagggcttccgcttcagcattgagggcaaccggctgacctatgagaagcgctacagcagcccccaccagagcctgctgagcatccggggcagcctcttcagccccaggaggaacagcaggaccagcctcttctccttccggggccgggccaaggatgtgggctctgaaaatgactttgctgatgatgagcacagcacctttgaagataatgaaagccggcgggacagcctgtttgtgccccggcggcacggggagaggaggaacagcaacctgagccagaccagccgcagcagcaggatgctggccgtgtttcctgccaacgggaagatgcacagcacagtggactgcaatggagtggtgtccctggtgggcggccccagcgtgcccaccagccctgtgggccagctgctgcctgagggcaccaccacagaaacagagatgaggaagagaagaagcagcagcttccacgtgtccatggacttcctggaggaccccagccagaggcagagggccatgagcatcgccagcatcctgaccaacacagtggaggagctggaggagagccggcagaagtgccccccctgctggtacaagttcagcaacatcttcctgatctgggactgcagcccctactggctgaaggtgaagcacgtggtgaacctggtggtgatggacccctttgtggacctggccatcaccatctgcatcgtgctgaacaccctcttcatggccatggagcactaccccatgacagaccacttcaacaacgtgctgactgtgggcaacctggtgttcaccggcatcttcaccgctgagatgttcctgaagatcatcgccatggacccctactactacttccaggagggctggaacatctttgatggcttcatcgtgaccctgagcctggtggagctgggcctggccaacgtggagggcctgtctgtgctgcgctccttccggctgctgcgggtcttcaagctggccaagtcctggcccaccctgaacatgctgatcaagatcatcggcaacagcgtgggcgccctgggcaacctgaccctggtgctggccatcatcgtgttcatctttgctgtggtgggcatgcagctgtttgggaagagctacaaggactgtgtgtgcaagatcgccagtgactgccagctgccccgctggcacatgaatgacttcttccacagcttcctgattgtgttccgggtgctgtgtggggagtggattgagaccatgtgggactgcatggaggtggccggccaggccatgtgcctgactgtgttcatgatggtgatggtgattggcaacctggtggtgctgaacctcttcctggccctgctgctgagcagcttctctgctgacaacctggccgccacagatgatgacaatgagatgaacaacctgcagattgctgtggacaggatgcacaagggcgtggcctacgtgaagaggaagatctatgagttcatccagcagagcttcatcaggaagcagaagatcctggatgagatcaagcccctggatgacctgaacaacaagaaggacagctgcatgagcaaccacacagctgagatcggcaaggacctggactacctgaaggatgtgaatggcaccaccagcggcattggaacaggcagctctgtggagaagtacatcattgatgaaagtgactacatgtccttcatcaacaaccccagcctgactgtgacagtgcccatcgctgtgggggagagtgactttgagaacctgaacacagaggacttcagcagcgagagtgacctggaggagagcaaggagaagctgaatgaaagcagcagcagcagcgagggcagcacagtggacatcggggcccctgtggaggagcagcctgtggtggagcctgaggagaccctggagcctgaggcctgcttcacagagggctgtgtgcagcgcttcaagtgctgccagatcaacgtggaggagggccggggcaagcagtggtggaacctgcggaggacctgcttcagaattgtggagcacaactggtttgagaccttcatcgtgttcatgatcctgctgagcagcggggccctggcctttgaggacatctacatcgaccagaggaagaccatcaagaccatgctggagtatgctgacaaggtgttcacctacatcttcatcctggagatgctgctgaagtgggtggcctacggctaccagacctacttcaccaatgcctggtgctggctggacttcctgattgtggatgtgtccctggtgtccctgacagccaatgccctgggctacagcgagctgggcgccatcaagagcctgcggaccctgcgggccctgcggcccctgcgggccctgagcagatttgagggcatgagggtggtggtgaatgccctgctgggcgccatccccagcatcatgaatgtgctgctggtgtgcctgatcttctggctgatcttcagcatcatgggcgtgaacctgtttgctgggaagttctaccactgcatcaacaccaccaccggggacagatttgatattgaagatgtgaacaaccacacagactgcctgaagctgattgaaagaaatgaaacagcccgctggaagaatgtgaaggtgaactttgacaacgtgggcttcggctacctgagcctgctgcaggtggccaccttcaagggctggatggacatcatgtatgctgctgtggacagcagaaatgtggagctgcagcccaagtatgaggagagcctgtacatgtacctgtacttcgtcatcttcatcatcttcggcagcttcttcaccctgaacctcttcatcggggtcatcatcgacaacttcaaccagcagaagaagaagtttggaggccaggacatcttcatgacagaggagcagaagaagtactacaatgccatgaagaagctgggcagcaagaagccccagaagcccatccccaggcctggcaacaagttccagggcatggtgtttgattttgtgacccggcaggtgtttgacatcagcatcatgatcctgatctgcctgaacatggtgaccatgatggtggagacagatgaccagagtgaatatgtgaccaccatcctgagccgcatcaacctggtgttcatcgtgctcttcaccggggagtgtgtgctgaagctgatcagcctgcggcactactacttcaccatcggctggaacatctttgattttgtggtggtgatcctgagcatcgtgggcatgttcctggccgagctgattgagaagtactttgtgagccccaccctcttccgggtcatccggctggcccgcatcggccgcatcctgcggctcatcaagggggccaagggcatccgcaccctgctgtttgccctgatgatgagcctgcctgccctcttcaacatcggcctgctgctcttcctggtgatgttcatctatgccatcttcggcatgagcaactttgcctacgtgaagcgggaggtgggcattgatgacatgttcaactttgagacctttggaaacagcatgatctgcctcttccagatcaccaccagcgctggctgggatggcctgctggcccccatcctgaacagcaagcccccagactgtgaccccaacaaggtgaaccctggcagctctgtgaagggggactgtggcaaccccagcgtgggcatcttcttctttgtgtcctacatcatcatctccttcctggtggtggtgaacatgtacatcgccgtcatcctggagaacttctctgtggccacagaggagagcgctgagcccctgtctgaagatgactttgagatgttttatgaggtgtgggagaagtttgatcctgatgccacccagttcatggagtttgagaagctgagccagtttgctgctgccctggagccccccctgaacctgccccagcccaacaagctgcagctgattgccatggacctgcccatggtgtctggggaccgcatccactgcctggacatcctgtttgccttcaccaagagggtgctgggggagagcggggagatggatgccctgcgcatccagatggaggagcgcttcatggccagcaaccccagcaaggtgtcctaccagcccatcaccaccaccctgaagaggaagcaggaggaggtgtctgctgtgatcatccagagggcctaccgccgccacctgctgaagaggacagtgaagcaggccagcttcacctacaacaagaacaagatcaagggcggggccaacctgctgatcaaggaggacatgatcatcgaccgcatcaatgaaaattccatcacagagaagacagacctgaccatgagcacagctgcctgcccccccagctatgacagagtgaccaagcccatcgtggagaagcatgagcaggagggcaaggatgagaaggccaagggcaagtag

SEQ ID NO: 170079 - DNA, 5946 bp, synthetic construct
  misc_feature 1..5946: note = Description of Artificial Sequence: Synthetic coding sequence
  source 1..5946: mol_type = other DNA
atggagcagacagtgctggtgcccccaggccctgacagcttcaacttcttcacccgggagagcctggccgccattgaaagaagaattgctgaggagaaggccaagaaccccaagccagacaagaaggatgatgatgaaaatggccccaagcccaacagcgacctggaggccggcaagaacctgcccttcatctatggagacatccccccagagatggtgtctgagcccctggaggacctggacccctactacatcaacaagaagaccttcatcgtgctgaacaagggcaaggccatcttccgcttcagcgccaccagcgccctgtacatcctgacccccttcaaccccctgaggaagatcgccatcaagatcctggtgcacagcctcttctccatgctgatcatgtgcaccatcctgaccaactgtgtgttcatgaccatgagcaaccccccagactggaccaagaatgtggagtacaccttcaccggcatctacacctttgagagcctcatcaagatcatcgcccggggcttctgcctggaggacttcaccttcctgcgggacccctggaactggctggacttcaccgtcatcacctttgcctacgtgacagaatttgtggacctgggcaatgtgtctgccctgcggaccttccgggtgctgcgggccctgaagaccatcagcgtcatccctggcctgaagaccatcgtgggcgccctgatccagagcgtgaagaagctgagtgatgtgatgatcctgaccgtcttctgcctgtctgtgtttgccctgattggcctgcagctgttcatgggcaacctgaggaacaagtgcatccagtggccacccaccaatgccagcctggaggagcacagcattgagaagaacatcaccgtgaactacaacggcaccctcatcaatgagaccgtgtttgaatttgactggaagagctacatccaggacagccgctaccactacttcctggagggcttcctggatgccctgctgtgtggcaacagcagtgatgctggccagtgcccagagggctacatgtgtgtgaaggccggcaggaaccccaactacggctacaccagctttgacaccttctcctgggccttcctgagcctcttccggctgatgacccaggacttctgggagaacctgtaccagctgaccctgcgggctgctgggaagacctacatgatcttctttgtgctggtgatcttcctgggcagcttctacctgatcaacctgatcctggccgtggtggccatggcctatgaggagcagaaccaggccaccctggaggaggccgagcagaaggaggccgagttccagcagatgattgagcagctgaagaagcagcaggaggccgcccagcaggccgccacagccacagccagcgagcacagccgggagcccagcgctgctggccgcctgagtgacagcagcagcgaggccagcaagctgagcagcaagagcgccaaggagaggaggaacagaaggaagaagaggaagcagaaggagcagagcggcggggaggagaaggatgaagatgagttccagaagtctgagagcgaggacagcatccggaggaagggcttccgcttcagcattgagggcaaccggctgacctatgagaagcgctacagcagcccccaccagagcctgctgagcatccggggcagcctcttcagccccaggaggaacagcaggaccagcctcttctccttccggggccgggccaaggatgtgggctctgaaaatgactttgctgatgatgagcacagcacctttgaagataatgaaagccggcgggacagcctgtttgtgccccggcggcacggggagaggaggaacagcaacctgagccagaccagccgcagcagcaggatgctggccgtgtttcctgccaacgggaagatgcacagcacagtggactgcaatggagtggtgtccctgggcaccaccacagaaacagagatgaggaagaggaggagcagcagcttccacgtgtccatggacttcctggaggaccccagccagaggcagagggccatgagcatcgccagcatcctgaccaacacagtggaggagctggaggagagccggcagaagtgccccccctgctggtacaagttcagcaacatcttcctgatctgggactgcagcccctactggctgaaggtgaagcacgtggtgaacctggtggtgatggacccctttgtggacctggccatcaccatctgcatcgtgctgaacaccctcttcatggccatggagcactaccccatgacagaccacttcaacaacgtgctgactgtgggcaacctggtgttcaccggcatcttcaccgctgagatgttcctgaagatcatcgccatggacccctactactacttccaggagggctggaacatctttgatggcttcatcgtgaccctgagcctggtggagctgggcctggccaacgtggagggcctgtctgtgctgcggagcttccggctgctgcgggtcttcaagctggccaagtcctggcccaccctgaacatgctgatcaagatcatcggcaacagcgtgggcgccctgggcaacctgaccctggtgctggccatcatcgtgttcatctttgctgtggtgggcatgcagctgtttgggaagagctacaaggactgtgtgtgcaagatcgccagtgactgccagctgccccgctggcacatgaatgacttcttccacagcttcctgattgtgttccgggtgctgtgtggggagtggattgagaccatgtgggactgcatggaggtggccggccaggccatgtgcctgaccgtcttcatgatggtgatggtgattggcaacctggtggtgctgaacctcttcctggccctgctgctgagcagcttctctgctgacaacctggccgccacagatgatgacaatgagatgaacaacctgcagattgctgtggacaggatgcacaagggcgtggcctacgtgaagaggaagatctatgagttcatccagcagagcttcatcaggaagcagaagatcctggatgagatcaagcccctggatgacctgaacaacaagaaggacagctgcatgagcaaccacacagctgagatcggcaaggacctggactacctgaaggatgtgaatggcaccaccagcggcatcggcaccggcagctctgtggagaagtacatcattgatgaaagtgactacatgtccttcatcaacaaccccagcctgactgtgacagtgcccatcgctgtgggggagagtgactttgagaacctgaacacagaggacttcagcagcgagagtgacctggaggagagcaaggagaagctgaatgaaagcagcagcagcagcgagggcagcacagtggacattggagcccctgtggaggagcagcctgtggtggagcctgaggagaccctggagcctgaggcctgcttcacagagggctgtgtgcagcgcttcaagtgctgccagatcaacgtggaggagggccggggcaagcagtggtggaacctgcggaggacctgcttccgcatcgtggagcacaactggtttgagaccttcatcgtgttcatgatcctgctgagcagcggggccctggcctttgaggacatctacatcgaccagaggaagaccatcaagaccatgctggagtatgctgacaaggtgttcacctacatcttcatcctggagatgctgctgaagtgggtggcctacggctaccagacctacttcaccaatgcctggtgctggctggacttcctgattgtggatgtgtccctggtgtccctgacagccaatgccctgggctacagcgagctgggcgccatcaagagcctgcggaccctgcgggccctgcggcccctgcgggccctgagcagatttgagggcatgagggtggtggtgaatgccctgctgggcgccatccccagcatcatgaatgtgctgctggtgtgcctgatcttctggctgatcttcagcatcatgggcgtgaacctgtttgctgggaagttctaccactgcatcaacaccaccactggagacagatttgatattgaagatgtgaacaaccacacagactgcctgaagctgattgaaagaaatgaaacagcccgctggaagaatgtgaaggtgaactttgacaacgtgggcttcggctacctgagcctgctgcaggtggccaccttcaagggctggatggacatcatgtatgctgctgtggacagcagaaatgtggagctgcagcccaagtatgaggagagcctgtacatgtacctgtactttgtgatcttcatcatcttcggcagcttcttcaccctgaacctcttcatcggggtcatcatcgacaacttcaaccagcagaagaagaagtttggaggccaggacatcttcatgacagaggagcagaagaagtactacaatgccatgaagaagctgggcagcaagaagccccagaagcccatcccccggcccggcaacaagttccagggcatggtgtttgattttgtgacccggcaggtgtttgacatcagcatcatgatcctgatctgcctgaacatggtgaccatgatggtggagacagatgaccagagtgaatatgtgaccaccatcctgagccgcatcaacctggtgttcatcgtgctcttcaccggagaatgtgtgctgaagctgatcagcctgcggcactactacttcaccatcggctggaacatctttgattttgtggtggtgatcctgagcatcgtgggcatgttcctggccgagctgattgagaagtactttgtgagccccaccctcttccgggtcatccggctggccagaattggccgcatcctgcggctcatcaagggggccaagggcatccgcaccctgctgtttgccctgatgatgagcctgcctgccctcttcaacatcggcctgctgctcttcctggtgatgttcatctatgccatcttcggcatgagcaactttgcctacgtgaagcgggaggtgggcattgatgacatgttcaactttgagaccttcggcaacagcatgatctgcctcttccagatcaccaccagcgctggctgggatggcctgctggcccccatcctgaacagcaagcccccagactgtgaccccaacaaggtgaaccctggcagctctgtgaagggggactgtggcaaccccagcgtgggcatcttcttctttgtgtcctacatcatcatctccttcctggtggtggtgaacatgtacatcgctgtgatcctggagaacttctctgtggccacagaggagagcgctgagcccctgtctgaagatgactttgagatgttttatgaggtgtgggagaagtttgatcctgatgccacccagttcatggagtttgagaagctgagccagtttgctgctgccctggagccccccctgaacctgccccagcccaacaagctgcagctgattgccatggacctgcccatggtgtctggggaccgcatccactgcctggacatcctgtttgccttcaccaagagggtgctgggggagagcggggagatggatgccctgcgcatccagatggaggagcgcttcatggccagcaaccccagcaaggtgtcctaccagcccatcaccaccaccctgaagaggaagcaggaggaggtgtctgctgtgatcatccagagggcctacagaagacacctgctgaagaggacagtgaagcaggccagcttcacctacaacaagaacaagatcaagggcggggccaacctgctgatcaaggaggacatgatcatcgaccgcatcaatgaaaacagcatcacagagaagacagacctgaccatgagcacagctgcctgccccccatcctatgacagagtgaccaagcccatcgtggagaagcatgagcaggagggcaaggatgagaaggccaagggcaagtag

SEQ ID NO: 170080 - DNA, 6030 bp, synthetic construct; identical to SEQ ID NO: 170077
  misc_feature 1..6030: note = Description of Artificial Sequence: Synthetic coding sequence
  source 1..6030: mol_type = other DNA

SEQ ID NO: 170081 - DNA, 657 bp, synthetic construct
  misc_feature 1..657: note = Description of Artificial Sequence: Synthetic coding sequence
  source 1..657: mol_type = other DNA
atgggccgcctgctggccctggtggtgggcgccgccctggtgagcagcgcctgtggcggctgtgtggaggtggacagcgagacagaggccgtgtatggcatgaccttcaagatcctgtgcatcagctgcaagagaagaagtgagaccaatgctgagaccttcacagagtggaccttccggcagaagggcacagaggagtttgtgaagatcctgcgctatgaaaatgaggtgctgcagctggaggaggatgaaagatttgagggccgggtggtgtggaatggcagccggggcaccaaggacctgcaggacctgagcatcttcatcaccaacgtgacctacaaccacagcggggactatgagtgccacgtgtaccgcctgctcttctttgagaactatgagcacaacacctctgtggtgaagaagatccacatcgaggtggtggacaaggccaacagagacatggccagcatcgtgtctgagatcatgatgtatgtgctgattgtggtgctgaccatctggctggtggccgagatgatctactgctacaagaagattgctgctgccacagaaacagctgcccaggagaatgccagcgagtacctggccatcaccagcgagagcaaagaaaactgcaccggggtgcaggtggccgagtag

SEQ ID NO: 170082 - DNA, 807 bp, synthetic construct
  misc_feature 1..807: note = Description of Artificial Sequence: Synthetic coding sequence
  source 1..807: mol_type = other DNA
atgggccgcctgctggccctggtggtgggcgccgccctggtgagcagcgcctgtggcggctgtgtggaggtggacagcgagacagaggccgtgtatggcatgaccttcaagatcctgtgcatcagctgcaagagaagaagtgagaccaatgctgagaccttcacagagtggaccttccggcagaagggcacagaggagtttgtgaagatcctgcgctatgaaaatgaggtgctgcagctggaggaggatgaaagatttgagggccgggtggtgtggaatggcagccggggcaccaaggacctgcaggacctgagcatcttcatcaccaacgtgacctacaaccacagcggggactatgagtgccacgtgtaccgcctgctcttctttgagaactatgagcacaacacctctgtggtgaagaagatccacatcgaggtggtggacaagggggagagcggggccgcctgccccttcaccgtgacccacagaagagcccgctggagggaccgctggcaggccgtggacagaacaggctggctgtgtgcctggccagccaaccggccccagcagagagctgagggggagggcagcagccccagctgccccctgcagctgtggcccctcttcctgagcagcccccggcggggccagagcatgcctgtgccccaccggcgcagcggctaccgcacccagctgtgccacctgtgctgcatgaccagcggccgctgcctgctgagcctgagccagagggtggtgctgggcctgcccggcatcatcatccgctgtgtgtcccggggcgtggtgtag

SEQ ID NO: 170083 - DNA, 6018 bp, synthetic construct
  misc_feature 1..6018: note = Description of Artificial Sequence: Synthetic coding sequence
  source 1..6018: mol_type = other DNA
atggcccagagcgtgctggtgcccccaggccctgacagcttccgcttcttcacccgggagagcctggccgccatcgagcagagaattgctgaggagaaggccaagaggcccaagcaggagaggaaggatgaagatgatgaaaatggccccaagcccaacagcgacctggaggccggcaagagcctgcccttcatctacggggacatccccccagagatggtgtctgtgcccctggaggacctggacccctactacatcaacaagaagaccttcatcgtgctgaacaagggcaaggccatcagccgcttcagcgccaccccagccctgtacatcctgacccccttcaaccccatcaggaagctggccatcaagatcctggtgcacagcctcttcaacatgctgatcatgtgcaccatcctgaccaactgtgtgttcatgaccatgagcaaccccccagactggaccaagaatgtggagtacaccttcaccggcatctacacctttgagagcctcatcaagatcctggcccggggcttctgcctggaggacttcaccttcctgcgggacccctggaactggctggacttcaccgtcatcacctttgcctacgtgacagaatttgtggacctgggcaatgtgtctgccctgcggaccttccgggtgctgcgggccctgaagaccatcagcgtcatccctggcctgaagaccatcgtgggcgccctgatccagagcgtgaagaagctgagtgatgtgatgatcctgactgtgttctgcctgtctgtgtttgccctgattggcctgcagctgttcatgggcaacctgaggaacaagtgcctgcagtggcccccagacaacagcagctttgagatcaacatcaccagcttcttcaacaacagcctggatggaaatggcaccaccttcaacagaacagtgtccatcttcaactgggatgagtacatcgaggacaagagccacttctacttcctggagggccagaatgatgccctgctgtgtggcaacagcagtgatgctggccagtgcccagagggctacatctgtgtgaaggccggcaggaaccccaactacggctacaccagctttgacaccttctcctgggccttcctgagcctcttccggctgatgacccaggacttctgggagaacctgtaccagctgaccctgcgggctgctgggaagacctacatgatcttctttgtgctggtgatcttcctgggcagcttctacctgatcaacctgatcctggccgtggtggccatggcctatgaggagcagaaccaggccaccctggaggaggccgagcagaaggaggccgagttccagcagatgctggagcagctgaagaagcagcaggaggaggcccaggccgctgctgctgctgccagcgctgagagccgggacttctctggagctgggggcatcggggtcttcagcgagagcagctctgtggccagcaagctgagcagcaagtctgagaaggagctgaagaacagaaggaagaagaagaagcagaaggagcagagcggggaggaggagaagaatgacagagtgaggaagtctgagagtgaagattccatccggaggaagggcttccgcttcagcctggagggcagccggctgacctatgagaagcgcttcagcagcccccaccagagcctgctgagcatccggggcagcctcttcagccccaggaggaacagccgggccagcctcttctccttccggggccgggccaaggacatcggctctgaaaatgactttgctgatgatgagcacagcacctttgaggacaatgacagcagaagagacagcctgtttgtgccccacagacatggagagcggcggcacagcaatgtgtcccaggccagccgggccagccgggtgctgcccatcctgcccatgaatggcaagatgcacagcgctgtggactgcaatggagtggtgtccctggtgggcggccccagcaccctgaccagcgctggccagctgctgcctgagggcaccaccacagaaacagagatcaggaagagaagaagcagcagctaccacgtgtccatggacctgctggaggaccccaccagccggcagagggccatgagcatcgccagcatcctgaccaacaccatggaggagctggaggagagccggcagaagtgccccccctgctggtacaagtttgccaacatgtgcctgatctgggactgctgcaagccctggctgaaggtgaagcacctggtgaacctggtggtgatggacccctttgtggacctggccatcaccatctgcatcgtgctgaacaccctcttcatggccatggagcactaccccatgacagagcagttcagctctgtgctgtctgtgggcaacctggtgttcaccggcatcttcaccgctgagatgttcctgaagatcatcgccatggacccctactactacttccaggagggctggaacatctttgatggcttcatcgtgtccctgagcctgatggagctgggcctggccaacgtggagggcctgtctgtgctgcgctccttccggctgctgcgggtcttcaagctggccaagtcctggcccaccctgaacatgctgatcaagatcatcggcaacagcgtgggcgccctgggcaacctgaccctggtgctggccatcatcgtgttcatctttgctgtggtgggcatgcagctgtttgggaagagctacaaggaatgtgtgtgcaagatcagcaatgactgtgagctgccccgctggcacatgcatgacttcttccacagcttcctgattgtgttccgggtgctgtgtggggagtggattgagaccatgtgggactgcatggaggtggccggccagaccatgtgcctgactgtgttcatgatggtgatggtgattggcaacctggtggtgctgaacctcttcctggccctgctgctgagcagcttcagcagtgacaacctggccgccacagatgatgacaatgagatgaacaacctgcagattgctgtgggccgcatgcagaagggcatcgactttgtgaagaggaagatccgggagttcatccagaaggcctttgtgaggaagcagaaggccctggatgagatcaagcccctggaggacctgaacaacaagaaggacagctgcatcagcaaccacaccaccattgaaattggcaaggacctgaactacctgaaggatggaaatggcaccaccagcggcatcggcagctctgtggagaagtatgtggtggatgaaagtgactacatgtccttcatcaacaaccccagcctgactgtgacagtgcccatcgctgtgggggagagtgactttgagaacctgaacacagaggagttcagcagcgagagtgacatggaggagagcaaggagaagctgaatgccaccagcagcagcgagggcagcacagtggacatcggggccccagctgagggggagcagcctgaggtggagcctgaggagagcctggagcctgaggcctgcttcacagaggactgtgtgaggaagttcaagtgctgccagatcagcattgaggagggcaagggcaagctgtggtggaacctgaggaagacctgctacaagatcgtggagcacaactggtttgagaccttcatcgtgttcatgatcctgctgagcagcggggccctggcctttgaggacatctacatcgagcagaggaagaccatcaagaccatgctggagtatgctgacaaggtgttcacctacatcttcatcctggagatgctgctgaagtgggtggcctacggcttccaggtgtacttcaccaatgcctggtgctggctggacttcctgattgtggatgtgtccctggtgtccctgacagccaatgccctgggctacagcgagctgggcgccatcaagagcctgcggaccctgcgggccctgcggcccctgcgggccctgagcagatttgagggcatgagggtggtggtgaatgccctgctgggcgccatccccagcatcatgaatgtgctgctggtgtgcctgatcttctggctgatcttcagcatcatgggcgtgaacctgtttgctgggaagttctaccactgcatcaactacaccactggagagatgtttgatgtgtctgtggtgaacaactacagcgagtgcaaggccctgattgagagcaaccagacagcccgctggaagaatgtgaaggtgaactttgacaacgtgggcctgggctacctgagcctgctgcaggtggccaccttcaagggctggatggacatcatgtatgctgctgtggacagcagaaatgtggagctgcagcccaagtatgaggacaacctgtacatgtacctgtactttgtgatcttcatcatcttcggcagcttcttcaccctgaacctcttcatcggggtcatcatcgacaacttcaaccagcagaagaagaagtttggaggccaggacatcttcatgacagaggagcagaagaagtactacaatgccatgaagaagctgggcagcaagaagccccagaagcccatccccaggcctgccaacaagttccagggcatggtgtttgattttgtgaccaagcaggtgtttgacatcagcatcatgatcctgatctgcctgaacatggtgaccatgatggtggagacagatgaccagagccaggagatgaccaacatcctgtactggatcaacctggtgttcatcgtgctcttcaccggagaatgtgtgctgaagctgatcagcctgcgctactactacttcaccatcggctggaacatctttgattttgtggtggtgatcctgagcatcgtgggcatgttcctggccgagctgattgagaagtactttgtgagccccaccctcttccgggtcatccggctggccagaattggccgcatcctgcggctcatcaagggggccaagggcatccgcaccctgctgtttgccctgatgatgagcctgcctgccctcttcaacatcggcctgctgctcttcctggtgatgttcatctatgccatcttcggcatgagcaactttgcctacgtgaagcgggaggtgggcattgatgacatgttcaactttgagaccttcggcaacagcatgatctgcctcttccagatcaccaccagcgctggctgggatggcctgctggcccccatcctgaacagcggccccccagactgtgaccctgacaaggaccaccctggcagctctgtgaagggggactgtggcaaccccagcgtgggcatcttcttctttgtgtcctacatcatcatctccttcctggtggtggtgaacatgtacatcgctgtgatcctggagaacttctctgtggccacagaggagagcgctgagcccctgtctgaagatgactttgagatgttttatgaggtgtgggagaagtttgatcctgatgccacccagttcattgaatttgccaagctgagtgactttgctgatgccctggacccccccctgctgattgccaagcccaacaaggtgcagctgattgccatggacctgcccatggtgtctggggaccgcatccactgcctggacatcctgtttgccttcaccaagagggtgctgggggagagcggggagatggatgccctgcgcatccagatggaggagcgcttcatggccagcaaccccagcaaggtgtcctatgagcccatcaccaccaccctgaagaggaagcaggaggaggtgtctgccatcatcatccagagggcctaccgccgctacctgctgaagcagaaggtgaagaaggtgagcagcatctacaagaaggacaagggcaaggaatgtgatggcacccccatcaaggaggacaccctgattgacaagctgaatgaaaacagcaccccagagaagacagacatgacccccagcaccaccagcccccccagctatgattctgtgaccaagccagagaaggagaagtttgagaaggacaagtctgagaaggaggacaagggcaaggacatccgggagagcaagaagtag

SEQ ID NO: 170084 - DNA, 6018 bp, synthetic construct
  misc_feature 1..6018: note = Description of Artificial Sequence: Synthetic coding sequence
  source 1..6018: mol_type = other DNA
atggcccagagcgtgctggtgcccccaggccctgacagcttccgcttcttcacccgggagagcctggccgccatcgagcagagaattgctgaggagaaggccaagaggcccaagcaggagaggaaggatgaagatgatgaaaatggccccaagcccaacagcgacctggaggccggcaagagcctgcccttcatctacggggacatccccccagagatggtgtctgtgcccctggaggacctggacccctactacatcaacaagaagaccttcatcgtgctgaacaagggcaaggccatcagccgcttcagcgccaccccagccctgtacatcctgacccccttcaaccccatcaggaagctggccatcaagatcctggtgcacagcctcttcaacatgctgatcatgtgcaccatcctgaccaactgtgtgttcatgaccatgagcaaccccccagactggaccaagaatgtggagtacaccttcaccggcatctacacctttgagagcctcatcaagatcctggcccggggcttctgcctggaggacttcaccttcctgcgggacccctggaactggctggacttcaccgtcatcacctttgcctacgtgacagaatttgtgaacctgggcaatgtgtctgccctgcggaccttccgggtgctgcgggccctgaagaccatcagcgtcatccctggcctgaagaccatcgtgggcgccctgatccagagcgtgaagaagctgagtgatgtgatgatcctgactgtgttctgcctgtctgtgtttgccctgattggcctgcagctgttcatgggcaacctgaggaacaagtgcctgcagtggcccccagacaacagcagctttgagatcaacatcaccagcttcttcaacaacagcctggatggaaatggcaccaccttcaacagaacagtgtccatcttcaactgggatgagtacatcgaggacaagagccacttctacttcctggagggccagaatgatgccctgctgtgtggcaacagcagtgatgctggccagtgcccagagggctacatctgtgtgaaggccggcaggaaccccaactacggctacaccagctttgacaccttctcctgggccttcctgagcctcttccggctgatgacccaggacttctgggagaacctgtaccagctgaccctgcgggctgctgggaagacctacatgatcttctttgtgctggtgatcttcctgggcagcttctacctgatcaacctgatcctggccgtggtggccatggcctatgaggagcagaaccaggccaccctggaggaggccgagcagaaggaggccgagttccagcagatgctggagcagctgaagaagcagcaggaggaggcccaggccgctgctgctgctgccagcgctgagagccgggacttctctggagctgggggcatcggggtcttcagcgagagcagctctgtggccagcaagctgagcagcaagtctgagaaggagctgaagaacagaaggaagaagaagaagcagaaggagcagagcggggaggaggagaagaatgacagagtgaggaagtctgagagtgaagattccatccggaggaagggcttccgcttcagcctggagggcagccggctgacctatgagaagcgcttcagcagcccccaccagagcctgctgagcatccggggcagcctcttcagccccaggaggaacagccgggccagcctcttctccttccggggccgggccaaggacatcggctctgaaaatgactttgctgatgatgagcacagcacctttgaggacaatgacagcagaagagacagcctgtttgtgccccacagacatggagagcggcggcacagcaatgtgtcccaggccagccgggccagccgggtgctgcccatcctgcccatgaatggcaagatgcacagcgctgtggactgcaatggagtggtgtccctggtgggcggccccagcaccctgaccagcgctggccagctgctgcctgagggcaccaccacagaaacagagatcaggaagagaagaagcagcagctaccacgtgtccatggacctgctggaggaccccaccagccggcagagggccatgagcatcgccagcatcctgaccaacaccatggaggagctggaggagagccggcagaagtgccccccctgctggtacaagtttgccaacatgtgcctgatctgggactgctgcaagccctggctgaaggtgaagcacctggtgaacctggtggtgatggacccctttgtggacctggccatcaccatctgcatcgtgctgaacaccctcttcatggccatggagcactaccccatgacagagcagttcagctctgtgctgtctgtgggcaacctggtgttcaccggcatcttcaccgctgagatgttcctgaagatcatcgccatggacccctactactacttccaggagggctggaacatctttgatggcttcatcgtgtccctgagcctgatggagctgggcctggccaacgtggagggcctgtctgtgctgcgctccttccggctgctgcgggtcttcaagctggccaagtcctggcccaccctgaacatgctgatcaagatcatcggcaacagcgtgggcgccctgggcaacctgaccctggtgctggccatcatcgtgttcatctttgctgtggtgggcatgcagctgtttgggaagagctacaaggaatgtgtgtgcaagatcagcaatgactgtgagctgccccgctggcacatgcatgacttcttccacagcttcctgattgtgttccgggtgctgtgtggggagtggattgagaccatgtgggactgcatggaggtggccggccagaccatgtgcctgactgtgttcatgatggtgatggtgattggcaacctggtggtgctgaacctcttcctggccctgctgctgagcagcttcagcagtgacaacctggccgccacagatgatgacaatgagatgaacaacctgcagattgctgtgggccgcatgcagaagggcatcgactttgtgaagaggaagatccgggagttcatccagaaggcctttgtgaggaagcagaaggccctggatgagatcaagcccctggaggacctgaacaacaagaaggacagctgcatcagcaaccacaccaccattgaaattggcaaggacctgaactacctgaaggatggaaatggcaccaccagcggcatcggcagctctgtggagaagtatgtggtggatgaaagtgactacatgtccttcatcaacaaccccagcctgactgtgacagtgcccatcgctgtgggggagagtgactttgagaacctgaacacagaggagttcagcagcgagagtgacatggaggagagcaaggagaagctgaatgccaccagcagcagcgagggcagcacagtggacatcggggccccagctgagggggagcagcctgaggtggagcctgaggagagcctggagcctgaggcctgcttcacagaggactgtgtgaggaagttcaagtgctgccagatcagcattgaggagggcaagggcaagctgtggtggaacctgaggaagacctgctacaagatcgtggagcacaactggtttgagaccttcatcgtgttcatgatcctgctgagcagcggggccctggcctttgaggacatctacatcgagcagaggaagaccatcaagaccatgctggagtatgctgacaaggtgttcacctacatcttcatcctggagatgctgctgaagtgggtggcctacggcttccaggtgtacttcaccaatgcctggtgctggctggacttcctgattgtggatgtgtccctggtgtccctgacagccaatgccctgggctacagcgagctgggcgccatcaagagcctgcggaccctgcgggccctgcggcccctgcgggccctgagcagatttgagggcatgagggtggtggtgaatgccctgctgggcgccatccccagcatcatgaatgtgctgctggtgtgcctgatcttctggctgatcttcagcatcatgggcgtgaacctgtttgctgggaagttctaccactgcatcaactacaccactggagagatgtttgatgtgtctgtggtgaacaactacagcgagtgcaaggccctgattgagagcaaccagacagcccgctggaagaatgtgaaggtgaactttgacaacgtgggcctgggctacctgagcctgctgcaggtggccaccttcaagggctggatggacatcatgtatgctgctgtggacagcagaaatgtggagctgcagcccaagtatgaggacaacctgtacatgtacctgtactttgtgatcttcatcatcttcggcagcttcttcaccctgaacctcttcatcggggtcatcatcgacaacttcaaccagcagaagaagaagtttggaggccaggacatcttcatgacagaggagcagaagaagtactacaatgccatgaagaagctgggcagcaagaagccccagaagcccatccccaggcctgccaacaagttccagggcatggtgtttgattttgtgaccaagcaggtgtttgacatcagcatcatgatcctgatctgcctgaacatggtgaccatgatggtggagacagatgaccagagccaggagatgaccaacatcctgtactggatcaacctggtgttcatcgtgctcttcaccggagaatgtgtgctgaagctgatcagcctgcgctactactacttcaccatcggctggaacatctttgattttgtggtggtgatcctgagcatcgtgggcatgttcctggccgagctgattgagaagtactttgtgagccccaccctcttccgggtcatccggctggccagaattggccgcatcctgcggctcatcaagggggccaagggcatccgcaccctgctgtttgccctgatgatgagcctgcctgccctcttcaacatcggcctgctgctcttcctggtgatgttcatctatgccatcttcggcatgagcaactttgcctacgtgaagcgggaggtgggcattgatgacatgttcaactttgagaccttcggcaacagcatgatctgcctcttccagatcaccaccagcgctggctgggatggcctgctggcccccatcctgaacagcggccccccagactgtgaccctgacaaggaccaccctggcagctctgtgaagggggactgtggcaaccccagcgtgggcatcttcttctttgtgtcctacatcatcatctccttcctggtggtggtgaacatgtacatcgctgtgatcctggagaacttctctgtggccacagaggagagcgctgagcccctgtctgaagatgactttgagatgttttatgaggtgtgggagaagtttgatcctgatgccacccagttcattgaatttgccaagctgagtgactttgctgatgccctggacccccccctgctgattgccaagcccaacaaggtgcagctgattgccatggacctgcccatggtgtctggggaccgcatccactgcctggacatcctgtttgccttcaccaagagggtgctgggggagagcggggagatggatgccctgcgcatccagatggaggagcgcttcatggccagcaaccccagcaaggtgtcctatgagcccatcaccaccaccctgaagaggaagcaggaggaggtgtctgccatcatcatccagagggcctaccgccgctacctgctgaagcagaaggtgaagaaggtgagcagcatctacaagaaggacaagggcaaggaatgtgatggcacccccatcaaggaggacaccctgattgacaagctgaatgaaaacagcaccccagagaagacagacatgacccccagcaccaccagcccccccagctatgattctgtgaccaagccagagaaggagaagtttgagaaggacaagtctgagaaggaggacaagggcaaggacatccgggagagcaagaagtag

SEQ ID NO: 170085 - DNA, 6018 bp, synthetic construct; identical to SEQ ID NO: 170084
  misc_feature 1..6018: note = Description of Artificial Sequence: Synthetic coding sequence
  source 1..6018: mol_type = other DNA

SEQ ID NO: 170086 - DNA, 6018 bp, synthetic construct; identical to SEQ ID NO: 170083
  misc_feature 1..6018: note = Description of Artificial Sequence: Synthetic coding sequence
  source 1..6018: mol_type = other DNA

SEQ ID NO: 170087 - DNA, 1512 bp, synthetic construct
  misc_feature 1..1512: note = Description of Artificial Sequence: Synthetic coding sequence
  source 1..1512: mol_type = other DNA
atggcccagagcgtgctggtgcccccaggccctgacagcttccgcttcttcacccgggagagcctggccgccatcgagcagagaattgctgaggagaaggccaagaggcccaagcaggagaggaaggatgaagatgatgaaaatggccccaagcccaacagcgacctggaggccggcaagagcctgcccttcatctacggggacatccccccagagatggtgtctgtgcccctggaggacctggacccctactacatcaacaagaagaccttcatcgtgctgaacaagggcaaggccatcagccgcttcagcgccaccccagccctgtacatcctgacccccttcaaccccatcaggaagctggccatcaagatcctggtgcacagcctcttcaacatgctgatcatgtgcaccatcctgaccaactgtgtgttcatgaccatgagcaaccccccagactggaccaagaatgtggagtacaccttcaccggcatctacacctttgagagcctcatcaagatcctggcccggggcttctgcctggaggacttcaccttcctgcgggacccctggaactggctggacttcaccgtcatcacctttgcctacgtgacagaatttgtggacctgggcaatgtgtctgccctgcggaccttccgggtgctgcgggccctgaagaccatcagcgtcatccctggcctgaagaccatcgtgggcgccctgatccagagcgtgaagaagctgagtgatgtgatgatcctgactgtgttctgcctgtctgtgtttgccctgattggcctgcagctgttcatgggcaacctgaggaacaagtgcctgcagtggcccccagacaacagcagctttgagatcaacatcaccagcttcttcaacaacagcctggatggaaatggcaccaccttcaacagaacagtgtccatcttcaactgggatgagtacatcgaggacaagagccacttctacttcctggagggccagaatgatgccctgctgtgtggcaacagcagtgatgctggccagtgcccagagggctacatctgtgtgaaggccggcaggaaccccaactacggctacaccagctttgacaccttctcctgggccttcctgagcctcttccggctgatgacccaggacttctgggagaacctgtaccagctgaccctgcgggctgctgggaagacctacatgatcttctttgtgctggtgatcttcctgggcagcttctacctgatcaacctgatcctggccgtggtggccatggcctatgaggagcagaaccaggccaccctggaggaggccgagcagaaggaggccgagttccagcagatgctggagcagctgaagaagcagcaggaggaggcccaggccgctgctgctgctgccagcgctgagagccgggacttctctggagctgggggcatcggggtcttcagcgagagcagctctgtggccagcaagctgagcagcaagtctgagaaggagctgaagaactag

SEQ ID NO: 170088 - DNA, 648 bp, synthetic construct
  misc_feature 1..648: note = Description of Artificial Sequence: Synthetic coding sequence
  source 1..648: mol_type = other DNA
atgcacagagatgcctggctgcccaggcctgccttcagcctgaccggcctgagcctcttcttcagcctggtgcccccaggccgctccatggaggtgacagtgcctgccaccctgaatgtgctgaatggaagtgatgcccggctgccctgcaccttcaacagctgctacacagtgaaccacaagcagttcagcctgaactggacctaccaggagtgcaacaactgcagcgaggagatgttcctgcagttcaggatgaagatcatcaacctgaagctggagcgcttccaggacagagtggagttcagcggcaaccccagcaaatatgatgtgtctgtgatgctgagaaatgtgcagccagaagatgagggcatctacaactgctacatcatgaaccccccagacagacaccggggccacggcaagatccacctgcaggtgctgatggaggagcccccagagcgggacagcacagtggccgtgattgtgggcgcctctgtgggcggcttcctggccgtggtgatcctggtgctgatggtggtgaagtgtgtgcggaggaagaaggagcagaagctgagcacagatgacctgaagacagaggaggagggcaagacagatggagagggcaacccagatgatggagccaagtag

SEQ ID NO: 170089 - DNA, 6003 bp, synthetic construct
  misc_feature 1..6003: note = Description of Artificial Sequence: Synthetic coding sequence
  source 1..6003: mol_type = other DNA
atggcccaggccctgctggtgcccccaggccctgagagcttccgcctcttcacccgggagagcctggccgccatcgagaagagagctgctgaggagaaggccaagaagcccaagaaggagcaggacaatgatgatgagaacaagcccaagcccaacagcgacctggaggccggcaagaacctgcccttcatctatggagacatccccccagagatggtgtctgagcccctggaggacctggacccctactacatcaacaagaagaccttcatcgtgatgaacaagggcaaggccatcttccgcttcagcgccaccagcgccctgtacatcctgacccccctgaaccctgtgaggaagatcgccatcaagatcctggtgcacagcctcttctccatgctgatcatgtgcaccatcctgaccaactgtgtgttcatgaccctgagcaaccccccagactggaccaagaatgtggagtacaccttcaccggcatctacacctttgagagcctcatcaagatcctggcccggggcttctgcctggaggacttcaccttcctgcgggacccctggaactggctggacttcagcgtcatcgtgatggcctacgtgacagaatttgtggacctgggcaatgtgtctgccctgcggaccttccgggtgctgcgggccctgaagaccatcagcgtcatccctggcctgaagaccatcgtgggcgccctgatccagagcgtgaagaagctgagtgatgtgatgatcctgaccgtcttctgcctgtctgtgtttgccctgattggcctgcagctgttcatgggcaacctgaggaacaagtgcctgcagtggcccccaagtgacagcgcctttgagaccaacaccaccagctacttcaacggcaccatggacagcaatggcacctttgtgaatgtgaccatgagcaccttcaactggaaggactacatcggagatgacagccacttctacgtgctggatggccagaaggaccccctgctgtgtggaaatggaagtgatgctggccagtgcccagagggctacatctgtgtgaaggccggcaggaaccccaactacggctacaccagctttgacaccttctcctgggccttcctgagcctcttccggctgatgacccaggactactgggagaacctgtaccagctgaccctgcgggccgccggcaagacctacatgatcttctttgtgctggtgatcttcctgggcagcttctacctggtgaacctgatcctggccgtggtggccatggcctatgaggagcagaaccaggccaccctggaggaggccgagcagaaggaggccgagttccagcagatgctggagcagctgaagaagcagcaggaggaggcccaggccgtggccgccgccagcgctgccagccgggacttctctggaattggaggcctgggggagctgctggagagcagcagcgaggccagcaagctgagcagcaagagcgccaaggagtggaggaacagaaggaagaagaggcggcagcgggagcacctggagggcaacaacaagggggagcgggacagcttccccaagtctgagagtgaagattctgtgaagaggagcagcttcctgttctccatggatggcaaccggctgaccagtgacaagaagttctgcagcccccaccagagcctgctgagcatccggggcagcctcttcagccccaggaggaacagcaagaccagcatcttctccttccggggccgggccaaggatgtgggctctgaaaatgactttgctgatgatgagcacagcacctttgaggacagcgagagcagaagagacagcctgtttgtgccccacagacatggagagaggaggaacagcaatgtgtcccaggcctccatgagcagcaggatggtgcccggcctgcctgccaacgggaagatgcacagcacagtggactgcaatggagtggtgtccctggtgggcggccccagcgccctgaccagccccaccggccagctgcccccagagggcaccaccacagaaacagaggtgaggaagaggcggctgagcagctaccagatctccatggagatgctggaggacagcagcggccggcagagagctgtgtccatcgccagcatcctgaccaacaccatggaggagctggaggagagccggcagaagtgccccccctgctggtacagatttgccaacgtgttcctgatctgggactgctgtgatgcctggctgaaggtgaagcacctggtgaacctgattgtgatggacccctttgtggacctggccatcaccatctgcatcgtgctgaacaccctcttcatggccatggagcactaccccatgacagagcagttcagctctgtgctgactgtgggcaacctggtgttcaccggcatcttcaccgctgagatggtgctgaagatcatcgccatggacccctactactacttccaggagggctggaacatctttgatggcatcatcgtgtccctgagcctgatggagctgggcctgagcaatgtggagggcctgtctgtgctgcggagcttccggctgctgcgggtcttcaagctggccaagtcctggcccaccctgaacatgctgatcaagatcatcggcaacagcgtgggcgccctgggcaacctgaccctggtgctggccatcatcgtgttcatctttgctgtggtgggcatgcagctgtttgggaagagctacaaggaatgtgtgtgcaagatcaatgatgactgcaccctgccccgctggcacatgaatgacttcttccacagcttcctgattgtgttccgggtgctgtgtggggagtggattgagaccatgtgggactgcatggaggtggccggccagaccatgtgcctgattgtgttcatgctggtgatggtgattggcaacctggtggtgctgaacctcttcctggccctgctgctgagcagcttcagcagtgacaacctggccgccacagatgatgacaatgagatgaacaacctgcagattgctgtgggccgcatgcagaagggcattgattatgtgaagaacaagatgagggagtgcttccagaaggccttcttcaggaagcccaaggtgattgagatccacgagggcaacaagattgacagctgcatgagcaacaacacaggaattgagatcagcaaggagctgaactacctgagagatggaaatggcaccaccagcggcgtgggcaccggcagctctgtggagaagtatgtgattgatgaaaatgactacatgtccttcatcaacaaccccagcctgactgtgacagtgcccatcgctgtgggggagagtgactttgagaacctgaacacagaggagttcagcagcgagagcgagctggaggagagcaaggagaagctgaatgccaccagcagcagcgagggcagcacagtggatgtggtgctgccccgggagggggagcaggccgagacagagcctgaggaggacctgaagccagaggcctgcttcacagagggctgcatcaagaagttccccttctgccaggtgtccacagaggagggcaagggcaagatctggtggaacctgaggaagacctgctacagcatcgtggagcacaactggtttgagaccttcatcgtgttcatgatcctgctgagcagcggggccctggcctttgaggacatctacatcgagcagaggaagaccatcaagaccatgctggagtatgctgacaaggtgttcacctacatcttcatcctggagatgctgctgaagtgggtggcctacggcttccagacctacttcaccaatgcctggtgctggctggacttcctgattgtggatgtgtccctggtgtccctggtggccaatgccctgggctacagcgagctgggcgccatcaagagcctgcggaccctgcgggccctgcggcccctgcgggccctgagcagatttgagggcatgagggtggtggtgaatgccctggtgggcgccatccccagcatcatgaatgtgctgctggtgtgcctgatcttctggctgatcttcagcatcatgggcgtgaacctgtttgctgggaagttctaccactgtgtgaacatgaccactggaaacatgtttgacatcagtgatgtgaacaacctgagtgactgccaggccctgggcaagcaggcccgctggaagaatgtgaaggtgaactttgacaacgtgggcgccggctacctggccctgctgcaggtggccaccttcaagggctggatggacatcatgtatgctgctgtggacagcagagatgtgaagctgcagcctgtgtatgaggagaacctgtacatgtacctgtacttcgtcatcttcatcatcttcggcagcttcttcaccctgaacctcttcatcggggtcatcatcgacaacttcaaccagcagaagaagaagtttggaggccaggacatcttcatgacagaggagcagaagaagtactacaatgccatgaagaagctgggcagcaagaagccccagaagcccatccccaggcctgccaacaagttccagggcatggtgtttgattttgtgacccggcaggtgtttgacatcagcatcatgatcctgatctgcctgaacatggtgaccatgatggtggagacagatgaccagggcaagtacatgaccctggtgctgagccgcatcaacctggtgttcatcgtgctcttcaccggggagtttgtgctgaagctggtgtccctgcggcactactacttcaccatcggctggaacatctttgattttgtggtggtgatcctgagcatcgtgggcatgttcctggccgagatgattgagaagtactttgtgagccccaccctcttccgggtcatccggctggcccgcatcggccgcatcctgcggctcatcaagggggccaagggcatccgcaccctgctgtttgccctgatgatgagcctgcctgccctcttcaacatcggcctgctgctcttcctggtgatgttcatctatgccatcttcggcatgagcaactttgcctacgtgaagaaggaggccggcattgatgacatgttcaactttgagacctttggaaacagcatgatctgcctcttccagatcaccaccagcgctggctgggatggcctgctggcccccatcctgaacagcgcccccccagactgtgaccctgacaccatccaccctggcagctctgtgaagggggactgtggcaaccccagcgtgggcatcttcttctttgtgtcctacatcatcatctccttcctggtggtggtgaacatgtacatcgccgtcatcctggagaacttctctgtggccacagaggagagcgctgagcccctgtctgaagatgactttgagatgttttatgaggtgtgggagaagtttgatcctgatgccacccagttcatcgagttcagcaagctgagtgactttgctgctgccctggacccccccctgctgattgccaagcccaacaaggtgcagctgattgccatggacctgcccatggtgtctggggaccgcatccactgcctggacatcctgtttgccttcaccaagagggtgctgggggagagcggggagatggatgccctgcgcatccagatggaggaccgcttcatggccagcaaccccagcaaggtgtcctatgagcccatcaccaccaccctgaagaggaagcaggaggaggtgtctgctgccatcatccagaggaacttccgctgctacctgctgaagcagaggctgaagaacatcagcagcaactacaacaaggaggccatcaagggcagaattgacctgcccatcaagcaggacatgatcatcgacaagctgaatggaaacagcaccccagagaagacagatggcagcagcagcaccaccagccccccatcctatgacagcgtgaccaagccagacaaggagaagtttgagaaggacaagccagagaaggagagcaagggcaaggaggtgcgggagaaccagaagtag

SEQ ID NO: 170090 - DNA, 6003 bp, synthetic construct
  misc_feature 1..6003: note = Description of Artificial Sequence: Synthetic coding sequence
  source 1..6003: mol_type = other DNA
atggcccaggccctgctggtgcccccaggccctgagagcttccgcctcttcacccgggagagcctggccgccatcgagaagagagctgctgaggagaaggccaagaagcccaagaaggagcaggacaatgatgatgagaacaagcccaagcccaacagcgacctggaggccggcaagaacctgcccttcatctatggagacatccccccagagatggtgtctgagcccctggaggacctggacccctactacatcaacaagaagaccttcatcgtgatgaacaagggcaaggccatcttccgcttcagcgccaccagcgccctgtacatcctgacccccctgaaccctgtgaggaagatcgccatcaagatcctggtgcacagcctcttctccatgctgatcatgtgcaccatcctgaccaactgtgtgttcatgaccctgagcaaccccccagactggaccaagaatgtggagtacaccttcaccggcatctacacctttgagagcctcatcaagatcctggcccggggcttctgcctggaggacttcaccttcctgcgggacccctggaactggctggacttcagcgtcatcgtgatggcctacgtgacagaatttgtgtccctgggcaatgtgtctgccctgcggaccttccgggtgctgcgggccctgaagaccatcagcgtcatccctggcctgaagaccatcgtgggcgccctgatccagagcgtgaagaagctgagtgatgtgatgatcctgaccgtcttctgcctgtctgtgtttgccctgattggcctgcagctgttcatgggcaacctgaggaacaagtgcctgcagtggcccccaagtgacagcgcctttgagaccaacaccaccagctacttcaacggcaccatggacagcaatggcacctttgtgaatgtgaccatgagcaccttcaactggaaggactacatcggagatgacagccacttctacgtgctggatggccagaaggaccccctgctgtgtggaaatggaagtgatgctggccagtgcccagagggctacatctgtgtgaaggccggcaggaaccccaactacggctacaccagctttgacaccttctcctgggccttcctgagcctcttccggctgatgacccaggactactgggagaacctgtaccagctgaccctgcgggccgccggcaagacctacatgatcttctttgtgctggtgatcttcctgggcagcttctacctggtgaacctgatcctggccgtggtggccatggcctatgaggagcagaaccaggccaccctggaggaggccgagcagaaggaggccgagttccagcagatgctggagcagctgaagaagcagcaggaggaggcccaggccgtggccgccgccagcgctgccagccgggacttctctggaattggaggcctgggggagctgctggagagcagcagcgaggccagcaagctgagcagcaagagcgccaaggagtggaggaacagaaggaagaagaggcggcagcgggagcacctggagggcaacaacaagggggagcgggacagcttccccaagtctgagagtgaagattctgtgaagaggagcagcttcctgttctccatggatggcaaccggctgaccagtgacaagaagttctgcagcccccaccagagcctgctgagcatccggggcagcctcttcagccccaggaggaacagcaagaccagcatcttctccttccggggccgggccaaggatgtgggctctgaaaatgactttgctgatgatgagcacagcacctttgaggacagcgagagcagaagagacagcctgtttgtgccccacagacatggagagaggaggaacagcaatgtgtcccaggcctccatgagcagcaggatggtgcccggcctgcctgccaacgggaagatgcacagcacagtggactgcaatggagtggtgtccctggtgggcggccccagcgccctgaccagccccaccggccagctgcccccagagggcaccaccacagaaacagaggtgaggaagaggcggctgagcagctaccagatctccatggagatgctggaggacagcagcggccggcagagagctgtgtccatcgccagcatcctgaccaacaccatggaggagctggaggagagccggcagaagtgccccccctgctggtacagatttgccaacgtgttcctgatctgggactgctgtgatgcctggctgaaggtgaagcacctggtgaacctgattgtgatggacccctttgtggacctggccatcaccatctgcatcgtgctgaacaccctcttcatggccatggagcactaccccatgacagagcagttcagctctgtgctgactgtgggcaacctggtgttcaccggcatcttcaccgctgagatggtgctgaagatcatcgccatggacccctactactacttccaggagggctggaacatctttgatggcatcatcgtgtccctgagcctgatggagctgggcctgagcaatgtggagggcctgtctgtgctgcggagcttccggctgctgcgggtcttcaagctggccaagtcctggcccaccctgaacatgctgatcaagatcatcggcaacagcgtgggcgccctgggcaacctgaccctggtgctggccatcatcgtgttcatctttgctgtggtgggcatgcagctgtttgggaagagctacaaggaatgtgtgtgcaagatcaatgatgactgcaccctgccccgctggcacatgaatgacttcttccacagcttcctgattgtgttccgggtgctgtgtggggagtggattgagaccatgtgggactgcatggaggtggccggccagaccatgtgcctgattgtgttcatgctggtgatggtgattggcaacctggtggtgctgaacctcttcctggccctgctgctgagcagcttcagcagtgacaacctggccgccacagatgatgacaatgagatgaacaacctgcagattgctgtgggccgcatgcagaagggcattgattatgtgaagaacaagatgagggagtgcttccagaaggccttcttcaggaagcccaaggtgattgagatccacgagggcaacaagattgacagctgcatgagcaacaacacaggaattgagatcagcaaggagctgaactacctgagagatggaaatggcaccaccagcggcgtgggcaccggcagctctgtggagaagtatgtgattgatgaaaatgactacatgtccttcatcaacaaccccagcctgactgtgacagtgcccatcgctgtgggggagagtgactttgagaacctgaacacagaggagttcagcagcgagagcgagctggaggagagcaaggagaagctgaatgccaccagcagcagcgagggcagcacagtggatgtggtgctgccccgggagggggagcaggccgagacagagcctgaggaggacctgaagccagaggcctgcttcacagagggctgcatcaagaagttccccttctgccaggtgtccacagaggagggcaagggcaagatctggtggaacctgaggaagacctgctacagcatcgtggagcacaactggtttgagaccttcatcgtgttcatgatcctgctgagcagcggggccctggcctttgaggacatctacatcgagcagaggaagaccatcaagaccatgctggagtatgctgacaaggtgttcacctacatcttcatcctggagatgctgctgaagtgggtggcctacggcttccagacctacttcaccaatgcctggtgctggctggacttcctgattgtggatgtgtccctggtgtccctggtggccaatgccctgggctacagcgagctgggcgccatcaagagcctgcggaccctgcgggccctgcggcccctgcgggccctgagcagatttgagggcatgagggtggtggtgaatgccctggtgggcgccatccccagcatcatgaatgtgctgctggtgtgcctgatcttctggctgatcttcagcatcatgggcgtgaacctgtttgctgggaagttctaccactgtgtgaacatgaccactggaaacatgtttgacatcagtgatgtgaacaacctgagtgactgccaggccctgggcaagcaggcccgctggaagaatgtgaaggtgaactttgacaacgtgggcgccggctacctggccctgctgcaggtggccaccttcaagggctggatggacatcatgtatgctgctgtggacagcagagatgtgaagctgcagcctgtgtatgaggagaacctgtacatgtacctgtacttcgtcatcttcatcatcttcggcagcttcttcaccctgaacctcttcatcggggtcatcatcgacaacttcaaccagcagaagaagaagtttggaggccaggacatcttcatgacagaggagcagaagaagtactacaatgccatgaagaagctgggcagcaagaagccccagaagcccatccccaggcctgccaacaagttccagggcatggtgtttgattttgtgacccggcaggtgtttgacatcagcatcatgatcctgatctgcctgaacatggtgaccatgatggtggagacagatgaccagggcaagtacatgaccctggtgctgagccgcatcaacctggtgttcatcgtgctcttcaccggggagtttgtgctgaagctggtgtccctgcggcactactacttcaccatcggctggaacatctttgattttgtggtggtgatcctgagcatcgtgggcatgttcctggccgagatgattgagaagtactttgtgagccccaccctcttccgggtcatccggctggcccgcatcggccgcatcctgcggctcatcaagggggccaagggcatccgcaccctgctgtttgccctgatgatgagcctgcctgccctcttcaacatcggcctgctgctcttcctggtgatgttcatctatgccatcttcggcatgagcaactttgcctacgtgaagaaggaggccggcattgatgacatgttcaactttgagacctttggaaacagcatgatctgcctcttccagatcaccaccagcgctggctgggatggcctgctggcccccatcctgaacagcgcccccccagactgtgaccctgacaccatccaccctggcagctctgtgaagggggactgtggcaaccccagcgtgggcatcttcttctttgtgtcctacatcatcatctccttcctggtggtggtgaacatgtacatcgccgtcatcctggagaacttctctgtggccacagaggagagcgctgagcccctgtctgaagatgactttgagatgttttatgaggtgtgggagaagtttgatcctgatgccacccagttcatcgagttcagcaagctgagtgactttgctgctgccctggacccccccctgctgattgccaagcccaacaaggtgcagctgattgccatggacctgcccatggtgtctggggaccgcatccactgcctggacatcctgtttgccttcaccaagagggtgctgggggagagcggggagatggatgccctgcgcatccagatggaggaccgcttcatggccagcaaccccagcaaggtgtcctatgagcccatcaccaccaccctgaagaggaagcaggaggaggtgtctgctgccatcatccagaggaacttccgctgctacctgctgaagcagaggctgaagaacatcagcagcaactacaacaaggaggccatcaagggcagaattgacctgcccatcaagcaggacatgatcatcgacaagctgaatggaaacagcaccccagagaagacagatggcagcagcagcaccaccagccccccatcctatgacagcgtgaccaagccagacaaggagaagtttgagaaggacaagccagagaaggagagcaagggcaaggaggtgcgggagaaccagaagtag

SEQ ID NO: 170091 - DNA, 5856 bp, synthetic construct
  misc_feature 1..5856: note = Description of Artificial Sequence: Synthetic coding sequence
  source 1..5856: mol_type = other DNA
atggcccaggccctgctggtgcccccaggccctgagagcttccgcctcttcacccgggagagcctggccgccatcgagaagagagctgctgaggagaaggccaagaagcccaagaaggagcaggacaatgatgatgagaacaagcccaagcccaacagcgacctggaggccggcaagaacctgcccttcatctatggagacatccccccagagatggtgtctgagcccctggaggacctggacccctactacatcaacaagaagaccttcatcgtgatgaacaagggcaaggccatcttccgcttcagcgccaccagcgccctgtacatcctgacccccctgaaccctgtgaggaagatcgccatcaagatcctggtgcacagcctcttctccatgctgatcatgtgcaccatcctgaccaactgtgtgttcatgaccctgagcaaccccccagactggaccaagaatgtggagtacaccttcaccggcatctacacctttgagagcctcatcaagatcctggcccggggcttctgcctggaggacttcaccttcctgcgggacccctggaactggctggacttcagcgtcatcgtgatggcctacgtgacagaatttgtgtccctgggcaatgtgtctgccctgcggaccttccgggtgctgcgggccctgaagaccatcagcgtcatccctggcctgaagaccatcgtgggcgccctgatccagagcgtgaagaagctgagtgatgtgatgatcctgaccgtcttctgcctgtctgtgtttgccctgattggcctgcagctgttcatgggcaacctgaggaacaagtgcctgcagtggcccccaagtgacagcgcctttgagaccaacaccaccagctacttcaacggcaccatggacagcaatggcacctttgtgaatgtgaccatgagcaccttcaactggaaggactacatcggagatgacagccacttctacgtgctggatggccagaaggaccccctgctgtgtggaaatggaagtgatgctggccagtgcccagagggctacatctgtgtgaaggccggcaggaaccccaactacggctacaccagctttgacaccttctcctgggccttcctgagcctcttccggctgatgacccaggactactgggagaacctgtaccagctgaccctgcgggccgccggcaagacctacatgatcttctttgtgctggtgatcttcctgggcagcttctacctggtgaacctgatcctggccgtggtggccatggcctatgaggagcagaaccaggccaccctggaggaggccgagcagaaggaggccgagttccagcagatgctggagcagctgaagaagcagcaggaggaggcccaggccgtggccgccgccagcgctgccagccgggacttctctggaattggaggcctgggggagctgctggagagcagcagcgaggccagcaagctgagcagcaagagcgccaaggagtggaggaacagaaggaagaagaggcggcagcgggagcacctggagggcaacaacaagggggagcgggacagcttccccaagtctgagagtgaagattctgtgaagaggagcagcttcctgttctccatggatggcaaccggctgaccagtgacaagaagttctgcagcccccaccagagcctgctgagcatccggggcagcctcttcagccccaggaggaacagcaagaccagcatcttctccttccggggccgggccaaggatgtgggctctgaaaatgactttgctgatgatgagcacagcacctttgaggacagcgagagcagaagagacagcctgtttgtgccccacagacatggagagaggaggaacagcaatggcaccaccacagaaacagaggtgaggaagaggcggctgagcagctaccagatctccatggagatgctggaggacagcagcggccggcagagagctgtgtccatcgccagcatcctgaccaacaccatggaggagctggaggagagccggcagaagtgccccccctgctggtacagatttgccaacgtgttcctgatctgggactgctgtgatgcctggctgaaggtgaagcacctggtgaacctgattgtgatggacccctttgtggacctggccatcaccatctgcatcgtgctgaacaccctcttcatggccatggagcactaccccatgacagagcagttcagctctgtgctgactgtgggcaacctggtgttcaccggcatcttcaccgctgagatggtgctgaagatcatcgccatggacccctactactacttccaggagggctggaacatctttgatggcatcatcgtgtccctgagcctgatggagctgggcctgagcaatgtggagggcctgtctgtgctgcgctccttccggctgctgcgggtcttcaagctggccaagtcctggcccaccctgaacatgctgatcaagatcatcggcaacagcgtgggcgccctgggcaacctgaccctggtgctggccatcatcgtgttcatctttgctgtggtgggcatgcagctgtttgggaagagctacaaggaatgtgtgtgcaagatcaatgatgactgcaccctgccccgctggcacatgaatgacttcttccacagcttcctgattgtgttccgggtgctgtgtggggagtggattgagaccatgtgggactgcatggaggtggccggccagaccatgtgcctgattgtgttcatgctggtgatggtgattggcaacctggtggtgctgaacctcttcctggccctgctgctgagcagcttcagcagtgacaacctggccgccacagatgatgacaatgagatgaacaacctgcagattgctgtgggccgcatgcagaagggcatcgactatgtgaagaacaagatgagggagtgcttccagaaggccttcttcaggaagcccaaggtgattgagatccacgagggcaacaagattgacagctgcatgagcaacaacacaggcatcgagatcagcaaggagctgaactacctgagagatggaaatggcaccaccagcggcgtgggcaccggcagctctgtggagaagtatgtgattgatgaaaatgactacatgtccttcatcaacaaccccagcctgactgtgacagtgcccatcgctgtgggggagagtgactttgagaacctgaacacagaggagttcagcagcgagagcgagctggaggagagcaaggagaagctgaatgccaccagcagcagcgagggcagcacagtggatgtggtgctgccccgggagggggagcaggccgagacagagcctgaggaggacctgaagccagaggcctgcttcacagagggctgcatcaagaagttccccttctgccaggtgtccacagaggagggcaagggcaagatctggtggaacctgaggaagacctgctacagcatcgtggagcacaactggtttgagaccttcatcgtgttcatgatcctgctgagcagcggggccctggcctttgaggacatctacatcgagcagaggaagaccatcaagaccatgctggagtatgctgacaaggtgttcacctacatcttcatcctggagatgctgctgaagtgggtggcctacggcttccagacctacttcaccaatgcctggtgctggctggacttcctgattgtggatgtgtccctggtgtccctggtggccaatgccctgggctacagcgagctgggcgccatcaagagcctgcggaccctgcgggccctgcggcccctgcgggccctgagcagatttgagggcatgagggtggtggtgaatgccctggtgggcgccatccccagcatcatgaatgtgctgctggtgtgcctgatcttctggctgatcttcagcatcatgggcgtgaacctgtttgctgggaagttctaccactgtgtgaacatgaccaccggcaacatgtttgacatcagtgatgtgaacaacctgagtgactgccaggccctgggcaagcaggcccgctggaagaatgtgaaggtgaactttgacaacgtgggcgccggctacctggccctgctgcaggtggccaccttcaagggctggatggacatcatgtatgctgctgtggacagcagagatgtgaagctgcagcctgtgtatgaagaaaatctctacatgtacctgtactttgtgatcttcatcatcttcggcagcttcttcaccctgaacctcttcatcggggtcatcatcgacaacttcaaccagcagaagaagaagtttggaggccaggacatcttcatgacagaggagcagaagaagtactacaatgccatgaagaagctgggcagcaagaagccccagaagcccatccccaggcctgccaacaagttccagggcatggtgtttgattttgtgacccggcaggtgtttgacatcagcatcatgatcctgatctgcctgaacatggtgaccatgatggtggagacagatgaccagggcaagtacatgaccctggtgctgagccgcatcaacctggtgttcatcgtgctcttcaccggggagtttgtgctgaagctggtgtccctgcggcactactacttcaccatcggctggaacatctttgattttgtggtggtgatcctgagcatcgtgggcatgttcctggccgagatgattgagaagtactttgtgagccccaccctcttccgggtcatccggctggccagaattggccgcatcctgcggctcatcaagggggccaagggcatccgcaccctgctgtttgccctgatgatgagcctgcctgccctcttcaacatcggcctgctgctcttcctggtgatgttcatctatgccatcttcggcatgagcaactttgcctacgtgaagaaggaggccggcattgatgacatgttcaactttgagaccttcggcaacagcatgatctgcctcttccagatcaccaccagcgctggctgggatggcctgctggcccccatcctgaacagcgcccccccagactgtgaccctgacaccatccaccctggcagctctgtgaagggggactgtggcaaccccagcgtgggcatcttcttctttgtgtcctacatcatcatctccttcctggtggtggtgaacatgtacatcgctgtgatcctggagaacttctctgtggccacagaggagagcgctgagcccctgtctgaagatgactttgagatgttttatgaggtgtgggagaagtttgatcctgatgccacccagttcatcgagttcagcaagctgagtgactttgctgctgccctggacccccccctgctgattgccaagcccaacaaggtgcagctgattgccatggacctgcccatggtgtctggggaccgcatccactgcctggacatcctgtttgccttcaccaagagggtgctgggggagagcggggagatggatgccctgcgcatccagatggaggaccgcttcatggccagcaaccccagcaaggtgtcctatgagcccatcaccaccaccctgaagaggaagcaggaggaggtgtctgctgccatcatccagaggaacttccgctgctacctgctgaagcagaggctgaagaacatcagcagcaactacaacaaggaggccatcaagggcagaattgacctgcccatcaagcaggacatgatcatcgacaagctgaatggaaacagcaccccagagaagacagatggcagcagcagcaccaccagcccccccagctatgattctgtgaccaagccagacaaggagaagtttgagaaggacaagccagagaaggagagcaagggcaaggaggtgcgggagaaccagaagtag

SEQ ID NO: 170092 - DNA, 4095 bp, synthetic construct
  misc_feature 1..4095: note = Description of Artificial Sequence: Synthetic coding sequence
  source 1..4095: mol_type = other DNA
atggcccaggccctgctggtgcccccaggccctgagagcttccgcctcttcacccgggagagcctggccgccatcgagaagagagctgctgaggagaaggccaagaagcccaagaaggagcaggacaatgatgatgagaacaagcccaagcccaacagcgacctggaggccggcaagaacctgcccttcatctatggagacatccccccagagatggtgtctgagcccctggaggacctggacccctactacatcaacaagaagaccttcatcgtgatgaacaagggcaaggccatcttccgcttcagcgccaccagcgccctgtacatcctgacccccctgaaccctgtgaggaagatcgccatcaagatcctggtgcacagcctcttctccatgctgatcatgtgcaccatcctgaccaactgtgtgttcatgaccctgagcaaccccccagactggaccaagaatgtggagtacaccttcaccggcatctacacctttgagagcctcatcaagatcctggcccggggcttctgcctggaggacttcaccttcctgcgggacccctggaactggctggacttcagcgtcatcgtgatggcctacgtgacagaatttgtggacctgggcaatgtgtctgccctgcggaccttccgggtgctgcgggccctgaagaccatcagcgtcatccctggcctgaagaccatcgtgggcgccctgatccagagcgtgaagaagctgagtgatgtgatgatcctgaccgtcttctgcctgtctgtgtttgccctgattggcctgcagctgttcatgggcaacctgaggaacaagtgcctgcagtggcccccaagtgacagcgcctttgagaccaacaccaccagctacttcaacggcaccatggacagcaatggcacctttgtgaatgtgaccatgagcaccttcaactggaaggactacatcggagatgacagccacttctacgtgctggatggccagaaggaccccctgctgtgtggaaatggaagtgatgctggccagtgcccagagggctacatctgtgtgaaggccggcaggaaccccaactacggctacaccagctttgacaccttctcctgggccttcctgagcctcttccggctgatgacccaggactactgggagaacctgtaccagctgaccctgcgggccgccggcaagacctacatgatcttctttgtgctggtgatcttcctgggcagcttctacctggtgaacctgatcctggccgtggtggccatggcctatgaggagcagaaccaggccaccctggaggaggccgagcagaaggaggccgagttccagcagatgctggagcagctgaagaagcagcaggaggaggcccaggccgtggccgccgccagcgctgccagccgggacttctctggaattggaggcctgggggagctgctggagagcagcagcgaggccagcaagctgagcagcaagagcgccaaggagtggaggaacagaaggaagaagaggcggcagcgggagcacctggagggcaacaacaagggggagcgggacagcttccccaagtctgagagtgaagattctgtgaagaggagcagcttcctgttctccatggatggcaaccggctgaccagtgacaagaagttctgcagcccccaccagagcctgctgagcatccggggcagcctcttcagccccaggaggaacagcaagaccagcatcttctccttccggggccgggccaaggatgtgggctctgaaaatgactttgctgatgatgagcacagcacctttgaggacagcgagagcagaagagacagcctgtttgtgccccacagacatggagagaggaggaacagcaatggcaccaccacagaaacagaggtgaggaagaggcggctgagcagctaccagatctccatggagatgctggaggacagcagcggccggcagagagctgtgtccatcgccagcatcctgaccaacaccatggaggagctggaggagagccggcagaagtgccccccctgctggtacagatttgccaacgtgttcctgatctgggactgctgtgatgcctggctgaaggtgaagcacctggtgaacctgattgtgatggacccctttgtggacctggccatcaccatctgcatcgtgctgaacaccctcttcatggccatggagcactaccccatgacagagcagttcagctctgtgctgactgtgggcaacctggtgttcaccggcatcttcaccgctgagatggtgctgaagatcatcgccatggacccctactactacttccaggagggctggaacatctttgatggcatcatcgtgtccctgagcctgatggagctgggcctgagcaatgtggagggcctgtctgtgctgcgctccttccggctgctgcgggtcttcaagctggccaagtcctggcccaccctgaacatgctgatcaagatcatcggcaacagcgtgggcgccctgggcaacctgaccctggtgctggccatcatcgtgttcatctttgctgtggtgggcatgcagctgtttgggaagagctacaaggaatgtgtgtgcaagatcaatgatgactgcaccctgccccgctggcacatgaatgacttcttccacagcttcctgattgtgttccgggtgctgtgtggggagtggattgagaccatgtgggactgcatggaggtggccggccagaccatgtgcctgattgtgttcatgctggtgatggtgattggcaacctggtggtgctgaacctcttcctggccctgctgctgagcagcttcagcagtgacaacctggccgccacagatgatgacaatgagatgaacaacctgcagattgctgtgggccgcatgcagaagggcatcgactatgtgaagaacaagatgagggagtgcttccagaaggccttcttcaggaagcccaaggtgattgagatccacgagggcaacaagattgacagctgcatgagcaacaacacaggcatcgagatcagcaaggagctgaactacctgagagatggaaatggcaccaccagcggcgtgggcaccggcagctctgtggagaagtatgtgattgatgaaaatgactacatgtccttcatcaacaaccccagcctgactgtgacagtgcccatcgctgtgggggagagtgactttgagaacctgaacacagaggagttcagcagcgagagcgagctggaggagagcaaggagaagctgaatgccaccagcagcagcgagggcagcacagtggatgtggtgctgccccgggagggggagcaggccgagacagagcctgaggaggacctgaagccagaggcctgcttcacagagggctgcatcaagaagttccccttctgccaggtgtccacagaggagggcaagggcaagatctggtggaacctgaggaagacctgctacagcatcgtggagcacaactggtttgagaccttcatcgtgttcatgatcctgctgagcagcggggccctggcctttgaggacatctacatcgagcagaggaagaccatcaagaccatgctggagtatgctgacaaggtgttcacctacatcttcatcctggagatgctgctgaagtgggtggcctacggcttccagacctacttcaccaatgcctggtgctggctggacttcctgattgtggatgtgtccctggtgtccctggtggccaatgccctgggctacagcgagctgggcgccatcaagagcctgcggaccctgcgggccctgcggcccctgcgggccctgagcagatttgagggcatgagggtggtggtgaatgccctggtgggcgccatccccagcatcatgaatgtgctgctggtgtgcctgatcttctggctgatcttcagcatcatgggcgtgaacctgtttgctgggaagttctaccactgtgtgaacatgaccaccggcaacatgtttgacatcagtgatgtgaacaacctgagtgactgccaggccctgggcaagcaggcccgctggaagaatgtgaaggtgaactttgacaacgtgggcgccggctacctggccctgctgcaggtgtag

SEQ ID NO: 170093 - DNA, 603 bp, synthetic construct
  misc_feature 1..603: note = Description of Artificial Sequence: Synthetic coding sequence
  source 1..603: mol_type = other DNA
atggcccaggccctgctggtgcccccaggccctgagagcttccgcctcttcacccgggagagcctggccgccatcgagaagagagctgctgaggagaaggccaagaagcccaagaaggagcaggacaatgatgatgagaacaagcccaagcccaacagcgacctggaggccggcaagaacctgcccttcatctatggagacatccccccagagatggtgtctgagcccctggaggacctggacccctactacatcaacaagaagaccttcatcgtgatgaacaagggcaaggccatcttccgcttcagcgccaccagcgccctgtacatcctgacccccctgaaccctgtgaggaagatcgccatcaagatcctggtgcacagcctcttctccatgctgatcatgtgcaccatcctgaccaactgtgtgttcatgaccctgagcaaccccccagactggaccaagaatgtggagtacaccttcaccggcatctacacctttgagagcctcatcaagatcctggcccggggcttctgcctggaggacttcaccttcctgcgggacccctggaactggctggacttcagcgtcatcgtgatgtag

SEQ ID NO: 170094 - DNA, 1452 bp, synthetic construct
  misc_feature 1..1452: note = Description of Artificial Sequence: Synthetic coding sequence
  source 1..1452: mol_type = other DNA
atggtgtttgattttgtgacccggcaggtgtttgacatcagcatcatgatcctgatctgcctgaacatggtgaccatgatggtggagacagatgaccagggcaagtacatgaccctggtgctgagccgcatcaacctggtgttcatcgtgctcttcaccggggagtttgtgctgaagctggtgtccctgcggcactactacttcaccatcggctggaacatctttgattttgtggtggtgatcctgagcatcgtgggcatgttcctggccgagatgattgagaagtactttgtgagccccaccctcttccgggtcatccggctggccagaattggccgcatcctgcggctcatcaagggggccaagggcatccgcaccctgctgtttgccctgatgatgagcctgcctgccctcttcaacatcggcctgctgctcttcctggtgatgttcatctatgccatcttcggcatgagcaactttgcctacgtgaagaaggaggccggcattgatgacatgttcaactttgagaccttcggcaacagcatgatctgcctcttccagatcaccaccagcgctggctgggatggcctgctggcccccatcctgaacagcgcccccccagactgtgaccctgacaccatccaccctggcagctctgtgaagggggactgtggcaaccccagcgtgggcatcttcttctttgtgtcctacatcatcatctccttcctggtggtggtgaacatgtacatcgctgtgatcctggagaacttctctgtggccacagaggagagcgctgagcccctgtctgaagatgactttgagatgttttatgaggtgtgggagaagtttgatcctgatgccacccagttcatcgagttcagcaagctgagtgactttgctgctgccctggacccccccctgctgattgccaagcccaacaaggtgcagctgattgccatggacctgcccatggtgtctggggaccgcatccactgcctggacatcctgtttgccttcaccaagagggtgctgggggagagcggggagatggatgccctgcgcatccagatggaggaccgcttcatggccagcaaccccagcaaggtgtcctatgagcccatcaccaccaccctgaagaggaagcaggaggaggtgtctgctgccatcatccagaggaacttccgctgctacctgctgaagcagaggctgaagaacatcagcagcaactacaacaaggaggccatcaagggcagaattgacctgcccatcaagcaggacatgatcatcgacaagctgaatggaaacagcaccccagagaagacagatggcagcagcagcaccaccagcccccccagctatgattctgtgaccaagccagacaaggagaagtttgagaaggacaagccagagaaggagagcaagggcaaggaggtgcgggagaaccagaagtag

SEQ ID NO: 170095 - DNA, 648 bp, synthetic construct
  misc_feature 1..648: note = Description of Artificial Sequence: Synthetic coding sequence
  source 1..648: mol_type = other DNA
atgcctgccttcaacagactcttccccctggccagcctggtgctgatctactgggtgtctgtgtgcttccctgtgtgtgtggaggtgcccagcgagacagaagctgtgcagggcaaccccatgaagctgcgctgcatcagctgcatgaagcgggaggaggtggaggccaccaccgtggtggagtggttctacagacctgagggcggcaaggacttcctgatctatgagtacagaaatggccaccaggaggtggagagccccttccagggccgcctgcagtggaatggcagcaaggacctgcaggatgtgtccatcaccgtgctgaatgtgaccctgaatgattctggcctgtacacctgcaatgtgtcccgggagtttgaatttgaggcccaccggccctttgtgaagaccaccaggctcatccccctgcgggtgacagaggaggccggggaggacttcacctctgtggtgtctgagatcatgatgtacatcctgctggtgttcctgaccctgtggctgctgattgagatgatctactgctacaggaaggtgtccaaggccgaggaggccgcccaggagaatgccagtgactacctggccatccccagcgagaacaaggaaaattctgctgtgcctgtggaggagtag

SEQ ID NO: 170096 - DNA, 648 bp, synthetic construct; identical to SEQ ID NO: 170095
  misc_feature 1..648: note = Description of Artificial Sequence: Synthetic coding sequence
  source 1..648: mol_type = other DNA

SEQ ID NO: 170097 - DNA, 426 bp, synthetic construct
  misc_feature 1..426: note = Description of Artificial Sequence: Synthetic coding sequence
  source 1..426: mol_type = other DNA
atgcctgccttcaacagactcttccccctggccagcctggtgctgatctactgggtgtctgtgtgcttccctgtgtgtgtggaggtgcccagcgagacagaagctgtgcagggcaaccccatgaagctgcgctgcatcagctgcatgaagcgggaggaggtggaggccaccaccgtggtggagtggttctacagacctgagggcggcaaggacttcctgatctatgagtacagaaatggccaccaggaggtggagagccccttccagggccgcctgcagtggaatggcagcaaggacctgcaggatgtgtccatcaccgtgctgaatgtgaccctgaatgattctggcctgtacacctgcaatgtgtcccgggagtttgaatttgaggcccaccggccctttgtgaagaccaccaggctcatctag

SEQ ID NO: 170098 - DNA, 648 bp, synthetic construct; identical to SEQ ID NO: 170095
  misc_feature 1..648: note = Description of Artificial Sequence: Synthetic coding sequence
  source 1..648: mol_type = other DNA

SEQ ID NO: 170099 - DNA, 5511 bp, synthetic construct
  misc_feature 1..5511: note = Description of Artificial Sequence: Synthetic coding sequence
  source 1..5511: mol_type = other DNA
atggcccggcccagcctgtgcaccctggtgcccctgggcccagaatgtctgcggcccttcacccgggagagcctggccgccatcgagcagagagctgtggaggaggaggcccggctgcagaggaacaagcagatggagattgaggagcctgagaggaagcccaggagtgacctggaggccggcaagaacctgcccatgatctacggggaccccccacctgaggtgattggcatccccctggaggacctggacccctactacagcaacaagaagaccttcatcgtgctgaacaagggcaaggccatcttccgcttcagcgccaccccagccctgtacctgctgagccccttctctgtggtgagaagaggagccatcaaggtgctgatccacgccctcttctccatgttcatcatgatcaccatcctgaccaactgtgtgttcatgaccatgtctgaccccccaccctggagcaagaatgtggagtacaccttcaccggcatctacacctttgagagcctcatcaagatcctggcccggggcttctgtgtggatgacttcaccttcctgcgggacccctggaactggctggacttcagcgtcatcatgatggcctacctgacagaatttgtggacctgggcaacatcagcgccctgcggaccttccgggtgctgcgggccctgaagaccatcaccgtcatccctggcctgaagaccatcgtgggcgccctgatccagagcgtgaagaagctgagtgatgtgatgatcctgactgtgttctgcctgtctgtgtttgccctggtgggcctgcagctgttcatgggcaacctgcggcagaagtgtgtgcgctggcccccacccttcaatgacaccaacaccacctggtacagcaatgacacctggtatggaaatgacacctggtatggaaatgagatgtggtatggaaatgacagctggtacgccaatgacacctggaacagccacgcctcctgggccaccaatgacacctttgactgggatgcctacatcagtgatgagggcaacttctacttcctggagggcagcaatgatgccctgctgtgtggcaacagcagtgatgctggccactgcccagagggctatgagtgcatcaagacaggcaggaaccccaactacggctacaccagctatgacaccttctcctgggccttcctggccctcttccggctgatgacccaggactactgggagaacctcttccagctgaccctgcgggctgctgggaagacctacatgatcttctttgtggtgatcatcttcctgggcagcttctacctgatcaacctgatcctggccgtggtggccatggcctatgcagagcagaatgaggccaccctggccgaggacaaggagaaggaggaggagttccagcagatgctggagaagttcaagaagcaccaggaggagctggagaaggccaaggccgcccaggccctggagggcggggaggctgatggagaccctgcccacggcaaggactgcaatggcagcctggacaccagccagggcgagaagggggccccccggcagagcagcagcggggacagcggcatcagtgatgccatggaggagctggaggaggcccaccagaagtgccccccctggtggtacaagtgtgcccacaaggtgctgatctggaactgctgtgccccctggctgaagttcaagaacatcatccacctgattgtgatggacccctttgtggacctgggcatcaccatctgcatcgtgctgaacaccctcttcatggccatggagcactaccccatgacagagcactttgacaacgtgctgactgtgggcaacctggtgttcaccggcatcttcaccgctgagatggtgctgaagctgattgccatggacccctatgagtacttccagcagggctggaacatctttgacagcatcatcgtgaccctgagcctggtggagctgggcctggccaacgtgcagggcctgtctgtgctgcggagcttccggctgctgcgggtcttcaagctggccaagtcctggcccaccctgaacatgctgatcaagatcatcggcaacagcgtgggcgccctgggcaacctgaccctggtgctggccatcatcgtgttcatctttgctgtggtgggcatgcagctgtttgggaagagctacaaggaatgtgtgtgcaagatcgccctggactgcaacctgccccgctggcacatgcatgacttcttccacagcttcctgattgtgttccgcatcctgtgtggggagtggattgagaccatgtgggactgcatggaggtggccggccaggccatgtgcctgaccgtcttcctgatggtgatggtgattggcaacctggtggtgctgaacctcttcctggccctgctgctgagcagcttctctgctgacagcctggccgccagtgatgaagatggagagatgaacaacctgcagatcgccatcggccgcatcaagctgggcattggatttgccaaggccttcctgctgggcctgctgcacggcaagatcctgagccccaaggacatcatgctgagcctgggggaggctgatggagctggggaggccggggaggccggggagacagccccagaagatgagaagaaggagcccccagaggaggacctgaagaaggacaaccacatcctgaaccacatgggcctggctgatggcccccccagcagcctggagctggaccacctgaacttcatcaacaacccctacctgaccatccaggtgcccatcgccagcgaggagagtgacctggagatgcccacagaggaggagacagacaccttcagcgagcctgaggacagcaagaagccaccccagcccctgtatgatggcaacagctctgtgtgcagcacagctgactacaagcccccagaagaagatcctgaggagcaggccgaggagaaccctgagggggagcagcctgaggagtgcttcacagaggcctgtgtgcagcgctggccctgcctgtatgtggacatcagccagggccggggcaagaagtggtggaccctgcggcgggcctgcttcaagatcgtggagcacaactggtttgagaccttcatcgtgttcatgatcctgctgagcagcggggccctggcctttgaggacatctacatcgagcagaggagggtcatccgcaccatcctggagtatgctgacaaggtgttcacctacatcttcatcatggagatgctgctgaagtgggtggcctacggcttcaaggtgtacttcaccaatgcctggtgctggctggacttcctgattgtggatgtgtccatcatcagcctggtggccaactggctgggctacagcgagctgggccccatcaagagcctgcggaccctgcgggccctgcggcccctgcgggccctgagcagatttgagggcatgagggtggtggtgaatgccctgctgggcgccatccccagcatcatgaatgtgctgctggtgtgcctgatcttctggctgatcttcagcatcatgggcgtgaacctgtttgctgggaagttctactactgcatcaacaccaccaccagcgagagatttgacatcagcgaggtgaacaacaagtcagaatgtgagagcctgatgcacacaggccaggtgcgctggctgaatgtgaaggtgaactatgacaacgtgggcctgggctacctgagcctgctgcaggtggccaccttcaagggctggatggacatcatgtatgctgctgtggacagccgggagaaggaggagcagccccagtatgaggtgaacctgtacatgtacctgtactttgtgatcttcatcatcttcggcagcttcttcaccctgaacctcttcatcggggtcatcatcgacaacttcaaccagcagaagaagaagctgggcggcaaggacatcttcatgacagaggagcagaagaagtactacaatgccatgaagaagctgggcagcaagaagccccagaagcccatcccccggccccagaacaagatccagggcatggtgtatgacctggtgaccaagcaggcctttgacatcaccatcatgatcctgatctgcctgaacatggtgaccatgatggtggagacagacaaccagagccagctgaaggtggacatcctgtacaacatcaacatgatcttcatcatcatcttcaccggagaatgtgtgctgaagatgctggccctgcggcagtactacttcaccgtgggctggaacatctttgattttgtggtggtgatcctgagcatcgtgggcctggccctgagtgacctgatccagaagtactttgtgagccccaccctcttccgggtcatccggctggccagaattggccgggtgctgcggctcatccggggggccaagggcatccgcaccctgctgtttgccctgatgatgagcctgcctgccctcttcaacatcggcctgctgctcttcctggtgatgttcatctacagcatcttcggcatgagcaactttgcctacgtgaagaaggagagcggcattgatgacatgttcaactttgagaccttcggcaacagcatcatctgcctgtttgagatcaccaccagcgctggctgggatggcctgctgaaccccatcctgaacagcggccccccagactgtgaccccaacctggagaaccctggcacctctgtgaagggggactgtggcaaccccagcatcggcatctgcttcttctgcagctacatcatcatctccttcctgattgtggtgaacatgtacatcgccatcatcctggagaacttcaacgtggccacagaggagagcagcgagcccctgggggaggatgactttgagatgttttatgagacctgggagaagtttgatcctgatgccacccagttcatcgcctacagccggctgagtgactttgtggacaccctgcaggagcccctgagaattgccaagcccaacaagatcaagctgatcaccctggacctgcccatggtgcctggggacaagatccactgcctggacatcctgtttgccctgaccaaggaggtgctgggggacagcggggagatggatgccctgaagcagaccatggaggagaagttcatggccgccaaccccagcaaggtgtcctatgagcccatcaccaccaccctgaagaggaagcatgaggaggtgtgtgccatcaagatccagagggcctacagaagacacctgctgcagaggtccatgaagcaggccagctacatgtaccgccacagccatgatggcagcggagatgatgcccctgagaaggagggcctgctggccaacaccatgagcaagatgtatggccatgaaaatggaaacagcagcagccccagccctgaggagaagggggaggccggagatgctggccccaccatgggcctgatgcccatcagccccagcgacacagcctggcccccagcccctcctcctggccagacagtgcggcctggggtgaaggagagcctggtgtag

SEQ ID NO: 170100 - DNA, 687 bp, synthetic construct
  misc_feature 1..687: note = Description of Artificial Sequence: Synthetic coding sequence
  source 1..687: mol_type = other DNA
atgcctggagctggagatggcggcaaggccccagcccgctggctgggcaccggcctgctgggcctcttcctgctgcctgtgaccctgagcctggaggtgtctgtgggcaaggccacagacatctatgctgtgaatggaacagagatcctgctgccctgcaccttcagcagctgctttggatttgaggacctgcacttccgctggacctacaacagcagtgatgccttcaagatcctgattgagggcaccgtgaagaatgagaagagtgaccccaaggtgaccctgaaggatgatgaccgcatcaccctggtgggcagcaccaaggagaagatgaacaacatcagcatcgtgctgcgggacctggagttcagtgacaccgggaagtacacctgccacgtgaagaaccccaaggagaacaacctgcagcaccacgccaccatcttcctgcaggtggtggaccggctggaggaggtggacaacacagtgaccctcatcatcctggccgtggtgggcggcgtcatcggcctgctgatcctgatcctgctgatcaagaagctgatcatcttcatcctgaagaagacccgggagaagaagaaggagtgcctggtgagcagcagtggaaatgacaacacagaaaatggcctgcccggcagcaaggccgaggagaagccacccagcaaggtgtag

SEQ ID NO: 170101 - DNA, 285 bp, synthetic construct
  misc_feature 1..285: note = Description of Artificial Sequence: Synthetic coding sequence
  source 1..285: mol_type = other DNA
atgcctggagctggagatggcggcaaggccccagcccgctggctgggcaccggcctgctggtggaggaggtggacaacacagtgaccctcatcatcctggccgtggtgggcggcgtcatcggcctgctgatcctgatcctgctgatcaagaagctgatcatcttcatcctgaagaagacccgggagaagaagaaggagtgcctggtgagcagcagtggaaatgacaacacagaaaatggcctgcccggcagcaaggccgaggagaagccacccagcaaggtgtag

SEQ ID NO: 170102 - DNA, 5970 bp, synthetic construct
  misc_feature 1..5970: note = Description of Artificial Sequence: Synthetic coding sequence
  source 1..5970: mol_type = other DNA
atggccatgctgcccccacctggcccccagagctttgtgcacttcaccaagcagagcctggccctgattgagcagagaattgctgagaggaagagcaaggagcccaaggaggagaagaaggatgatgatgaggaggcccccaagcccagcagtgacctggaggccggcaagcagctgcccttcatctatggagacatccccccaggcatggtgtctgagcccctggaggacctggacccctactatgctgacaagaagaccttcatcgtgctgaacaagggcaagaccatcttccgcttcaatgccaccccagccctgtacatgctgagccccttcagccccctgcggcgcatcagcatcaagatcctggtgcacagcaccctcttctccatgctgatcatgtgcaccatcctgaccaactgcatcttcatgaccatgaacaaccccccagactggaccaagaatgtggagtacaccttcaccggcatctacacctttgagagcctggtgaagatcctggcccggggcttctgtgtgggggagttcaccttcctgcgggacccctggaactggctggactttgtggtgattgtgtttgcctacctgacagaatttgtgaacctgggcaatgtgtctgccctgcggaccttccgggtgctgcgggccctgaagaccatcagcgtcatccctggcctgaagaccatcgtgggcgccctgatccagagcgtgaagaagctgagtgatgtgatgatcctgactgtgttctgcctgtctgtgtttgccctgattggcctgcagctgttcatgggcaacctgaagcacaagtgcttcaggaacagcctggagaacaatgagaccctggagagcatcatgaacaccctggagagcgaggaggacttcaggaagtacttctactacctggagggcagcaaggatgccctgctgtgtggcttcagcacagacagcggccagtgcccagagggctacacctgtgtgaagattggaagaaatccagactatggctacaccagctttgacaccttctcctgggccttcctggccctcttccggctgatgacccaggactactgggagaacctgtaccagcagaccctgcgggctgctgggaagacctacatgatcttctttgtggtggtgatcttcctgggcagcttctacctgatcaacctgatcctggccgtggtggccatggcctatgaggagcagaaccaggccaacatcgaggaggccaagcagaaggagctggagttccagcagatgctggaccggctgaagaaggagcaggaggaggccgaggccatcgctgctgctgctgctgagtacaccagcatccgccgcagccgcatcatgggcctgtctgagagcagcagcgagaccagcaagctgagcagcaagagcgccaaggagaggaggaacagaaggaagaagaagaaccagaagaagctgagcagtggagaggagaagggagatgctgagaagctgagcaagtctgagagtgaagattccatccggaggaagagcttccacctgggcgtggagggccacagaagagcccacgagaagaggctgagcacccccaaccagagccccctgagcatccggggcagcctcttcagcgcccggcgcagcagcaggaccagcctcttctccttcaagggccggggccgggacatcggcagcgagacagaatttgctgatgatgagcacagcatctttggagacaatgaaagcagaagaggcagcctgtttgtgccccaccggccccaggagcggcgcagcagcaacatcagccaggccagccgcagcccccccatgctgcctgtgaatggcaagatgcacagcgctgtggactgcaatggagtggtgtccctggtggatggccgcagcgccctgatgctgcccaacggccagctgctgcctgaggtgatcatcgacaaggccaccagtgatgattctggcaccaccaaccagatccacaagaagaggcgctgcagcagctacctgctgtctgaggacatgctgaatgaccccaacctgcggcagagggccatgagccgggccagcatcctgaccaacacagtggaggagctggaggagagccggcagaagtgccccccctggtggtacagatttgcccacaagttcctgatctggaactgcagcccctactggatcaagttcaagaagtgcatctacttcatcgtgatggacccctttgtggacctggccatcaccatctgcatcgtgctgaacaccctcttcatggccatggagcaccaccccatgacagaggagttcaagaatgtgctggccatcggcaacctggtgttcaccggcatctttgctgctgagatggtgctgaagctgattgccatggacccctatgagtacttccaggtgggctggaacatctttgacagcctcatcgtgaccctgagcctggtggagctgttcctggctgatgtggagggcctgtctgtgctgcgctccttccggctgctgcgggtcttcaagctggccaagtcctggcccaccctgaacatgctgatcaagatcatcggcaacagcgtgggcgccctgggcaacctgaccctggtgctggccatcatcgtgttcatctttgctgtggtgggcatgcagctgtttgggaagagctacaaggaatgtgtgtgcaagatcaatgatgactgcaccctgccccgctggcacatgaatgacttcttccacagcttcctgattgtgttccgggtgctgtgtggggagtggattgagaccatgtgggactgcatggaggtggccggccaggccatgtgcctgattgtgtacatgatggtgatggtgattggcaacctggtggtgctgaacctcttcctggccctgctgctgagcagcttcagcagtgacaacctgacagccatcgaggaggaccctgatgccaacaacctgcagattgctgtgacccgcatcaagaagggcatcaactacgtgaagcagaccctgcgggagttcatcctgaaggccttcagcaagaagcccaagatcagccgggagatccggcaggccgaggacctgaacaccaagaaggagaactacatcagcaaccacaccctggccgagatgagcaagggccacaacttcctgaaggagaaggacaagatcagcggcttcggcagctctgtggacaagcacctgatggaggacagtgatggccagagcttcatccacaaccccagcctgactgtgacagtgcccatcgcccctggagagagtgacctggagaacatgaatgctgaggagctgagcagtgacagcgacagcgagtacagcaaggtgcggctgaacagaagcagcagcagtgaatgttccacagtggacaaccccctgcccggggagggggaggaggccgaggccgagcccatgaacagtgatgagcctgaggcctgcttcacagatggctgtgtgtggaggttcagctgctgccaggtgaacattgaaagtggcaagggcaagatctggtggaacatcaggaagacctgctacaagatcgtggagcacagctggtttgagagcttcatcgtgctgatgatcctgctgagcagcggggccctggcctttgaggacatctacattgaaaggaagaagaccatcaagatcatcctggagtatgctgacaagatcttcacctacatcttcatcctggagatgctgctgaagtggatcgcctacggctacaagacctacttcaccaatgcctggtgctggctggacttcctgattgtggatgtgtccctggtgaccctggtggccaacaccctgggctacagcgacctgggccccatcaagagcctgcggaccctgcgggccctgcggcccctgcgggccctgagcagatttgagggcatgagggtggtggtgaatgccctgattggagccatccccagcatcatgaatgtgctgctggtgtgcctgatcttctggctgatcttcagcatcatgggcgtgaacctgtttgctgggaagttctatgagtgcatcaacaccacagatggcagccgcttccctgccagccaggtgcccaacagaagtgagtgctttgccctgatgaatgtgtcccagaatgtgcgctggaagaacctgaaggtgaactttgacaacgtgggcctgggctacctgagcctgctgcaggtggccaccttcaagggctggaccatcatcatgtatgctgctgtggacagcgtgaatgtggacaagcagcccaagtatgagtacagcctgtacatgtacatctactttgtggtgttcatcatcttcggcagcttcttcaccctgaacctcttcatcggggtcatcatcgacaacttcaaccagcagaagaagaagctgggcggccaggacatcttcatgacagaggagcagaagaagtactacaatgccatgaagaagctgggcagcaagaagccccagaagcccatccccaggcctggcaacaagatccagggctgcatctttgacctggtgaccaaccaggcctttgacatcagcatcatggtgctgatctgcctgaacatggtgaccatgatggtggagaaggagggccagagccagcacatgacagaggtgctgtactggatcaacgtggtgttcatcatcctcttcaccggggagtgtgtgctgaagctgatcagcctgcggcactactacttcaccgtgggctggaacatctttgattttgtggtggtgatcatcagcatcgtgggcatgttcctggccgacctgattgagacctactttgtgagccccaccctcttccgggtcatccggctggcccgcatcggccgcatcctgcggctggtgaagggggccaagggcatccgcaccctgctgtttgccctgatgatgagcctgcctgccctcttcaacatcggcctgctgctcttcctggtgatgttcatctatgccatcttcggcatgagcaactttgcctacgtgaagaaggaggatggcatcaatgacatgttcaactttgagacctttggaaacagcatgatctgcctcttccagatcaccaccagcgctggctgggatggcctgctggcccccatcctgaacagcaagcccccagactgtgaccccaagaaggtgcaccctggcagctctgtggagggggactgtggcaaccccagcgtgggcatcttctactttgtgtcctacatcatcatctccttcctggtggtggtgaacatgtacatcgccgtcatcctggagaacttctctgtggccacagaggagagcacagagcccctgtctgaagatgactttgagatgttttatgaggtgtgggagaagtttgatcctgatgccacccagttcatcgagttcagcaagctgagtgactttgctgctgccctggacccccccctgctgattgccaagcccaacaaggtgcagctgattgccatggacctgcccatggtgtctggggaccgcatccactgcctggacatcctgtttgccttcaccaagagggtgctgggggagagcggggagatggacagcctgcggagccagatggaggagcgcttcatgtctgccaaccccagcaaggtgtcctatgagcccatcaccaccaccctgaagaggaagcaggaggatgtgtctgccaccgtcatccagagggcctaccgccgctaccgcctgcggcagaatgtgaagaacatcagcagcatctacatcaaggatggagacagagatgatgacctgctgaacaagaaggacatggcctttgacaacgtgaatgaaaacagcagccctgagaagacagatgccaccagcagcaccaccagcccccccagctatgattctgtgaccaagccagacaaggagaagtatgagcaggacagaacagagaaggaggacaagggcaaggacagcaaggagagcaagaagtag

SEQ ID NO: 170103 - DNA, 5970 bp, synthetic construct
  misc_feature 1..5970: note = Description of Artificial Sequence: Synthetic coding sequence
  source 1..5970: mol_type = other DNA
atggccatgctgcccccacctggcccccagagctttgtgcacttcaccaagcagagcctggccctgattgagcagagaattgctgagaggaagagcaaggagcccaaggaggagaagaaggatgatgatgaggaggcccccaagcccagcagtgacctggaggccggcaagcagctgcccttcatctatggagacatccccccaggcatggtgtctgagcccctggaggacctggacccctactatgctgacaagaagaccttcatcgtgctgaacaagggcaagaccatcttccgcttcaatgccaccccagccctgtacatgctgagccccttcagccccctgcggcgcatcagcatcaagatcctggtgcacagcaccctcttctccatgctgatcatgtgcaccatcctgaccaactgcatcttcatgaccatgaacaaccccccagactggaccaagaatgtggagtacaccttcaccggcatctacacctttgagagcctggtgaagatcctggcccggggcttctgtgtgggggagttcaccttcctgcgggacccctggaactggctggactttgtggtgattgtgtttgcctacgtgacagaatttgtggacctgggcaatgtgtctgccctgcggaccttccgggtgctgcgggccctgaagaccatcagcgtcatccctggcctgaagaccatcgtgggcgccctgatccagagcgtgaagaagctgagtgatgtgatgatcctgactgtgttctgcctgtctgtgtttgccctgattggcctgcagctgttcatgggcaacctgaagcacaagtgcttcaggaacagcctggagaacaatgagaccctggagagcatcatgaacaccctggagagcgaggaggacttcaggaagtacttctactacctggagggcagcaaggatgccctgctgtgtggcttcagcacagacagcggccagtgcccagagggctacacctgtgtgaagattggaagaaatccagactatggctacaccagctttgacaccttctcctgggccttcctggccctcttccggctgatgacccaggactactgggagaacctgtaccagcagaccctgcgggctgctgggaagacctacatgatcttctttgtggtggtgatcttcctgggcagcttctacctgatcaacctgatcctggccgtggtggccatggcctatgaggagcagaaccaggccaacatcgaggaggccaagcagaaggagctggagttccagcagatgctggaccggctgaagaaggagcaggaggaggccgaggccatcgctgctgctgctgctgagtacaccagcatccgccgcagccgcatcatgggcctgtctgagagcagcagcgagaccagcaagctgagcagcaagagcgccaaggagaggaggaacagaaggaagaagaagaaccagaagaagctgagcagtggagaggagaagggagatgctgagaagctgagcaagtctgagagtgaagattccatccggaggaagagcttccacctgggcgtggagggccacagaagagcccacgagaagaggctgagcacccccaaccagagccccctgagcatccggggcagcctcttcagcgcccggcgcagcagcaggaccagcctcttctccttcaagggccggggccgggacatcggcagcgagacagaatttgctgatgatgagcacagcatctttggagacaatgaaagcagaagaggcagcctgtttgtgccccaccggccccaggagcggcgcagcagcaacatcagccaggccagccgcagcccccccatgctgcctgtgaatggcaagatgcacagcgctgtggactgcaatggagtggtgtccctggtggatggccgcagcgccctgatgctgcccaacggccagctgctgcctgaggtgatcatcgacaaggccaccagtgatgattctggcaccaccaaccagatccacaagaagaggcgctgcagcagctacctgctgtctgaggacatgctgaatgaccccaacctgcggcagagggccatgagccgggccagcatcctgaccaacacagtggaggagctggaggagagccggcagaagtgccccccctggtggtacagatttgcccacaagttcctgatctggaactgcagcccctactggatcaagttcaagaagtgcatctacttcatcgtgatggacccctttgtggacctggccatcaccatctgcatcgtgctgaacaccctcttcatggccatggagcaccaccccatgacagaggagttcaagaatgtgctggccatcggcaacctggtgttcaccggcatctttgctgctgagatggtgctgaagctgattgccatggacccctatgagtacttccaggtgggctggaacatctttgacagcctcatcgtgaccctgagcctggtggagctgttcctggctgatgtggagggcctgtctgtgctgcgctccttccggctgctgcgggtcttcaagctggccaagtcctggcccaccctgaacatgctgatcaagatcatcggcaacagcgtgggcgccctgggcaacctgaccctggtgctggccatcatcgtgttcatctttgctgtggtgggcatgcagctgtttgggaagagctacaaggaatgtgtgtgcaagatcaatgatgactgcaccctgccccgctggcacatgaatgacttcttccacagcttcctgattgtgttccgggtgctgtgtggggagtggattgagaccatgtgggactgcatggaggtggccggccaggccatgtgcctgattgtgtacatgatggtgatggtgattggcaacctggtggtgctgaacctcttcctggccctgctgctgagcagcttcagcagtgacaacctgacagccatcgaggaggaccctgatgccaacaacctgcagattgctgtgacccgcatcaagaagggcatcaactacgtgaagcagaccctgcgggagttcatcctgaaggccttcagcaagaagcccaagatcagccgggagatccggcaggccgaggacctgaacaccaagaaggagaactacatcagcaaccacaccctggccgagatgagcaagggccacaacttcctgaaggagaaggacaagatcagcggcttcggcagctctgtggacaagcacctgatggaggacagtgatggccagagcttcatccacaaccccagcctgactgtgacagtgcccatcgcccctggagagagtgacctggagaacatgaatgctgaggagctgagcagtgacagcgacagcgagtacagcaaggtgcggctgaacagaagcagcagcagtgaatgttccacagtggacaaccccctgcccggggagggggaggaggccgaggccgagcccatgaacagtgatgagcctgaggcctgcttcacagatggctgtgtgtggaggttcagctgctgccaggtgaacattgaaagtggcaagggcaagatctggtggaacatcaggaagacctgctacaagatcgtggagcacagctggtttgagagcttcatcgtgctgatgatcctgctgagcagcggggccctggcctttgaggacatctacattgaaaggaagaagaccatcaagatcatcctggagtatgctgacaagatcttcacctacatcttcatcctggagatgctgctgaagtggatcgcctacggctacaagacctacttcaccaatgcctggtgctggctggacttcctgattgtggatgtgtccctggtgaccctggtggccaacaccctgggctacagcgacctgggccccatcaagagcctgcggaccctgcgggccctgcggcccctgcgggccctgagcagatttgagggcatgagggtggtggtgaatgccctgattggagccatccccagcatcatgaatgtgctgctggtgtgcctgatcttctggctgatcttcagcatcatgggcgtgaacctgtttgctgggaagttctatgagtgcatcaacaccacagatggcagccgcttccctgccagccaggtgcccaacagaagtgagtgctttgccctgatgaatgtgtcccagaatgtgcgctggaagaacctgaaggtgaactttgacaacgtgggcctgggctacctgagcctgctgcaggtggccaccttcaagggctggaccatcatcatgtatgctgctgtggacagcgtgaatgtggacaagcagcccaagtatgagtacagcctgtacatgtacatctactttgtggtgttcatcatcttcggcagcttcttcaccctgaacctcttcatcggggtcatcatcgacaacttcaaccagcagaagaagaagctgggcggccaggacatcttcatgacagaggagcagaagaagtactacaatgccatgaagaagctgggcagcaagaagccccagaagcccatccccaggcctggcaacaagatccagggctgcatctttgacctggtgaccaaccaggcctttgacatcagcatcatggtgctgatctgcctgaacatggtgaccatgatggtggagaaggagggccagagccagcacatgacagaggtgctgtactggatcaacgtggtgttcatcatcctcttcaccggggagtgtgtgctgaagctgatcagcctgcggcactactacttcaccgtgggctggaacatctttgattttgtggtggtgatcatcagcatcgtgggcatgttcctggccgacctgattgagacctactttgtgagccccaccctcttccgggtcatccggctggcccgcatcggccgcatcctgcggctggtgaagggggccaagggcatccgcaccctgctgtttgccctgatgatgagcctgcctgccctcttcaacatcggcctgctgctcttcctggtgatgttcatctatgccatcttcggcatgagcaactttgcctacgtgaagaaggaggatggcatcaatgacatgttcaactttgagacctttggaaacagcatgatctgcctcttccagatcaccaccagcgctggctgggatggcctgctggcccccatcctgaacagcaagcccccagactgtgaccccaagaaggtgcaccctggcagctctgtggagggggactgtggcaaccccagcgtgggcatcttctactttgtgtcctacatcatcatctccttcctggtggtggtgaacatgtacatcgccgtcatcctggagaacttctctgtggccacagaggagagcacagagcccctgtctgaagatgactttgagatgttttatgaggtgtgggagaagtttgatcctgatgccacccagttcatcgagttcagcaagctgagtgactttgctgctgccctggacccccccctgctgattgccaagcccaacaaggtgcagctgattgccatggacctgcccatggtgtctggggaccgcatccactgcctggacatcctgtttgccttcaccaagagggtgctgggggagagcggggagatggacagcctgcggagccagatggaggagcgcttcatgtctgccaaccccagcaaggtgtcctatgagcccatcaccaccaccctgaagaggaagcaggaggatgtgtctgccaccgtcatccagagggcctaccgccgctaccgcctgcggcagaatgtgaagaacatcagcagcatctacatcaaggatggagacagagatgatgacctgctgaacaagaaggacatggcctttgacaacgtgaatgaaaacagcagccctgagaagacagatgccaccagcagcaccaccagcccccccagctatgattctgtgaccaagccagacaaggagaagtatgagcaggacagaacagagaaggaggacaagggcaaggacagcaaggagagcaagaagtag

SEQ ID NO: 170104 - DNA, 5967 bp, synthetic construct
  misc_feature 1..5967: note = Description of Artificial Sequence: Synthetic coding sequence
  source 1..5967: mol_type = other DNA
atggccatgctgcccccacctggcccccagagctttgtgcacttcaccaagcagagcctggccctgattgagcagagaattgctgagaggaagagcaaggagcccaaggaggagaagaaggatgatgatgaggaggcccccaagcccagcagtgacctggaggccggcaagcagctgcccttcatctatggagacatccccccaggcatggtgtctgagcccctggaggacctggacccctactatgctgacaagaagaccttcatcgtgctgaacaagggcaagaccatcttccgcttcaatgccaccccagccctgtacatgctgagccccttcagccccctgcggcgcatcagcatcaagatcctggtgcacagcctcttctccatgctgatcatgtgcaccatcctgaccaactgcatcttcatgaccatgaacaaccccccagactggaccaagaatgtggagtacaccttcaccggcatctacacctttgagagcctggtgaagatcctggcccggggcttctgtgtgggggagttcaccttcctgcgggacccctggaactggctggactttgtggtgattgtgtttgcctacctgacagaatttgtgaacctgggcaatgtgtctgccctgcggaccttccgggtgctgcgggccctgaagaccatcagcgtcatccctggcctgaagaccatcgtgggcgccctgatccagagcgtgaagaagctgagtgatgtgatgatcctgaccgtcttctgcctgtctgtgtttgccctgattggcctgcagctgttcatgggcaacctgaagcacaagtgcttcaggaacagcctggagaacaatgagaccctggagagcatcatgaacaccctggagagcgaggaggacttcaggaagtacttctactacctggagggcagcaaggatgccctgctgtgtggcttcagcacagattctggccagtgcccagagggctacacctgtgtgaagattggaagaaatccagactatggctacaccagctttgacaccttctcctgggccttcctggccctcttccggctgatgacccaggactactgggagaacctgtaccagcagaccctgcgggccgccggcaagacctacatgatcttctttgtggtggtgatcttcctgggcagcttctacctgatcaacctgatcctggccgtggtggccatggcctatgaggagcagaaccaggccaacatcgaggaggccaagcagaaggagctggagttccagcagatgctggaccggctgaagaaggagcaggaggaggccgaggccatcgctgctgctgctgctgagtacaccagcatcagaagaagccgcatcatgggcctgtctgagagcagcagcgagaccagcaagctgagcagcaagagcgccaaggagaggaggaacagaaggaagaagaagaaccagaagaagctgagcagcggggaggagaagggagatgctgagaagctgagcaagtctgagagcgaggacagcatccggaggaagagcttccacctgggcgtggagggccaccggcgggcccacgagaagaggctgagcacccccaaccagagccccctgagcatccggggcagcctcttcagcgcccggcgcagcagcaggaccagcctcttctccttcaagggccggggccgggacatcggcagcgagacagaatttgctgatgatgagcacagcatctttggagacaatgaaagccggcggggcagcctgtttgtgccccaccggccccaggagaggaggagcagcaacatcagccaggccagccgcagcccccccatgctgcctgtgaatggcaagatgcacagcgctgtggactgcaatggagtggtgtccctggtggatggccgcagcgccctgatgctgcccaacggccagctgctgcctgaggtgatcatcgacaaggccaccagtgatgacagcggcaccaccaaccagatccacaagaagaggcgctgcagcagctacctgctgtctgaggacatgctgaatgaccccaacctgcggcagagggccatgagccgggccagcatcctgaccaacacagtggaggagctggaggagagccggcagaagtgccccccctggtggtacagatttgcccacaagttcctgatctggaactgcagcccctactggatcaagttcaagaagtgcatctacttcatcgtgatggacccctttgtggacctggccatcaccatctgcatcgtgctgaacaccctcttcatggccatggagcaccaccccatgacagaggagttcaagaatgtgctggccatcggcaacctggtgttcaccggcatctttgctgctgagatggtgctgaagctgattgccatggacccctatgagtacttccaggtgggctggaacatctttgacagcctgattgtgaccctgagcctggtggagctgttcctggctgatgtggagggcctgtctgtgctgcggagcttccggctgctgcgggtcttcaagctggccaagtcctggcccaccctgaacatgctgatcaagatcatcggcaacagcgtgggcgccctgggcaacctgaccctggtgctggccatcatcgtgttcatctttgctgtggtgggcatgcagctgtttgggaagagctacaaggaatgtgtgtgcaagatcaatgatgactgcaccctgccccgctggcacatgaatgacttcttccacagcttcctgattgtgttccgggtgctgtgtggggagtggattgagaccatgtgggactgcatggaggtggccggccaggccatgtgcctgattgtgtacatgatggtgatggtgattggcaacctggtggtgctgaacctcttcctggccctgctgctgagcagcttcagcagtgacaacctgacagccattgaagaagatcctgatgccaacaacctgcagattgctgtgacccgcatcaagaagggcatcaactacgtgaagcagaccctgcgggagttcatcctgaaggccttcagcaagaagcccaagatcagccgggagatccggcaggccgaggacctgaacaccaagaaggagaactacatcagcaaccacaccctggccgagatgagcaagggccacaacttcctgaaggagaaggacaagatcagcggcttcggcagctctgtggacaagcacctgatggaggacagtgatggccagagcttcatccacaaccccagcctgactgtgacagtgcccatcgcccctggagagagtgacctggagaacatgaatgctgaggagctgagcagtgacagcgacagcgagtacagcaaggtgcggctgaacagaagcagcagcagcgagtgcagcacagtggacaaccccctgcctggagagggggaggaggccgaggccgagcccatgaacagtgatgagcctgaggcctgcttcacagatggctgtgtgtggaggttcagctgctgccaggtgaacatcgagagcggcaagggcaagatctggtggaacatcaggaagacctgctacaagatcgtggagcacagctggtttgagagcttcatcgtgctgatgatcctgctgagcagcggggccctggcctttgaggacatctacatcgagaggaagaagaccatcaagatcatcctggagtatgctgacaagatcttcacctacatcttcatcctggagatgctgctgaagtggatcgcctacggctacaagacctacttcaccaatgcctggtgctggctggacttcctgattgtggatgtgtccctggtgaccctggtggccaacaccctgggctacagcgacctgggccccatcaagagcctgcggaccctgcgggccctgcggcccctgcgggccctgagcagatttgagggcatgagggtggtggtgaatgccctgattggagccatccccagcatcatgaatgtgctgctggtgtgcctgatcttctggctgatcttcagcatcatgggcgtgaacctgtttgctgggaagttctatgagtgcatcaacaccacagatggcagccgcttccctgccagccaggtgcccaacagaagtgaatgttttgccctgatgaatgtgtcccagaatgtgcgctggaagaacctgaaggtgaactttgacaacgtgggcctgggctacctgagcctgctgcaggtggccaccttcaagggctggaccatcatcatgtatgctgctgtggacagcgtgaatgtggacaagcagcccaagtatgagtacagcctgtacatgtacatctactttgtggtgttcatcatcttcggcagcttcttcaccctgaacctcttcatcggggtcatcatcgacaacttcaaccagcagaagaagaagctgggcggccaggacatcttcatgacagaggagcagaagaagtactacaatgccatgaagaagctgggcagcaagaagccccagaagcccatcccccggcccggcaacaagatccagggctgcatctttgacctggtgaccaaccaggcctttgacatcagcatcatggtgctgatctgcctgaacatggtgaccatgatggtggagaaggagggccagagccagcacatgacagaggtgctgtactggatcaacgtggtgttcatcatcctcttcaccggagaatgtgtgctgaagctgatcagcctgcggcactactacttcaccgtgggctggaacatctttgattttgtggtggtgatcatcagcatcgtgggcatgttcctggccgacctgattgagacctactttgtgagccccaccctcttccgggtcatccggctggccagaattggccgcatcctgcggctggtgaagggggccaagggcatccgcaccctgctgtttgccctgatgatgagcctgcctgccctcttcaacatcggcctgctgctcttcctggtgatgttcatctatgccatcttcggcatgagcaactttgcctacgtgaagaaggaggatggcatcaatgacatgttcaactttgagaccttcggcaacagcatgatctgcctcttccagatcaccaccagcgctggctgggatggcctgctggcccccatcctgaacagcaagcccccagactgtgaccccaagaaggtgcaccctggcagctctgtggagggggactgtggcaaccccagcgtgggcatcttctactttgtgtcctacatcatcatctccttcctggtggtggtgaacatgtacatcgctgtgatcctggagaacttctctgtggccacagaggagagcacagagcccctgtctgaagatgactttgagatgttttatgaggtgtgggagaagtttgatcctgatgccacccagttcatcgagttcagcaagctgagtgactttgctgctgccctggacccccccctgctgattgccaagcccaacaaggtgcagctgattgccatggacctgcccatggtgtctggggaccgcatccactgcctggacatcctgtttgccttcaccaagagggtgctgggggagagcggggagatggacagcctgcggagccagatggaggagcgcttcatgtctgccaaccccagcaaggtgtcctatgagcccatcaccaccaccctgaagaggaagcaggaggatgtgtctgccaccgtcatccagagggcctaccgccgctaccgcctgcggcagaatgtgaagaacatcagcagcatctacatcaaggatggagacagagatgatgacctgctgaacaagaaggacatggcctttgacaacgtgaatgaaaacagcagccctgagaagacagatgccaccagcagcaccaccagccccccatcctatgacagcgtgaccaagccagacaaggagaagtatgagcaggacagaacagagaaggaggacaagggcaaggacagcaaggagagcaagaagtag

SEQ ID NO: 170105 - DNA, 5934 bp, synthetic construct
  misc_feature 1..5934: note = Description of Artificial Sequence: Synthetic coding sequence
  source 1..5934: mol_type = other DNA
atggccatgctgcccccacctggcccccagagctttgtgcacttcaccaagcagagcctggccctgattgagcagagaattgctgagaggaagagcaaggagcccaaggaggagaagaaggatgatgatgaggaggcccccaagcccagcagtgacctggaggccggcaagcagctgcccttcatctatggagacatccccccaggcatggtgtctgagcccctggaggacctggacccctactatgctgacaagaagaccttcatcgtgctgaacaagggcaagaccatcttccgcttcaatgccaccccagccctgtacatgctgagccccttcagccccctgcggcgcatcagcatcaagatcctggtgcacagcctcttctccatgctgatcatgtgcaccatcctgaccaactgcatcttcatgaccatgaacaaccccccagactggaccaagaatgtggagtacaccttcaccggcatctacacctttgagagcctggtgaagatcctggcccggggcttctgtgtgggggagttcaccttcctgcgggacccctggaactggctggactttgtggtgattgtgtttgcctacctgacagaatttgtgaacctgggcaatgtgtctgccctgcggaccttccgggtgctgcgggccctgaagaccatcagcgtcatccctggcctgaagaccatcgtgggcgccctgatccagagcgtgaagaagctgagtgatgtgatgatcctgaccgtcttctgcctgtctgtgtttgccctgattggcctgcagctgttcatgggcaacctgaagcacaagtgcttcaggaacagcctggagaacaatgagaccctggagagcatcatgaacaccctggagagcgaggaggacttcaggaagtacttctactacctggagggcagcaaggatgccctgctgtgtggcttcagcacagattctggccagtgcccagagggctacacctgtgtgaagattggaagaaatccagactatggctacaccagctttgacaccttctcctgggccttcctggccctcttccggctgatgacccaggactactgggagaacctgtaccagcagaccctgcgggccgccggcaagacctacatgatcttctttgtggtggtgatcttcctgggcagcttctacctgatcaacctgatcctggccgtggtggccatggcctatgaggagcagaaccaggccaacatcgaggaggccaagcagaaggagctggagttccagcagatgctggaccggctgaagaaggagcaggaggaggccgaggccatcgctgctgctgctgctgagtacaccagcatcagaagaagccgcatcatgggcctgtctgagagcagcagcgagaccagcaagctgagcagcaagagcgccaaggagaggaggaacagaaggaagaagaagaaccagaagaagctgagcagcggggaggagaagggagatgctgagaagctgagcaagtctgagagcgaggacagcatccggaggaagagcttccacctgggcgtggagggccaccggcgggcccacgagaagaggctgagcacccccaaccagagccccctgagcatccggggcagcctcttcagcgcccggcgcagcagcaggaccagcctcttctccttcaagggccggggccgggacatcggcagcgagacagaatttgctgatgatgagcacagcatctttggagacaatgaaagccggcggggcagcctgtttgtgccccaccggccccaggagaggaggagcagcaacatcagccaggccagccgcagcccccccatgctgcctgtgaatggcaagatgcacagcgctgtggactgcaatggagtggtgtccctggtggatggccgcagcgccctgatgctgcccaacggccagctgctgcctgagggcaccaccaaccagatccacaagaagaggcgctgcagcagctacctgctgtctgaggacatgctgaatgaccccaacctgcggcagagggccatgagccgggccagcatcctgaccaacacagtggaggagctggaggagagccggcagaagtgccccccctggtggtacagatttgcccacaagttcctgatctggaactgcagcccctactggatcaagttcaagaagtgcatctacttcatcgtgatggacccctttgtggacctggccatcaccatctgcatcgtgctgaacaccctcttcatggccatggagcaccaccccatgacagaggagttcaagaatgtgctggccatcggcaacctggtgttcaccggcatctttgctgctgagatggtgctgaagctgattgccatggacccctatgagtacttccaggtgggctggaacatctttgacagcctcatcgtgaccctgagcctggtggagctgttcctggctgatgtggagggcctgtctgtgctgcgctccttccggctgctgcgggtcttcaagctggccaagtcctggcccaccctgaacatgctgatcaagatcatcggcaacagcgtgggcgccctgggcaacctgaccctggtgctggccatcatcgtgttcatctttgctgtggtgggcatgcagctgtttgggaagagctacaaggaatgtgtgtgcaagatcaatgatgactgcaccctgccccgctggcacatgaatgacttcttccacagcttcctgattgtgttccgggtgctgtgtggggagtggattgagaccatgtgggactgcatggaggtggccggccaggccatgtgcctgattgtgtacatgatggtgatggtgattggcaacctggtggtgctgaacctcttcctggccctgctgctgagcagcttcagcagtgacaacctgacagccatcgaggaggaccctgatgccaacaacctgcagattgctgtgacccgcatcaagaagggcatcaactacgtgaagcagaccctgcgggagttcatcctgaaggccttcagcaagaagcccaagatcagccgggagatccggcaggccgaggacctgaacaccaagaaggagaactacatcagcaaccacaccctggccgagatgagcaagggccacaacttcctgaaggagaaggacaagatcagcggcttcggcagctctgtggacaagcacctgatggaggacagtgatggccagagcttcatccacaaccccagcctgactgtgacagtgcccatcgcccctggagagagtgacctggagaacatgaatgctgaggagctgagcagtgacagcgacagcgagtacagcaaggtgcggctgaacagaagcagcagcagtgaatgttccacagtggacaaccccctgcccggggagggggaggaggccgaggccgagcccatgaacagtgatgagcctgaggcctgcttcacagatggctgtgtgtggaggttcagctgctgccaggtgaacattgaaagtggcaagggcaagatctggtggaacatcaggaagacctgctacaagatcgtggagcacagctggtttgagagcttcatcgtgctgatgatcctgctgagcagcggggccctggcctttgaggacatctacattgaaaggaagaagaccatcaagatcatcctggagtatgctgacaagatcttcacctacatcttcatcctggagatgctgctgaagtggatcgcctacggctacaagacctacttcaccaatgcctggtgctggctggacttcctgattgtggatgtgtccctggtgaccctggtggccaacaccctgggctacagcgacctgggccccatcaagagcctgcggaccctgcgggccctgcggcccctgcgggccctgagcagatttgagggcatgagggtggtggtgaatgccctgattggagccatccccagcatcatgaatgtgctgctggtgtgcctgatcttctggctgatcttcagcatcatgggcgtgaacctgtttgctgggaagttctatgagtgcatcaacaccacagatggcagccgcttccctgccagccaggtgcccaacagaagtgagtgctttgccctgatgaatgtgtcccagaatgtgcgctggaagaacctgaaggtgaactttgacaacgtgggcctgggctacctgagcctgctgcaggtggccaccttcaagggctggaccatcatcatgtatgctgctgtggacagcgtgaatgtggacaagcagcccaagtatgagtacagcctgtacatgtacatctactttgtggtgttcatcatcttcggcagcttcttcaccctgaacctcttcatcggggtcatcatcgacaacttcaaccagcagaagaagaagctgggcggccaggacatcttcatgacagaggagcagaagaagtactacaatgccatgaagaagctgggcagcaagaagccccagaagcccatccccaggcctggcaacaagatccagggctgcatctttgacctggtgaccaaccaggcctttgacatcagcatcatggtgctgatctgcctgaacatggtgaccatgatggtggagaaggagggccagagccagcacatgacagaggtgctgtactggatcaacgtggtgttcatcatcctcttcaccggggagtgtgtgctgaagctgatcagcctgcggcactactacttcaccgtgggctggaacatctttgattttgtggtggtgatcatcagcatcgtgggcatgttcctggccgacctgattgagacctactttgtgagccccaccctcttccgggtcatccggctggcccgcatcggccgcatcctgcggctggtgaagggggccaagggcatccgcaccctgctgtttgccctgatgatgagcctgcctgccctcttcaacatcggcctgctgctcttcctggtgatgttcatctatgccatcttcggcatgagcaactttgcctacgtgaagaaggaggatggcatcaatgacatgttcaactttgagacctttggaaacagcatgatctgcctcttccagatcaccaccagcgctggctgggatggcctgctggcccccatcctgaacagcaagcccccagactgtgaccccaagaaggtgcaccctggcagctctgtggagggggactgtggcaaccccagcgtgggcatcttctactttgtgtcctacatcatcatctccttcctggtggtggtgaacatgtacatcgccgtcatcctggagaacttctctgtggccacagaggagagcacagagcccctgtctgaagatgactttgagatgttttatgaggtgtgggagaagtttgatcctgatgccacccagttcatcgagttcagcaagctgagtgactttgctgctgccctggacccccccctgctgattgccaagcccaacaaggtgcagctgattgccatggacctgcccatggtgtctggggaccgcatccactgcctggacatcctgtttgccttcaccaagagggtgctgggggagagcggggagatggacagcctgcggagccagatggaggagcgcttcatgtctgccaaccccagcaaggtgtcctatgagcccatcaccaccaccctgaagaggaagcaggaggatgtgtctgccaccgtcatccagagggcctaccgccgctaccgcctgcggcagaatgtgaagaacatcagcagcatctacatcaaggatggagacagagatgatgacctgctgaacaagaaggacatggcctttgacaacgtgaatgaaaacagcagccctgagaagacagatgccaccagcagcaccaccagcccccccagctatgattctgtgaccaagccagacaaggagaagtatgagcaggacagaacagagaaggaggacaagggcaaggacagcaaggagagcaagaagtag

SEQ ID NO: 170106 - DNA, 1620 bp, synthetic construct
  misc_feature 1..1620: note = Description of Artificial Sequence: Synthetic coding sequence
  source 1..1620: mol_type = other DNA
atcctgaccaactgcatcttcatgaccatgaacaaccccccagactggaccaagaatgtggagtacaccttcaccggcatctacacctttgagagcctggtgaagatcctggcccggggcttctgtgtgggggagttcaccttcctgcgggacccctggaactggctggactttgtggtgattgtgtttgcctacgtgacagaatttgtggacctgggcaatgtgtctgccctgcggaccttccgggtgctgcgggccctgaagaccatcagcgtcatccctggcctgaagaccatcgtgggcgccctgatccagagcgtgaagaagctgagtgatgtgatgatcctgactgtgttctgcctgtctgtgtttgccctgattggcctgcagctgttcatgggcaacctgaagcacaagtgcttcaggaacagcctggagaacaatgagaccctggagagcatcatgaacaccctggagagcgaggaggacttcaggaagtacttctactacctggagggcagcaaggatgccctgctgtgtggcttcagcacagacagcggccagtgcccagagggctacacctgtgtgaagattggaagaaatccagactatggctacaccagctttgacaccttctcctgggccttcctggccctcttccggctgatgacccaggactactgggagaacctgtaccagcagaccctgcgggctgctgggaagacctacatgatcttctttgtggtggtgatcttcctgggcagcttctacctgatcaacctgatcctggccgtggtggccatggcctatgaggagcagaaccaggccaacatcgaggaggccaagcagaaggagctggagttccagcagatgctggaccggctgaagaaggagcaggaggaggccgaggccatcgctgctgctgctgctgagtacaccagcatccgccgcagccgcatcatgggcctgtctgagagcagcagcgagaccagcaagctgagcagcaagagcgccaaggagaggaggaacagaaggaagaagaagaaccagaagaagctgagcagtggagaggagaagggagatgctgagaagctgagcaagtctgagagtgaagattccatccggaggaagagcttccacctgggcgtggagggccacagaagagcccacgagaagaggctgagcacccccaaccagagccccctgagcatccggggcagcctcttcagcgcccggcgcagcagcaggaccagcctcttctccttcaagggccggggccgggacatcggcagcgagacagaatttgctgatgatgagcacagcatctttggagacaatgaaagcagaagaggcagcctgtttgtgccccaccggccccaggagcggcgcagcagcaacatcagccaggccagccgcagcccccccatgctgcctgtgaatggcaagatgcacagcgctgtggactgcaatggagtggtgtccctggtggatggccgcagcgccctgatgctgcccaacggccagctgctgcctgaggtgatcatcgacaaggccaccagtgatgattctggcaccaccaaccagatccacaagaagaggcgctgcagcagctacctgtag

SEQ ID NO: 170107 - DNA, 198 bp, synthetic construct
  misc_feature 1..198: note = Description of Artificial Sequence: Synthetic coding sequence
  source 1..198: mol_type = other DNA
atggccaacttcctgctgccccggggcaccagcagcttccgccgcttcacccgggagagcctggccgccatcgagaagaggatggccgagaagcaggcccggggcagcaccaccctgcaggagagccgggagggcctgcctgaggaggaggccccccggccccagctggacctgcaggccagcaagaagctgccctag

SEQ ID NO: 170108 - DNA, 6051 bp, synthetic construct
  misc_feature 1..6051: note = Description of Artificial Sequence: Synthetic coding sequence
  source 1..6051: mol_type = other DNA
atggccaacttcctgctgccccggggcaccagcagcttccgccgcttcacccgggagagcctggccgccatcgagaagaggatggccgagaagcaggcccggggcagcaccaccctgcaggagagccgggagggcctgcctgaggaggaggccccccggccccagctggacctgcaggccagcaagaagctgcctgacctgtatggcaaccccccccaggagctgattggagagcccctggaggacctggaccccttctacagcacccagaagaccttcatcgtgctgaacaagggcaagaccatcttccgcttcagcgccaccaatgccctgtatgtgctgagccccttccaccccatcagaagagctgctgtgaagatcctggtgcacagcctcttcaacatgctgatcatgtgcaccatcctgaccaactgtgtgttcatggcccagcacgaccccccaccctggaccaagtatgtggagtacaccttcaccgccatctacacctttgagagcctggtgaagatcctggcccggggcttctgcctgcacgccttcaccttcctgcgggacccctggaactggctggacttcagcgtcatcatcatggcctacaccacagaatttgtggacctgggcaatgtgtctgccctgcggaccttccgggtgctgcgggccctgaagaccatcagcgtcatcagcggcctgaagaccatcgtgggcgccctgatccagagcgtgaagaagctggctgatgtgatggtgctgactgtgttctgcctgtctgtgtttgccctgattggcctgcagctgttcatgggcaacctgcggcacaagtgtgtgaggaacttcaccgccctgaatggcaccaatggatctgtggaggctgatggcctggtgtgggagagcctggacctgtacctgagtgaccctgagaactacctgctgaagaatggcaccagtgatgtgctgctgtgtggcaacagcagtgatgctggcacctgcccagagggctaccgctgcctgaaggccggggagaacccagaccacggctacaccagctttgacagctttgcctgggccttcctggccctcttccggctgatgacccaggactgctgggagcggctgtaccagcagaccctgcggtctgctgggaagatctacatgatcttcttcatgctggtgatcttcctgggcagcttctacctggtgaacctgatcctggccgtggtggccatggcctatgaggagcagaaccaggccaccatcgccgagacagaggagaaggagaagcgcttccaggaggccatggagatgctgaagaaggagcacgaggccctgaccatccggggcgtggacacagtgagccgcagcagcctggagatgagccccctggcccctgtgaacagccatgagcggcgcagcaagaggaggaagaggatgagcagcggcacagaggagtgtggagaagatcggctgcccaagagtgacagtgaagatggcccccgggccatgaaccacctgagcctgacccggggcctgagcaggacctccatgaagcccaggagcagccggggcagcatcttcaccttcagaagaagagacctgggcagcgaggccgactttgctgatgatgagaacagcacagctggggagagcgagagccaccacaccagcctgctggtgccctggcccctgcggaggaccagcgcccagggccagcccagccctggcaccagcgcccctggccacgccctgcacggcaagaagaacagcacagtggactgcaatggagtggtgtccctgctgggcgctggggaccctgaggccaccagccctggcagccacctgctgcggcctgtgatgctggagcaccccccagacaccaccacccccagcgaggagcccggcggcccccagatgctgaccagccaggccccctgtgtggatggctttgaggagcccggggcccggcagagggccctgtctgctgtgtctgtgctgaccagcgccctggaggagctggaggagagccgccacaagtgccccccctgctggaaccggctggcccagcgctacctgatctgggagtgctgccccctgtggatgagcatcaagcagggcgtgaagctggtggtgatggaccccttcacagacctgaccatcaccatgtgcatcgtgctgaacaccctcttcatggccctggagcactacaacatgaccagcgagtttgaggagatgctgcaggtgggcaacctggtgttcaccggcatcttcaccgctgagatgaccttcaagatcatcgccctggacccctactactacttccagcagggctggaacatctttgacagcatcatcgtcatcctgagcctgatggagctgggcctgagcaggatgagcaacctgtctgtgctgcgctccttccggctgctgcgggtcttcaagctggccaagtcctggcccaccctgaacaccctcatcaagatcatcggcaacagcgtgggcgccctgggcaacctgaccctggtgctggccatcatcgtgttcatctttgctgtggtgggcatgcagctgtttgggaagaactacagcgagctgcgggacagcgacagcggcctgctgccccgctggcacatgatggacttcttccacgccttcctgatcatcttccgcatcctgtgtggggagtggattgagaccatgtgggactgcatggaggtgtctggccagagcctgtgcctgctggtgttcctgctggtgatggtgattggcaacctggtggtgctgaacctcttcctggccctgctgctgagcagcttctctgctgacaacctgacagccccagatgaggaccgggagatgaacaacctgcagctggccctggcccgcatccagaggggcctgcgctttgtgaagaggaccacctgggacttctgctgcggcctgctgcggcagaggccccagaagccagctgccctggccgcccagggccagctgcccagctgcatcgccaccccctacagccccccacctcctgagacagagaaggtgccccccaccaggaaggagaccaggtttgaggagggggagcagcccggccagggcacccctggggaccctgagcctgtgtgtgtgcccatcgctgtggccgagagtgacacagatgaccaggaggaggatgaggagaacagcctgggcacagaggaggagagcagcaagcagcaggagagccagcctgtgtctgggggccctgaggcccccccagacagcaggacctggagccaggtgtctgccacagccagcagcgaggccgaggccagcgccagccaggccgactggaggcagcagtggaaggccgagccccaggcccctggctgtggggagaccccagaggacagctgcagcgagggcagcacagctgacatgaccaacacagctgagctgctggagcagatcccagacctgggccaggatgtgaaggaccctgaggactgcttcacagagggctgtgtgcggcgctgcccctgctgtgctgtggacaccacccaggcccctgggaaggtgtggtggaggctgaggaagacctgctaccacatcgtggagcacagctggtttgagaccttcatcatcttcatgatcctgctgagcagcggggccctggcctttgaggacatctacctggaggagaggaagaccatcaaggtgctgctggagtatgctgacaagatgttcacctacgtgtttgtgctggagatgctgctgaagtgggtggcctacggcttcaagaagtacttcaccaatgcctggtgctggctggacttcctgattgtggatgtgtccctggtgtccctggtggccaacaccctgggctttgctgagatgggccccatcaagagcctgcggaccctgcgggccctgcggcccctgcgggccctgagcagatttgagggcatgagggtggtggtgaatgccctggtgggcgccatccccagcatcatgaatgtgctgctggtgtgcctgatcttctggctgatcttcagcatcatgggcgtgaacctgtttgctgggaagtttggccgctgcatcaaccagacagaaggagacctgcccctgaactacaccatcgtgaacaacaagagccagtgtgagagcctgaacctgaccggggagctgtactggaccaaggtgaaggtgaactttgacaacgtgggcgccggctacctggccctgctgcaggtggccaccttcaagggctggatggacatcatgtatgctgctgtggacagccggggctatgaggagcagccccagtgggagtacaacctgtacatgtacatctacttcgtcatcttcatcatcttcggcagcttcttcaccctgaacctcttcatcggggtcatcatcgacaacttcaaccagcagaagaagaagctgggcggccaggacatcttcatgacagaggagcagaagaagtactacaatgccatgaagaagctgggcagcaagaagccccagaagcccatcccccggcccctgaacaagtaccagggcttcatctttgacatcgtgaccaagcaggcctttgatgtgaccatcatgttcctgatctgcctgaacatggtgaccatgatggtggagacagatgaccagagccctgagaagatcaacatcctggccaagatcaacctgctgtttgtggccatcttcaccggggagtgcatcgtgaagctggccgccctgcggcactactacttcaccaacagctggaacatctttgattttgtggtggtgatcctgagcatcgtgggcaccgtgctgagtgacatcatccagaagtacttcttcagccccaccctcttccgggtcatccggctggcccgcatcggccgcatcctgcggctcatccggggggccaagggcatccgcaccctgctgtttgccctgatgatgagcctgcctgccctcttcaacatcggcctgctgctcttcctggtgatgttcatctacagcatcttcggcatggccaactttgcctacgtgaagtgggaggccggcattgatgacatgttcaacttccagacctttgccaacagcatgctgtgcctcttccagatcaccaccagcgctggctgggatggcctgctgagccccatcctgaacacaggccccccctactgtgaccccaccctgcccaacagcaatggcagcagaggagactgtggcagccctgctgtgggcatcctcttcttcaccacctacatcatcatctccttcctgattgtggtgaacatgtacatcgccatcatcctggagaacttctctgtggccacagaggagagcacagagcccctgtctgaagatgactttgacatgttttatgagatctgggagaagtttgatcctgaggccacccagttcatcgagtacagcgtgctgagtgactttgctgatgccctgtctgagcccctgagaattgccaagcccaaccagatcagcctcatcaacatggacctgcccatggtgtctggggaccgcatccactgcatggacatcctgtttgccttcaccaagagggtgctgggggagagcggggagatggatgccctgaagatccagatggaggagaagttcatggccgccaaccccagcaagatctcctatgagcccatcaccaccaccctgcggaggaagcatgaggaggtgtctgccatggtgatccagagggccttcagaagacacctgctgcagaggagcctgaagcacgccagcttcctgttccggcagcaggccggcagcggcctgtctgaagaagatgcccctgagcgggagggcctcatcgcctacgtgatgtctgagaacttcagccggcccctgggcccccccagcagcagcagcatcagcagcaccagcttcccccccagctatgattctgtgacccgggccaccagtgacaacctgcaggtgcggggcagtgactacagccacagcgaggacctggccgacttcccccccagcccagaccgggaccgggagagcatcgtgtag

SEQ ID NO: 170109 - DNA, 342 bp, synthetic construct
  misc_feature 1..342: note = Description of Artificial Sequence: Synthetic coding sequence
  source 1..342: mol_type = other DNA
atggcccagcacgaccccccaccctggaccaagtatgtggagtatgtgtctgagaacatcaagctgggcaacctgagcgccctgcggaccttccgggtgctgcgggccctgaagaccatcagcgtcatccctggcctgaagaccatcgtgggcgccctgatccagagcgtgaagaagctggctgatgtgatggtgctgactgtgttctgcctgtctgtgtttgccctgattggcctgcagctgttcatgggcaacctgcggcacaagtgtgtgaggaacttcaccgccctgaatggcaccaatggatctgtggaggctgatggcctggtgtgggagagctag

SEQ ID NO: 170110 - DNA, 6051 bp, synthetic construct
  misc_feature 1..6051: note = Description of Artificial Sequence: Synthetic coding sequence
  source 1..6051: mol_type = other DNA
atggccaacttcctgctgccccggggcaccagcagcttccgccgcttcacccgggagagcctggccgccatcgagaagaggatggccgagaagcaggcccggggcagcaccaccctgcaggagagccgggagggcctgcctgaggaggaggccccccggccccagctggacctgcaggccagcaagaagctgcctgacctgtatggcaaccccccccaggagctgattggagagcccctggaggacctggaccccttctacagcacccagaagaccttcatcgtgctgaacaagggcaagaccatcttccgcttcagcgccaccaatgccctgtatgtgctgagccccttccaccccatcagaagagctgctgtgaagatcctggtgcacagcctcttcaacatgctgatcatgtgcaccatcctgaccaactgtgtgttcatggcccagcacgaccccccaccctggaccaagtatgtggagtacaccttcaccgccatctacacctttgagagcctggtgaagatcctggcccggggcttctgcctgcacgccttcaccttcctgcgggacccctggaactggctggacttcagcgtcatcatcatggcctacgtgtctgagaacatcaagctgggcaacctgagcgccctgcggaccttccgggtgctgcgggccctgaagaccatcagcgtcatccctggcctgaagaccatcgtgggcgccctgatccagagcgtgaagaagctggctgatgtgatggtgctgactgtgttctgcctgtctgtgtttgccctgattggcctgcagctgttcatgggcaacctgcggcacaagtgtgtgaggaacttcaccgccctgaatggcaccaatggatctgtggaggctgatggcctggtgtgggagagcctggacctgtacctgagtgaccctgagaactacctgctgaagaatggcaccagtgatgtgctgctgtgtggcaacagcagtgatgctggcacctgcccagagggctaccgctgcctgaaggccggggagaacccagaccacggctacaccagctttgacagctttgcctgggccttcctggccctcttccggctgatgacccaggactgctgggagcggctgtaccagcagaccctgcggtctgctgggaagatctacatgatcttcttcatgctggtgatcttcctgggcagcttctacctggtgaacctgatcctggccgtggtggccatggcctatgaggagcagaaccaggccaccatcgccgagacagaggagaaggagaagcgcttccaggaggccatggagatgctgaagaaggagcacgaggccctgaccatccggggcgtggacacagtgagccgcagcagcctggagatgagccccctggcccctgtgaacagccatgagcggcgcagcaagaggaggaagaggatgagcagcggcacagaggagtgtggagaagatcggctgcccaagagtgacagtgaagatggcccccgggccatgaaccacctgagcctgacccggggcctgagcaggacctccatgaagcccaggagcagccggggcagcatcttcaccttcagaagaagagacctgggcagcgaggccgactttgctgatgatgagaacagcacagctggggagagcgagagccaccacaccagcctgctggtgccctggcccctgcggaggaccagcgcccagggccagcccagccctggcaccagcgcccctggccacgccctgcacggcaagaagaacagcacagtggactgcaatggagtggtgtccctgctgggcgctggggaccctgaggccaccagccctggcagccacctgctgcggcctgtgatgctggagcaccccccagacaccaccacccccagcgaggagcccggcggcccccagatgctgaccagccaggccccctgtgtggatggctttgaggagcccggggcccggcagagggccctgtctgctgtgtctgtgctgaccagcgccctggaggagctggaggagagccgccacaagtgccccccctgctggaaccggctggcccagcgctacctgatctgggagtgctgccccctgtggatgagcatcaagcagggcgtgaagctggtggtgatggaccccttcacagacctgaccatcaccatgtgcatcgtgctgaacaccctcttcatggccctggagcactacaacatgaccagcgagtttgaggagatgctgcaggtgggcaacctggtgttcaccggcatcttcaccgctgagatgaccttcaagatcatcgccctggacccctactactacttccagcagggctggaacatctttgacagcatcatcgtcatcctgagcctgatggagctgggcctgagcaggatgagcaacctgtctgtgctgcgctccttccggctgctgcgggtcttcaagctggccaagtcctggcccaccctgaacaccctcatcaagatcatcggcaacagcgtgggcgccctgggcaacctgaccctggtgctggccatcatcgtgttcatctttgctgtggtgggcatgcagctgtttgggaagaactacagcgagctgcgggacagcgacagcggcctgctgccccgctggcacatgatggacttcttccacgccttcctgatcatcttccgcatcctgtgtggggagtggattgagaccatgtgggactgcatggaggtgtctggccagagcctgtgcctgctggtgttcctgctggtgatggtgattggcaacctggtggtgctgaacctcttcctggccctgctgctgagcagcttctctgctgacaacctgacagccccagatgaggaccgggagatgaacaacctgcagctggccctggcccgcatccagaggggcctgcgctttgtgaagaggaccacctgggacttctgctgcggcctgctgcggcagaggccccagaagccagctgccctggccgcccagggccagctgcccagctgcatcgccaccccctacagccccccacctcctgagacagagaaggtgccccccaccaggaaggagaccaggtttgaggagggggagcagcccggccagggcacccctggggaccctgagcctgtgtgtgtgcccatcgctgtggccgagagtgacacagatgaccaggaggaggatgaggagaacagcctgggcacagaggaggagagcagcaagcagcaggagagccagcctgtgtctgggggccctgaggcccccccagacagcaggacctggagccaggtgtctgccacagccagcagcgaggccgaggccagcgccagccaggccgactggaggcagcagtggaaggccgagccccaggcccctggctgtggggagaccccagaggacagctgcagcgagggcagcacagctgacatgaccaacacagctgagctgctggagcagatcccagacctgggccaggatgtgaaggaccctgaggactgcttcacagagggctgtgtgcggcgctgcccctgctgtgctgtggacaccacccaggcccctgggaaggtgtggtggaggctgaggaagacctgctaccacatcgtggagcacagctggtttgagaccttcatcatcttcatgatcctgctgagcagcggggccctggcctttgaggacatctacctggaggagaggaagaccatcaaggtgctgctggagtatgctgacaagatgttcacctacgtgtttgtgctggagatgctgctgaagtgggtggcctacggcttcaagaagtacttcaccaatgcctggtgctggctggacttcctgattgtggatgtgtccctggtgtccctggtggccaacaccctgggctttgctgagatgggccccatcaagagcctgcggaccctgcgggccctgcggcccctgcgggccctgagcagatttgagggcatgagggtggtggtgaatgccctggtgggcgccatccccagcatcatgaatgtgctgctggtgtgcctgatcttctggctgatcttcagcatcatgggcgtgaacctgtttgctgggaagtttggccgctgcatcaaccagacagaaggagacctgcccctgaactacaccatcgtgaacaacaagagccagtgtgagagcctgaacctgaccggggagctgtactggaccaaggtgaaggtgaactttgacaacgtgggcgccggctacctggccctgctgcaggtggccaccttcaagggctggatggacatcatgtatgctgctgtggacagccggggctatgaggagcagccccagtgggagtacaacctgtacatgtacatctacttcgtcatcttcatcatcttcggcagcttcttcaccctgaacctcttcatcggggtcatcatcgacaacttcaaccagcagaagaagaagctgggcggccaggacatcttcatgacagaggagcagaagaagtactacaatgccatgaagaagctgggcagcaagaagccccagaagcccatcccccggcccctgaacaagtaccagggcttcatctttgacatcgtgaccaagcaggcctttgatgtgaccatcatgttcctgatctgcctgaacatggtgaccatgatggtggagacagatgaccagagccctgagaagatcaacatcctggccaagatcaacctgctgtttgtggccatcttcaccggggagtgcatcgtgaagctggccgccctgcggcactactacttcaccaacagctggaacatctttgattttgtggtggtgatcctgagcatcgtgggcaccgtgctgagtgacatcatccagaagtacttcttcagccccaccctcttccgggtcatccggctggcccgcatcggccgcatcctgcggctcatccggggggccaagggcatccgcaccctgctgtttgccctgatgatgagcctgcctgccctcttcaacatcggcctgctgctcttcctggtgatgttcatctacagcatcttcggcatggccaactttgcctacgtgaagtgggaggccggcattgatgacatgttcaacttccagacctttgccaacagcatgctgtgcctcttccagatcaccaccagcgctggctgggatggcctgctgagccccatcctgaacacaggccccccctactgtgaccccaccctgcccaacagcaatggcagcagaggagactgtggcagccctgctgtgggcatcctcttcttcaccacctacatcatcatctccttcctgattgtggtgaacatgtacatcgccatcatcctggagaacttctctgtggccacagaggagagcacagagcccctgtctgaagatgactttgacatgttttatgagatctgggagaagtttgatcctgaggccacccagttcatcgagtacagcgtgctgagtgactttgctgatgccctgtctgagcccctgagaattgccaagcccaaccagatcagcctcatcaacatggacctgcccatggtgtctggggaccgcatccactgcatggacatcctgtttgccttcaccaagagggtgctgggggagagcggggagatggatgccctgaagatccagatggaggagaagttcatggccgccaaccccagcaagatctcctatgagcccatcaccaccaccctgcggaggaagcatgaggaggtgtctgccatggtgatccagagggccttcagaagacacctgctgcagaggagcctgaagcacgccagcttcctgttccggcagcaggccggcagcggcctgtctgaagaagatgcccctgagcgggagggcctcatcgcctacgtgatgtctgagaacttcagccggcccctgggcccccccagcagcagcagcatcagcagcaccagcttcccccccagctatgattctgtgacccgggccaccagtgacaacctgcaggtgcggggcagtgactacagccacagcgaggacctggccgacttcccccccagcccagaccgggaccgggagagcatcgtgtag

SEQ ID NO: 170111 - DNA, 5997 bp, synthetic construct
  misc_feature 1..5997: note = Description of Artificial Sequence: Synthetic coding sequence
  source 1..5997: mol_type = other DNA
atggccaacttcctgctgccccggggcaccagcagcttccgccgcttcacccgggagagcctggccgccatcgagaagaggatggccgagaagcaggcccggggcagcaccaccctgcaggagagccgggagggcctgcctgaggaggaggccccccggccccagctggacctgcaggccagcaagaagctgcctgacctgtatggcaaccccccccaggagctgattggagagcccctggaggacctggaccccttctacagcacccagaagaccttcatcgtgctgaacaagggcaagaccatcttccgcttcagcgccaccaatgccctgtatgtgctgagccccttccaccccatcagaagagctgctgtgaagatcctggtgcacagcctcttcaacatgctgatcatgtgcaccatcctgaccaactgtgtgttcatggcccagcacgaccccccaccctggaccaagtatgtggagtacaccttcaccgccatctacacctttgagagcctggtgaagatcctggcccggggcttctgcctgcacgccttcaccttcctgcgggacccctggaactggctggacttcagcgtcatcatcatggcctacgtgtctgagaacatcaagctgggcaacctgagcgccctgcggaccttccgggtgctgcgggccctgaagaccatcagcgtcatccctggcctgaagaccatcgtgggcgccctgatccagagcgtgaagaagctggctgatgtgatggtgctgactgtgttctgcctgtctgtgtttgccctgattggcctgcagctgttcatgggcaacctgcggcacaagtgtgtgaggaacttcaccgccctgaatggcaccaatggatctgtggaggctgatggcctggtgtgggagagcctggacctgtacctgagtgaccctgagaactacctgctgaagaatggcaccagtgatgtgctgctgtgtggcaacagcagtgatgctggcacctgcccagagggctaccgctgcctgaaggccggggagaacccagaccacggctacaccagctttgacagctttgcctgggccttcctggccctcttccggctgatgacccaggactgctgggagcggctgtaccagcagaccctgcggtctgctgggaagatctacatgatcttcttcatgctggtgatcttcctgggcagcttctacctggtgaacctgatcctggccgtggtggccatggcctatgaggagcagaaccaggccaccatcgccgagacagaggagaaggagaagcgcttccaggaggccatggagatgctgaagaaggagcacgaggccctgaccatccggggcgtggacacagtgagccgcagcagcctggagatgagccccctggcccctgtgaacagccatgagcggcgcagcaagaggaggaagaggatgagcagcggcacagaggagtgtggagaagatcggctgcccaagagtgacagtgaagatggcccccgggccatgaaccacctgagcctgacccggggcctgagcaggacctccatgaagcccaggagcagccggggcagcatcttcaccttcagaagaagagacctgggcagcgaggccgactttgctgatgatgagaacagcacagctggggagagcgagagccaccacaccagcctgctggtgccctggcccctgcggaggaccagcgcccagggccagcccagccctggcaccagcgcccctggccacgccctgcacggcaagaagaacagcacagtggactgcaatggagtggtgtccctgctgggcgctggggaccctgaggccaccagccctggcagccacctgctgcggcctgtgatgctggagcaccccccagacaccaccacccccagcgaggagcccggcggcccccagatgctgaccagccaggccccctgtgtggatggctttgaggagcccggggcccggcagagggccctgtctgctgtgtctgtgctgaccagcgccctggaggagctggaggagagccgccacaagtgccccccctgctggaaccggctggcccagcgctacctgatctgggagtgctgccccctgtggatgagcatcaagcagggcgtgaagctggtggtgatggaccccttcacagacctgaccatcaccatgtgcatcgtgctgaacaccctcttcatggccctggagcactacaacatgaccagcgagtttgaggagatgctgcaggtgggcaacctggtgttcaccggcatcttcaccgctgagatgaccttcaagatcatcgccctggacccctactactacttccagcagggctggaacatctttgacagcatcatcgtcatcctgagcctgatggagctgggcctgagcaggatgagcaacctgtctgtgctgcgctccttccggctgctgcgggtcttcaagctggccaagtcctggcccaccctgaacaccctcatcaagatcatcggcaacagcgtgggcgccctgggcaacctgaccctggtgctggccatcatcgtgttcatctttgctgtggtgggcatgcagctgtttgggaagaactacagcgagctgcgggacagcgacagcggcctgctgccccgctggcacatgatggacttcttccacgccttcctgatcatcttccgcatcctgtgtggggagtggattgagaccatgtgggactgcatggaggtgtctggccagagcctgtgcctgctggtgttcctgctggtgatggtgattggcaacctggtggtgctgaacctcttcctggccctgctgctgagcagcttctctgctgacaacctgacagccccagatgaggaccgggagatgaacaacctgcagctggccctggcccgcatccagaggggcctgcgctttgtgaagaggaccacctgggacttctgctgcggcctgctgcggcagaggccccagaagccagctgccctggccgcccagggccagctgcccagctgcatcgccaccccctacagccccccacctcctgagacagagaaggtgccccccaccaggaaggagaccaggtttgaggagggggagcagcccggccagggcacccctggggaccctgagcctgtgtgtgtgcccatcgctgtggccgagagtgacacagatgaccaggaggaggatgaggagaacagcctgggcacagaggaggagagcagcaagcagcaggagagccagcctgtgtctgggggccctgaggcccccccagacagcaggacctggagccaggtgtctgccacagccagcagcgaggccgaggccagcgccagccaggccgactggaggcagcagtggaaggccgagccccaggcccctggctgtggggagaccccagaggacagctgcagcgagggcagcacagctgacatgaccaacacagctgagctgctggagcagatcccagacctgggccaggatgtgaaggaccctgaggactgcttcacagagggctgtgtgcggcgctgcccctgctgtgctgtggacaccacccaggcccctgggaaggtgtggtggaggctgaggaagacctgctaccacatcgtggagcacagctggtttgagaccttcatcatcttcatgatcctgctgagcagcggggccctggcctttgaggacatctacctggaggagaggaagaccatcaaggtgctgctggagtatgctgacaagatgttcacctacgtgtttgtgctggagatgctgctgaagtgggtggcctacggcttcaagaagtacttcaccaatgcctggtgctggctggacttcctgattgtggatgtgtccctggtgtccctggtggccaacaccctgggctttgctgagatgggccccatcaagagcctgcggaccctgcgggccctgcggcccctgcgggccctgagcagatttgagggcatgagggtggtggtgaatgccctggtgggcgccatccccagcatcatgaatgtgctgctggtgtgcctgatcttctggctgatcttcagcatcatgggcgtgaacctgtttgctgggaagtttggccgctgcatcaaccagacagaaggagacctgcccctgaactacaccatcgtgaacaacaagagccagtgtgagagcctgaacctgaccggggagctgtactggaccaaggtgaaggtgaactttgacaacgtgggcgccggctacctggccctgctgcaggtgtatgaggagcagccccagtgggagtacaacctgtacatgtacatctacttcgtcatcttcatcatcttcggcagcttcttcaccctgaacctcttcatcggggtcatcatcgacaacttcaaccagcagaagaagaagctgggcggccaggacatcttcatgacagaggagcagaagaagtactacaatgccatgaagaagctgggcagcaagaagccccagaagcccatcccccggcccctgaacaagtaccagggcttcatctttgacatcgtgaccaagcaggcctttgatgtgaccatcatgttcctgatctgcctgaacatggtgaccatgatggtggagacagatgaccagagccctgagaagatcaacatcctggccaagatcaacctgctgtttgtggccatcttcaccggggagtgcatcgtgaagctggccgccctgcggcactactacttcaccaacagctggaacatctttgattttgtggtggtgatcctgagcatcgtgggcaccgtgctgagtgacatcatccagaagtacttcttcagccccaccctcttccgggtcatccggctggcccgcatcggccgcatcctgcggctcatccggggggccaagggcatccgcaccctgctgtttgccctgatgatgagcctgcctgccctcttcaacatcggcctgctgctcttcctggtgatgttcatctacagcatcttcggcatggccaactttgcctacgtgaagtgggaggccggcattgatgacatgttcaacttccagacctttgccaacagcatgctgtgcctcttccagatcaccaccagcgctggctgggatggcctgctgagccccatcctgaacacaggccccccctactgtgaccccaccctgcccaacagcaatggcagcagaggagactgtggcagccctgctgtgggcatcctcttcttcaccacctacatcatcatctccttcctgattgtggtgaacatgtacatcgccatcatcctggagaacttctctgtggccacagaggagagcacagagcccctgtctgaagatgactttgacatgttttatgagatctgggagaagtttgatcctgaggccacccagttcatcgagtacagcgtgctgagtgactttgctgatgccctgtctgagcccctgagaattgccaagcccaaccagatcagcctcatcaacatggacctgcccatggtgtctggggaccgcatccactgcatggacatcctgtttgccttcaccaagagggtgctgggggagagcggggagatggatgccctgaagatccagatggaggagaagttcatggccgccaaccccagcaagatctcctatgagcccatcaccaccaccctgcggaggaagcatgaggaggtgtctgccatggtgatccagagggccttcagaagacacctgctgcagaggagcctgaagcacgccagcttcctgttccggcagcaggccggcagcggcctgtctgaagaagatgcccctgagcgggagggcctcatcgcctacgtgatgtctgagaacttcagccggcccctgggcccccccagcagcagcagcatcagcagcaccagcttcccccccagctatgattctgtgacccgggccaccagtgacaacctgcaggtgcggggcagtgactacagccacagcgaggacctggccgacttcccccccagcccagaccgggaccgggagagcatcgtgtag

SEQ ID NO: 170112 - DNA, 6048 bp, synthetic construct
  misc_feature 1..6048: note = Description of Artificial Sequence: Synthetic coding sequence
  source 1..6048: mol_type = other DNA
atggccaacttcctgctgccccggggcaccagcagcttccgccgcttcacccgggagagcctggccgccatcgagaagaggatggccgagaagcaggcccggggcagcaccaccctgcaggagagccgggagggcctgcctgaggaggaggccccccggccccagctggacctgcaggccagcaagaagctgcctgacctgtatggcaaccccccccaggagctgattggagagcccctggaggacctggaccccttctacagcacccagaagaccttcatcgtgctgaacaagggcaagaccatcttccgcttcagcgccaccaatgccctgtatgtgctgagccccttccaccccatcagaagagctgctgtgaagatcctggtgcacagcctcttcaacatgctgatcatgtgcaccatcctgaccaactgtgtgttcatggcccagcacgaccccccaccctggaccaagtatgtggagtacaccttcaccgccatctacacctttgagagcctggtgaagatcctggcccggggcttctgcctgcacgccttcaccttcctgcgggacccctggaactggctggacttcagcgtcatcatcatggcctacaccacagaatttgtggacctgggcaatgtgtctgccctgcggaccttccgggtgctgcgggccctgaagaccatcagcgtcatcagcggcctgaagaccatcgtgggcgccctgatccagagcgtgaagaagctggctgatgtgatggtgctgactgtgttctgcctgtctgtgtttgccctgattggcctgcagctgttcatgggcaacctgcggcacaagtgtgtgaggaacttcaccgccctgaatggcaccaatggatctgtggaggctgatggcctggtgtgggagagcctggacctgtacctgagtgaccctgagaactacctgctgaagaatggcaccagtgatgtgctgctgtgtggcaacagcagtgatgctggcacctgcccagagggctaccgctgcctgaaggccggggagaacccagaccacggctacaccagctttgacagctttgcctgggccttcctggccctcttccggctgatgacccaggactgctgggagcggctgtaccagcagaccctgcggtctgctgggaagatctacatgatcttcttcatgctggtgatcttcctgggcagcttctacctggtgaacctgatcctggccgtggtggccatggcctatgaggagcagaaccaggccaccatcgccgagacagaggagaaggagaagcgcttccaggaggccatggagatgctgaagaaggagcacgaggccctgaccatccggggcgtggacacagtgagccgcagcagcctggagatgagccccctggcccctgtgaacagccatgagcggcgcagcaagaggaggaagaggatgagcagcggcacagaggagtgtggagaagatcggctgcccaagagtgacagtgaagatggcccccgggccatgaaccacctgagcctgacccggggcctgagcaggacctccatgaagcccaggagcagccggggcagcatcttcaccttcagaagaagagacctgggcagcgaggccgactttgctgatgatgagaacagcacagctggggagagcgagagccaccacaccagcctgctggtgccctggcccctgcggaggaccagcgcccagggccagcccagccctggcaccagcgcccctggccacgccctgcacggcaagaagaacagcacagtggactgcaatggagtggtgtccctgctgggcgctggggaccctgaggccaccagccctggcagccacctgctgcggcctgtgatgctggagcaccccccagacaccaccacccccagcgaggagcccggcggcccccagatgctgaccagccaggccccctgtgtggatggctttgaggagcccggggcccggcagagggccctgtctgctgtgtctgtgctgaccagcgccctggaggagctggaggagagccgccacaagtgccccccctgctggaaccggctggcccagcgctacctgatctgggagtgctgccccctgtggatgagcatcaagcagggcgtgaagctggtggtgatggaccccttcacagacctgaccatcaccatgtgcatcgtgctgaacaccctcttcatggccctggagcactacaacatgaccagcgagtttgaggagatgctgcaggtgggcaacctggtgttcaccggcatcttcaccgctgagatgaccttcaagatcatcgccctggacccctactactacttccagcagggctggaacatctttgacagcatcatcgtcatcctgagcctgatggagctgggcctgagcaggatgagcaacctgtctgtgctgcgctccttccggctgctgcgggtcttcaagctggccaagtcctggcccaccctgaacaccctcatcaagatcatcggcaacagcgtgggcgccctgggcaacctgaccctggtgctggccatcatcgtgttcatctttgctgtggtgggcatgcagctgtttgggaagaactacagcgagctgcgggacagcgacagcggcctgctgccccgctggcacatgatggacttcttccacgccttcctgatcatcttccgcatcctgtgtggggagtggattgagaccatgtgggactgcatggaggtgtctggccagagcctgtgcctgctggtgttcctgctggtgatggtgattggcaacctggtggtgctgaacctcttcctggccctgctgctgagcagcttctctgctgacaacctgacagccccagatgaggaccgggagatgaacaacctgcagctggccctggcccgcatccagaggggcctgcgctttgtgaagaggaccacctgggacttctgctgcggcctgctgcggcagaggccccagaagccagctgccctggccgcccagggccagctgcccagctgcatcgccaccccctacagccccccacctcctgagacagagaaggtgccccccaccaggaaggagaccaggtttgaggagggggagcagcccggccagggcacccctggggaccctgagcctgtgtgtgtgcccatcgctgtggccgagagtgacacagatgaccaggaggaggatgaggagaacagcctgggcacagaggaggagagcagcaagcaggagagccagcctgtgtctgggggccctgaggcccccccagacagcaggacctggagccaggtgtctgccacagccagcagcgaggccgaggccagcgccagccaggccgactggaggcagcagtggaaggccgagccccaggcccctggctgtggggagaccccagaggacagctgcagcgagggcagcacagctgacatgaccaacacagctgagctgctggagcagatcccagacctgggccaggatgtgaaggaccctgaggactgcttcacagagggctgtgtgcggcgctgcccctgctgtgctgtggacaccacccaggcccctgggaaggtgtggtggaggctgaggaagacctgctaccacatcgtggagcacagctggtttgagaccttcatcatcttcatgatcctgctgagcagcggggccctggcctttgaggacatctacctggaggagaggaagaccatcaaggtgctgctggagtatgctgacaagatgttcacctacgtgtttgtgctggagatgctgctgaagtgggtggcctacggcttcaagaagtacttcaccaatgcctggtgctggctggacttcctgattgtggatgtgtccctggtgtccctggtggccaacaccctgggctttgctgagatgggccccatcaagagcctgcggaccctgcgggccctgcggcccctgcgggccctgagcagatttgagggcatgagggtggtggtgaatgccctggtgggcgccatccccagcatcatgaatgtgctgctggtgtgcctgatcttctggctgatcttcagcatcatgggcgtgaacctgtttgctgggaagtttggccgctgcatcaaccagacagaaggagacctgcccctgaactacaccatcgtgaacaacaagagccagtgtgagagcctgaacctgactggagagctgtactggaccaaggtgaaggtgaactttgacaacgtgggcgccggctacctggccctgctgcaggtggccaccttcaagggctggatggacatcatgtatgctgctgtggacagccggggctatgaggagcagccccagtgggagtacaacctgtacatgtacatctactttgtgatcttcatcatcttcggcagcttcttcaccctgaacctcttcatcggggtcatcatcgacaacttcaaccagcagaagaagaagctgggcggccaggacatcttcatgacagaggagcagaagaagtactacaatgccatgaagaagctgggcagcaagaagccccagaagcccatcccccggcccctgaacaagtaccagggcttcatctttgatattgtgaccaagcaggcctttgatgtgaccatcatgttcctgatctgcctgaacatggtgaccatgatggtggagacagatgaccagagccctgagaagatcaacatcctggccaagatcaacctgctgtttgtggccatcttcaccggagaatgtattgtgaagctggccgccctgcggcactactacttcaccaacagctggaacatctttgattttgtggtggtgatcctgagcatcgtgggcaccgtgctgagtgacatcatccagaagtacttcttcagccccaccctcttccgggtcatccggctggccagaattggccgcatcctgcggctcatccggggggccaagggcatccgcaccctgctgtttgccctgatgatgagcctgcctgccctcttcaacatcggcctgctgctcttcctggtgatgttcatctacagcatcttcggcatggccaactttgcctacgtgaagtgggaggccggcattgatgacatgttcaacttccagacctttgccaacagcatgctgtgcctcttccagatcaccaccagcgctggctgggatggcctgctgagccccatcctgaacacaggccccccctactgtgaccccaccctgcccaacagcaatggcagcagaggagactgtggcagccctgctgtgggcatcctcttcttcaccacctacatcatcatctccttcctgattgtggtgaacatgtacatcgccatcatcctggagaacttctctgtggccacagaggagagcacagagcccctgtctgaagatgactttgacatgttttatgagatctgggagaagtttgatcctgaggccacccagttcatcgagtacagcgtgctgagtgactttgctgatgccctgtctgagcccctgcgcatcgccaagcccaaccagatcagcctcatcaacatggacctgcccatggtgtctggggaccgcatccactgcatggacatcctgtttgccttcaccaagagggtgctgggggagagcggggagatggatgccctgaagatccagatggaggagaagttcatggccgccaaccccagcaagatctcctatgagcccatcaccaccaccctgcggaggaagcatgaggaggtgtctgccatggtgatccagagggccttccgccgccacctgctgcagaggagcctgaagcacgccagcttcctgttccggcagcaggccggcagcggcctgtctgaggaggatgcccctgagcgggagggcctgattgcctacgtgatgtctgagaacttcagccggcccctgggcccccccagcagcagcagcatcagcagcaccagcttccccccatcctatgacagcgtgacccgggccaccagtgacaacctgcaggtgcggggcagtgactacagccacagcgaggacctggccgacttcccccccagcccagaccgggaccgggagagcatcgtgtag

SEQ ID NO: 170113 - DNA, 5997 bp, synthetic construct; identical to SEQ ID NO: 170111
  misc_feature 1..5997: note = Description of Artificial Sequence: Synthetic coding sequence
  source 1..5997: mol_type = other DNA

SEQ ID NO: 170114 - DNA, 6048 bp, synthetic construct; identical to SEQ ID NO: 170112
  misc_feature 1..6048: note = Description of Artificial Sequence: Synthetic coding sequence
  source 1..6048: mol_type = other DNA

SEQ ID NO: 170115 - DNA, 5889 bp, synthetic construct
  misc_feature 1..5889: note = Description of Artificial Sequence: Synthetic coding sequence
  source 1..5889: mol_type = other DNA
atggccaacttcctgctgccccggggcaccagcagcttccgccgcttcacccgggagagcctggccgccatcgagaagaggatggccgagaagcaggcccggggcagcaccaccctgcaggagagccgggagggcctgcctgaggaggaggccccccggccccagctggacctgcaggccagcaagaagctgcctgacctgtatggcaaccccccccaggagctgattggagagcccctggaggacctggaccccttctacagcacccagaagaccttcatcgtgctgaacaagggcaagaccatcttccgcttcagcgccaccaatgccctgtatgtgctgagccccttccaccccatcagaagagctgctgtgaagatcctggtgcacagcctcttcaacatgctgatcatgtgcaccatcctgaccaactgtgtgttcatggcccagcacgaccccccaccctggaccaagtatgtggagtacaccttcaccgccatctacacctttgagagcctggtgaagatcctggcccggggcttctgcctgcacgccttcaccttcctgcgggacccctggaactggctggacttcagcgtcatcatcatggcctacaccacagaatttgtggacctgggcaatgtgtctgccctgcggaccttccgggtgctgcgggccctgaagaccatcagcgtcatcagcggcctgaagaccatcgtgggcgccctgatccagagcgtgaagaagctggctgatgtgatggtgctgactgtgttctgcctgtctgtgtttgccctgattggcctgcagctgttcatgggcaacctgcggcacaagtgtgtgaggaacttcaccgccctgaatggcaccaatggatctgtggaggctgatggcctggtgtgggagagcctggacctgtacctgagtgaccctgagaactacctgctgaagaatggcaccagtgatgtgctgctgtgtggcaacagcagtgatgctggcacctgcccagagggctaccgctgcctgaaggccggggagaacccagaccacggctacaccagctttgacagctttgcctgggccttcctggccctcttccggctgatgacccaggactgctgggagcggctgtaccagcagaccctgcggtctgctgggaagatctacatgatcttcttcatgctggtgatcttcctgggcagcttctacctggtgaacctgatcctggccgtggtggccatggcctatgaggagcagaaccaggccaccatcgccgagacagaggagaaggagaagcgcttccaggaggccatggagatgctgaagaaggagcacgaggccctgaccatccggggcgtggacacagtgagccgcagcagcctggagatgagccccctggcccctgtgaacagccatgagcggcgcagcaagaggaggaagaggatgagcagcggcacagaggagtgtggagaagatcggctgcccaagagtgacagtgaagatggcccccgggccatgaaccacctgagcctgacccggggcctgagcaggacctccatgaagcccaggagcagccggggcagcatcttcaccttcagaagaagagacctgggcagcgaggccgactttgctgatgatgagaacagcacagctggggagagcgagagccaccacaccagcctgctggtgccctggcccctgcggaggaccagcgcccagggccagcccagccctggcaccagcgcccctggccacgccctgcacggcaagaagaacagcacagtggactgcaatggagtggtgtccctgctgggcgctggggaccctgaggccaccagccctggcagccacctgctgcggcctgtgatgctggagcaccccccagacaccaccacccccagcgaggagcccggcggcccccagatgctgaccagccaggccccctgtgtggatggctttgaggagcccggggcccggcagagggccctgtctgctgtgtctgtgctgaccagcgccctggaggagctggaggagagccgccacaagtgccccccctgctggaaccggctggcccagcgctacctgatctgggagtgctgccccctgtggatgagcatcaagcagggcgtgaagctggtggtgatggaccccttcacagacctgaccatcaccatgtgcatcgtgctgaacaccctcttcatggccctggagcactacaacatgaccagcgagtttgaggagatgctgcaggtgggcaacctggtgttcaccggcatcttcaccgctgagatgaccttcaagatcatcgccctggacccctactactacttccagcagggctggaacatctttgacagcatcatcgtcatcctgagcctgatggagctgggcctgagcaggatgagcaacctgtctgtgctgcgctccttccggctgctgcgggtcttcaagctggccaagtcctggcccaccctgaacaccctcatcaagatcatcggcaacagcgtgggcgccctgggcaacctgaccctggtgctggccatcatcgtgttcatctttgctgtggtgggcatgcagctgtttgggaagaactacagcgagctgcgggacagcgacagcggcctgctgccccgctggcacatgatggacttcttccacgccttcctgatcatcttccgcatcctgtgtggggagtggattgagaccatgtgggactgcatggaggtgtctggccagagcctgtgcctgctggtgttcctgctggtgatggtgattggcaacctggtggtgctgaacctcttcctggccctgctgctgagcagcttctctgctgacaacctgacagccccagatgaggaccgggagatgaacaacctgcagctggccctggcccgcatccagaggggcctgcgctttgtgaagaggaccacctgggacttctgctgcggcctgctgcggcagaggccccagaagccagctgccctggccgcccagggccagctgcccagctgcatcgccaccccctacagccccccacctcctgagacagagaaggtgccccccaccaggaaggagaccaggtttgaggagggggagcagcccggccagggcacccctggggaccctgagcctgtgtgtgtgcccatcgctgtggccgagagtgacacagatgaccaggaggaggatgaggagaacagcctgggcacagaggaggagagcagcaagcagaccccagaggacagctgcagcgagggcagcacagctgacatgaccaacacagctgagctgctggagcagatcccagacctgggccaggatgtgaaggaccctgaggactgcttcacagagggctgtgtgcggcgctgcccctgctgtgctgtggacaccacccaggcccctgggaaggtgtggtggaggctgaggaagacctgctaccacatcgtggagcacagctggtttgagaccttcatcatcttcatgatcctgctgagcagcggggccctggcctttgaggacatctacctggaggagaggaagaccatcaaggtgctgctggagtatgctgacaagatgttcacctacgtgtttgtgctggagatgctgctgaagtgggtggcctacggcttcaagaagtacttcaccaatgcctggtgctggctggacttcctgattgtggatgtgtccctggtgtccctggtggccaacaccctgggctttgctgagatgggccccatcaagagcctgcggaccctgcgggccctgcggcccctgcgggccctgagcagatttgagggcatgagggtggtggtgaatgccctggtgggcgccatccccagcatcatgaatgtgctgctggtgtgcctgatcttctggctgatcttcagcatcatgggcgtgaacctgtttgctgggaagtttggccgctgcatcaaccagacagaaggagacctgcccctgaactacaccatcgtgaacaacaagagccagtgtgagagcctgaacctgaccggggagctgtactggaccaaggtgaaggtgaactttgacaacgtgggcgccggctacctggccctgctgcaggtggccaccttcaagggctggatggacatcatgtatgctgctgtggacagccggggctatgaggagcagccccagtgggagtacaacctgtacatgtacatctacttcgtcatcttcatcatcttcggcagcttcttcaccctgaacctcttcatcggggtcatcatcgacaacttcaaccagcagaagaagaagctgggcggccaggacatcttcatgacagaggagcagaagaagtactacaatgccatgaagaagctgggcagcaagaagccccagaagcccatcccccggcccctgaacaagtaccagggcttcatctttgacatcgtgaccaagcaggcctttgatgtgaccatcatgttcctgatctgcctgaacatggtgaccatgatggtggagacagatgaccagagccctgagaagatcaacatcctggccaagatcaacctgctgtttgtggccatcttcaccggggagtgcatcgtgaagctggccgccctgcggcactactacttcaccaacagctggaacatctttgattttgtggtggtgatcctgagcatcgtgggcaccgtgctgagtgacatcatccagaagtacttcttcagccccaccctcttccgggtcatccggctggcccgcatcggccgcatcctgcggctcatccggggggccaagggcatccgcaccctgctgtttgccctgatgatgagcctgcctgccctcttcaacatcggcctgctgctcttcctggtgatgttcatctacagcatcttcggcatggccaactttgcctacgtgaagtgggaggccggcattgatgacatgttcaacttccagacctttgccaacagcatgctgtgcctcttccagatcaccaccagcgctggctgggatggcctgctgagccccatcctgaacacaggccccccctactgtgaccccaccctgcccaacagcaatggcagcagaggagactgtggcagccctgctgtgggcatcctcttcttcaccacctacatcatcatctccttcctgattgtggtgaacatgtacatcgccatcatcctggagaacttctctgtggccacagaggagagcacagagcccctgtctgaagatgactttgacatgttttatgagatctgggagaagtttgatcctgaggccacccagttcatcgagtacagcgtgctgagtgactttgctgatgccctgtctgagcccctgagaattgccaagcccaaccagatcagcctcatcaacatggacctgcccatggtgtctggggaccgcatccactgcatggacatcctgtttgccttcaccaagagggtgctgggggagagcggggagatggatgccctgaagatccagatggaggagaagttcatggccgccaaccccagcaagatctcctatgagcccatcaccaccaccctgcggaggaagcatgaggaggtgtctgccatggtgatccagagggccttcagaagacacctgctgcagaggagcctgaagcacgccagcttcctgttccggcagcaggccggcagcggcctgtctgaagaagatgcccctgagcgggagggcctcatcgcctacgtgatgtctgagaacttcagccggcccctgggcccccccagcagcagcagcatcagcagcaccagcttcccccccagctatgattctgtgacccgggccaccagtgacaacctgcaggtgcggggcagtgactacagccacagcgaggacctggccgacttcccccccagcccagaccgggaccgggagagcatcgtgtag

SEQ ID NO: 170116 - DNA, 5889 bp, synthetic construct
  misc_feature 1..5889: note = Description of Artificial Sequence: Synthetic coding sequence
  source 1..5889: mol_type = other DNA
atggccaacttcctgctgccccggggcaccagcagcttccgccgcttcacccgggagagcctggccgccatcgagaagaggatggccgagaagcaggcccggggcagcaccaccctgcaggagagccgggagggcctgcctgaggaggaggccccccggccccagctggacctgcaggccagcaagaagctgcctgacctgtatggcaaccccccccaggagctgattggagagcccctggaggacctggaccccttctacagcacccagaagaccttcatcgtgctgaacaagggcaagaccatcttccgcttcagcgccaccaatgccctgtatgtgctgagccccttccaccccatcagaagagctgctgtgaagatcctggtgcacagcctcttcaacatgctgatcatgtgcaccatcctgaccaactgtgtgttcatggcccagcacgaccccccaccctggaccaagtatgtggagtacaccttcaccgccatctacacctttgagagcctggtgaagatcctggcccggggcttctgcctgcacgccttcaccttcctgcgggacccctggaactggctggacttcagcgtcatcatcatggcctacgtgtctgagaacatcaagctgggcaacctgagcgccctgcggaccttccgggtgctgcgggccctgaagaccatcagcgtcatccctggcctgaagaccatcgtgggcgccctgatccagagcgtgaagaagctggctgatgtgatggtgctgactgtgttctgcctgtctgtgtttgccctgattggcctgcagctgttcatgggcaacctgcggcacaagtgtgtgaggaacttcaccgccctgaatggcaccaatggatctgtggaggctgatggcctggtgtgggagagcctggacctgtacctgagtgaccctgagaactacctgctgaagaatggcaccagtgatgtgctgctgtgtggcaacagcagtgatgctggcacctgcccagagggctaccgctgcctgaaggccggggagaacccagaccacggctacaccagctttgacagctttgcctgggccttcctggccctcttccggctgatgacccaggactgctgggagcggctgtaccagcagaccctgcggtctgctgggaagatctacatgatcttcttcatgctggtgatcttcctgggcagcttctacctggtgaacctgatcctggccgtggtggccatggcctatgaggagcagaaccaggccaccatcgccgagacagaggagaaggagaagcgcttccaggaggccatggagatgctgaagaaggagcacgaggccctgaccatccggggcgtggacacagtgagccgcagcagcctggagatgagccccctggcccctgtgaacagccatgagcggcgcagcaagaggaggaagaggatgagcagcggcacagaggagtgtggagaagatcggctgcccaagagtgacagtgaagatggcccccgggccatgaaccacctgagcctgacccggggcctgagcaggacctccatgaagcccaggagcagccggggcagcatcttcaccttcagaagaagagacctgggcagcgaggccgactttgctgatgatgagaacagcacagctggggagagcgagagccaccacaccagcctgctggtgccctggcccctgcggaggaccagcgcccagggccagcccagccctggcaccagcgcccctggccacgccctgcacggcaagaagaacagcacagtggactgcaatggagtggtgtccctgctgggcgctggggaccctgaggccaccagccctggcagccacctgctgcggcctgtgatgctggagcaccccccagacaccaccacccccagcgaggagcccggcggcccccagatgctgaccagccaggccccctgtgtggatggctttgaggagcccggggcccggcagagggccctgtctgctgtgtctgtgctgaccagcgccctggaggagctggaggagagccgccacaagtgccccccctgctggaaccggctggcccagcgctacctgatctgggagtgctgccccctgtggatgagcatcaagcagggcgtgaagctggtggtgatggaccccttcacagacctgaccatcaccatgtgcatcgtgctgaacaccctcttcatggccctggagcactacaacatgaccagcgagtttgaggagatgctgcaggtgggcaacctggtgttcaccggcatcttcaccgctgagatgaccttcaagatcatcgccctggacccctactactacttccagcagggctggaacatctttgacagcatcatcgtcatcctgagcctgatggagctgggcctgagcaggatgagcaacctgtctgtgctgcgctccttccggctgctgcgggtcttcaagctggccaagtcctggcccaccctgaacaccctcatcaagatcatcggcaacagcgtgggcgccctgggcaacctgaccctggtgctggccatcatcgtgttcatctttgctgtggtgggcatgcagctgtttgggaagaactacagcgagctgcgggacagcgacagcggcctgctgccccgctggcacatgatggacttcttccacgccttcctgatcatcttccgcatcctgtgtggggagtggattgagaccatgtgggactgcatggaggtgtctggccagagcctgtgcctgctggtgttcctgctggtgatggtgattggcaacctggtggtgctgaacctcttcctggccctgctgctgagcagcttctctgctgacaacctgacagccccagatgaggaccgggagatgaacaacctgcagctggccctggcccgcatccagaggggcctgcgctttgtgaagaggaccacctgggacttctgctgcggcctgctgcggcagaggccccagaagccagctgccctggccgcccagggccagctgcccagctgcatcgccaccccctacagccccccacctcctgagacagagaaggtgccccccaccaggaaggagaccaggtttgaggagggggagcagcccggccagggcacccctggggaccctgagcctgtgtgtgtgcccatcgctgtggccgagagtgacacagatgaccaggaggaggatgaggagaacagcctgggcacagaggaggagagcagcaagcagaccccagaggacagctgcagcgagggcagcacagctgacatgaccaacacagctgagctgctggagcagatcccagacctgggccaggatgtgaaggaccctgaggactgcttcacagagggctgtgtgcggcgctgcccctgctgtgctgtggacaccacccaggcccctgggaaggtgtggtggaggctgaggaagacctgctaccacatcgtggagcacagctggtttgagaccttcatcatcttcatgatcctgctgagcagcggggccctggcctttgaggacatctacctggaggagaggaagaccatcaaggtgctgctggagtatgctgacaagatgttcacctacgtgtttgtgctggagatgctgctgaagtgggtggcctacggcttcaagaagtacttcaccaatgcctggtgctggctggacttcctgattgtggatgtgtccctggtgtccctggtggccaacaccctgggctttgctgagatgggccccatcaagagcctgcggaccctgcgggccctgcggcccctgcgggccctgagcagatttgagggcatgagggtggtggtgaatgccctggtgggcgccatccccagcatcatgaatgtgctgctggtgtgcctgatcttctggctgatcttcagcatcatgggcgtgaacctgtttgctgggaagtttggccgctgcatcaaccagacagaaggagacctgcccctgaactacaccatcgtgaacaacaagagccagtgtgagagcctgaacctgaccggggagctgtactggaccaaggtgaaggtgaactttgacaacgtgggcgccggctacctggccctgctgcaggtggccaccttcaagggctggatggacatcatgtatgctgctgtggacagccggggctatgaggagcagccccagtgggagtacaacctgtacatgtacatctacttcgtcatcttcatcatcttcggcagcttcttcaccctgaacctcttcatcggggtcatcatcgacaacttcaaccagcagaagaagaagctgggcggccaggacatcttcatgacagaggagcagaagaagtactacaatgccatgaagaagctgggcagcaagaagccccagaagcccatcccccggcccctgaacaagtaccagggcttcatctttgacatcgtgaccaagcaggcctttgatgtgaccatcatgttcctgatctgcctgaacatggtgaccatgatggtggagacagatgaccagagccctgagaagatcaacatcctggccaagatcaacctgctgtttgtggccatcttcaccggggagtgcatcgtgaagctggccgccctgcggcactactacttcaccaacagctggaacatctttgattttgtggtggtgatcctgagcatcgtgggcaccgtgctgagtgacatcatccagaagtacttcttcagccccaccctcttccgggtcatccggctggcccgcatcggccgcatcctgcggctcatccggggggccaagggcatccgcaccctgctgtttgccctgatgatgagcctgcctgccctcttcaacatcggcctgctgctcttcctggtgatgttcatctacagcatcttcggcatggccaactttgcctacgtgaagtgggaggccggcattgatgacatgttcaacttccagacctttgccaacagcatgctgtgcctcttccagatcaccaccagcgctggctgggatggcctgctgagccccatcctgaacacaggccccccctactgtgaccccaccctgcccaacagcaatggcagcagaggagactgtggcagccctgctgtgggcatcctcttcttcaccacctacatcatcatctccttcctgattgtggtgaacatgtacatcgccatcatcctggagaacttctctgtggccacagaggagagcacagagcccctgtctgaagatgactttgacatgttttatgagatctgggagaagtttgatcctgaggccacccagttcatcgagtacagcgtgctgagtgactttgctgatgccctgtctgagcccctgagaattgccaagcccaaccagatcagcctcatcaacatggacctgcccatggtgtctggggaccgcatccactgcatggacatcctgtttgccttcaccaagagggtgctgggggagagcggggagatggatgccctgaagatccagatggaggagaagttcatggccgccaaccccagcaagatctcctatgagcccatcaccaccaccctgcggaggaagcatgaggaggtgtctgccatggtgatccagagggccttcagaagacacctgctgcagaggagcctgaagcacgccagcttcctgttccggcagcaggccggcagcggcctgtctgaagaagatgcccctgagcgggagggcctcatcgcctacgtgatgtctgagaacttcagccggcccctgggcccccccagcagcagcagcatcagcagcaccagcttcccccccagctatgattctgtgacccgggccaccagtgacaacctgcaggtgcggggcagtgactacagccacagcgaggacctggccgacttcccccccagcccagaccgggaccgggagagcatcgtgtag

SEQ ID NO: 170117 - DNA, 5889 bp, synthetic construct; identical to SEQ ID NO: 170116
  misc_feature 1..5889: note = Description of Artificial Sequence: Synthetic coding sequence
  source 1..5889: mol_type = other DNA

SEQ ID NO: 170118 - DNA, 5952 bp, synthetic construct
  misc_feature 1..5952: note = Description of Artificial Sequence: Synthetic coding sequence
  source 1..5952: mol_type = other DNA
atggccaacttcctgctgccccggggcaccagcagcttccgccgcttcacccgggagagcctggccgccatcgagaagaggatggccgagaagcaggcccggggcagcaccaccctgcaggagagccgggagggcctgcctgaggaggaggccccccggccccagctggacctgcaggccagcaagaagctgcctgacctgtatggcaaccccccccaggagctgattggagagcccctggaggacctggaccccttctacagcacccagaagaccttcatcgtgctgaacaagggcaagaccatcttccgcttcagcgccaccaatgccctgtatgtgctgagccccttccaccccatcagaagagctgctgtgaagatcctggtgcacagcctcttcaacatgctgatcatgtgcaccatcctgaccaactgtgtgttcatggcccagcacgaccccccaccctggaccaagtatgtggagtacaccttcaccgccatctacacctttgagagcctggtgaagatcctggcccggggcttctgcctgcacgccttcaccttcctgcgggacccctggaactggctggacttcagcgtcatcatcatggcctacgtgtctgagaacatcaagctgggcaacctgagcgccctgcggaccttccgggtgctgcgggccctgaagaccatcagcgtcatccctggcctgaagaccatcgtgggcgccctgatccagagcgtgaagaagctggctgatgtgatggtgctgactgtgttctgcctgtctgtgtttgccctgattggcctgcagctgttcatgggcaacctgcggcacaagtgtgtgaggaacttcaccgccctgaatggcaccaatggatctgtggaggctgatggcctggtgtgggagagcctggacctgtacctgagtgaccctgagaactacctgctgaagaatggcaccagtgatgtgctgctgtgtggcaacagcagtgatgctggcacctgcccagagggctaccgctgcctgaaggccggggagaacccagaccacggctacaccagctttgacagctttgcctgggccttcctggccctcttccggctgatgacccaggactgctgggagcggctgtaccagcagaccctgcggtctgctgggaagatctacatgatcttcttcatgctggtgatcttcctgggcagcttctacctggtgaacctgatcctggccgtggtggccatggcctatgaggagcagaaccaggccaccatcgccgagacagaggagaaggagaagcgcttccaggaggccatggagatgctgaagaaggagcacgaggccctgaccatccggggcgtggacacagtgagccgcagcagcctggagatgagccccctggcccctgtgaacagccatgagcggcgcagcaagaggaggaagaggatgagcagcggcacagaggagtgtggagaagatcggctgcccaagagtgacagtgaagatggcccccgggccatgaaccacctgagcctgacccggggcctgagcaggacctccatgaagcccaggagcagccggggcagcatcttcaccttcagaagaagagacctgggcagcgaggccgactttgctgatgatgagaacagcacagctggggagagcgagagccaccacaccagcctgctggtgccctggcccctgcggaggaccagcgcccagggccagcccagccctggcaccagcgcccctggccacgccctgcacggcaagaagaacagcacagtggactgcaatggagtggtgtccctgctgggcgctggggaccctgaggccaccagccctggcagccacctgctgcggcctgtgatgctggagcaccccccagacaccaccacccccagcgaggagcccggcggcccccagatgctgaccagccaggccccctgtgtggatggctttgaggagcccggggcccggcagagggccctgtctgctgtgtctgtgctgaccagcgccctggaggagctggaggagagccgccacaagtgccccccctgctggaaccggctggcccagcgctacctgatctgggagtgctgccccctgtggatgagcatcaagcagggcgtgaagctggtggtgatggaccccttcacagacctgaccatcaccatgtgcatcgtgctgaacaccctcttcatggccctggagcactacaacatgaccagcgagtttgaggagatgctgcaggtgggcaacctggtgttcaccggcatcttcaccgctgagatgaccttcaagatcatcgccctggacccctactactacttccagcagggctggaacatctttgacagcatcatcgtcatcctgagcctgatggagctgggcctgagcaggatgagcaacctgtctgtgctgcgctccttccggctgctgcgggtcttcaagctggccaagtcctggcccaccctgaacaccctcatcaagatcatcggcaacagcgtgggcgccctgggcaacctgaccctggtgctggccatcatcgtgttcatctttgctgtggtgggcatgcagctgtttgggaagaactacagcgagctgcgggacagcgacagcggcctgctgccccgctggcacatgatggacttcttccacgccttcctgatcatcttccgcatcctgtgtggggagtggattgagaccatgtgggactgcatggaggtgtctggccagagcctgtgcctgctggtgttcctgctggtgatggtgattggcaacctggtggtgctgaacctcttcctggccctgctgctgagcagcttctctgctgacaacctgacagccccagatgaggaccgggagatgaacaacctgcagctggccctggcccgcatccagaggggcctgcgctttgtgaagaggaccacctgggacttctgctgcggcctgctgcggcagaggccccagaagccagctgccctggccgcccagggccagctgcccagctgcatcgccaccccctacagccccccacctcctgagacagagaaggtgccccccaccaggaaggagaccaggtttgaggagggggagcagcccggccagggcacccctggggaccctgagcctgtgtgtgtgcccatcgctgtggccgagagtgacacagatgaccaggaggaggatgaggagaacagcctgggcacagaggaggagagcagcaagcaggagagccagcctgtgtctgggggccctgaggcccccccagacagcaggacctggagccaggtgtctgccacagccagcagcgaggccgaggccagcgccagccaggccgactggaggcagcagtggaaggccgagccccaggcccctggctgtggggagaccccagaggacagctgcagcgagggcagcacagctgacatgaccaacacagctgagctgctggagcagatcccagacctgggccaggatgtgaaggaccctgaggactgcttcacagagggctgtgtgcggcgctgcccctgctgtgctgtggacaccacccaggcccctgggaaggtgtggtggaggctgaggaagacctgctaccacatcgtggagcacagctggtttgagaccttcatcatcttcatgatcctgctgagcagcggggccctggcctttgaggacatctacctggaggagaggaagaccatcaaggtgctgctggagtatgctgacaagatgttcacctacgtgtttgtgctggagatgctgctgaagtgggtggcctacggcttcaagaagtacttcaccaatgcctggtgctggctggacttcctgattgtggatgtgtccctggtgtccctggtggccaacaccctgggctttgctgagatgggccccatcaagagcctgcggaccctgcgggccctgcggcccctgcgggccctgagcagatttgagggcatgagggtggtggtgaatgccctggtgggcgccatccccagcatcatgaatgtgctgctggtgtgcctgatcttctggctgatcttcagcatcatgggcgtgaacctgtttgctgggaagtttggccgctgcatcaaccagacagaaggagacctgcccctgaactacaccatcgtgaacaacaagagccagtgtgagagcctgaacctgactggagagctgtactggaccaaggtgaaggtgaactttgacaacgtgggcgccggctacctggccctgctgcaggtggccaccttcaagggctggatggacatcatgtatgctgctgtggacagccggggctatgaggagcagccccagtgggagtacaacctgtacatgtacatctactttgtgatcttcatcatcttcggcagcttcttcaccctgaacctcttcatcggggtcatcatcgacaacttcaaccagcagaagaagaagctgggcggccaggacatcttcatgacagaggagcagaagaagtactacaatgccatgaagaagctgggcagcaagaagccccagaagcccatcccccggcccctgaacaagtaccagggcttcatctttgatattgtgaccaagcaggcctttgatgtgaccatcatgttcctgatctgcctgaacatggtgaccatgatggtggagacagatgaccagagccctgagaagatcaacatcctggccaagatcaacctgctgtttgtggccatcttcaccggcaccgtgctgagtgacatcatccagaagtacttcttcagccccaccctcttccgggtcatccggctggccagaattggccgcatcctgcggctcatccggggggccaagggcatccgcaccctgctgtttgccctgatgatgagcctgcctgccctcttcaacatcggcctgctgctcttcctggtgatgttcatctacagcatcttcggcatggccaactttgcctacgtgaagtgggaggccggcattgatgacatgttcaacttccagacctttgccaacagcatgctgtgcctcttccagatcaccaccagcgctggctgggatggcctgctgagccccatcctgaacacaggccccccctactgtgaccccaccctgcccaacagcaatggcagcagaggagactgtggcagccctgctgtgggcatcctcttcttcaccacctacatcatcatctccttcctgattgtggtgaacatgtacatcgccatcatcctggagaacttctctgtggccacagaggagagcacagagcccctgtctgaagatgactttgacatgttttatgagatctgggagaagtttgatcctgaggccacccagttcatcgagtacagcgtgctgagtgactttgctgatgccctgtctgagcccctgcgcatcgccaagcccaaccagatcagcctcatcaacatggacctgcccatggtgtctggggaccgcatccactgcatggacatcctgtttgccttcaccaagagggtgctgggggagagcggggagatggatgccctgaagatccagatggaggagaagttcatggccgccaaccccagcaagatctcctatgagcccatcaccaccaccctgcggaggaagcatgaggaggtgtctgccatggtgatccagagggccttccgccgccacctgctgcagaggagcctgaagcacgccagcttcctgttccggcagcaggccggcagcggcctgtctgaggaggatgcccctgagcgggagggcctgattgcctacgtgatgtctgagaacttcagccggcccctgggcccccccagcagcagcagcatcagcagcaccagcttccccccatcctatgacagcgtgacccgggccaccagtgacaacctgcaggtgcggggcagtgactacagccacagcgaggacctggccgacttcccccccagcccagaccgggaccgggagagcatcgtgtag

SEQ ID NO: 170119 - DNA, 5049 bp, synthetic construct
  misc_feature 1..5049: note = Description of Artificial Sequence: Synthetic coding sequence
  source 1..5049: mol_type = other DNA
atgctggccagccctgagcccaagggcctggtgcccttcaccaaggagagctttgagctgatcaagcagcacatcgccaagacccacaatgaagatcatgaggaggaggacctgaagcccaccccagacctggaggtgggcaagaagctgcccttcatctacggcaacctgagccagggcatggtgtctgagcccctggaggatgtggacccctactactacaagaagaagaacaccttcatcgtgctgaacaagaacagaaccatcttccgcttcaatgctgccagcatcctgtgcaccctgagccccttcaactgcatccggaggaccaccatcaaggtgctggtgcaccccttcttccagctgttcatcctgatctctgtgctgattgactgtgtgttcatgagcctgaccaacctgcccaagtggaggcctgtgctggagaacaccctgctgggcatctacacctttgagatcctggtgaagctgtttgcccggggcgtgtgggccggcagcttctccttcctgggggacccctggaactggctggacttctctgtgacagtgtttgaggtgatcatccgctacagccccctggacttcatccccaccctgcagacagcccggaccctgcgcatcctgaagatcatccccctgaaccagggcctgaagagcctggtgggcgtgctgatccactgcctgaagcagctgattggagtcatcatcctgaccctcttcttcctgagcatcttcagcctcatcggcatgggcctcttcatgggcaacctgaagcacaagtgcttccgctggccccaggagaatgaaaatgagaccctgcacaacagaactggaaacccctactacatccgggagacagagaacttctactacctggagggggagagatatgccctgctgtgtggcaacagaacagatgctggccagtgcccagagggctacgtgtgtgtgaaggccggcatcaacccagaccagggcttcaccaactttgacagctttggctgggccctgtttgccctcttccggctgatggcccaggactacccagaggtgctgtaccaccagatcctgtatgccagcggcaaggtgtacatgatcttctttgtggtggtgtccttcctgttctccttctacatggccagcctcttcctgggcatcctggccatggcctatgaggaggagaagcagagggtgggggagatcagcaagaagattgagcccaagttccagcagacaggcaaggagctgcaggagggcaatgaaacagatgaggccaagaccatccagatcgagatgaagaagaggagccccatcagcacagacaccagcctggatgtgctggaggatgccaccctgcggcacaaggaggagctggagaagagcaagaagatctgccccctgtactggtacaagtttgccaagaccttcctgatctggaactgcagcccctgctggctgaagctgaaggagtttgtgcaccgcatcatcatggcccccttcacagacctcttcctgatcatctgcatcatcctgaatgtgtgcttcctgaccctggagcactaccccatgagcaagcagaccaacaccctgctgaacatcggcaacctggtgttcatcggcatcttcaccgctgagatgatcttcaagatcatcgccatgcacccctacggctacttccaggtgggctggaacatctttgacagcatgattgtgttccacggcctcatcgagctgtgcctggccaacgtggccggcatggccctgctgcggctcttcaggatgctgcgcatcttcaagctgggcaagtactggcccaccttccagatcctgatgtggagcctgagcaacagctgggtggccctgaaggacctggtgctgctgctcttcaccttcatcttcttctctgctgccttcggcatgaagctgtttgggaagaactatgaggagtttgtgtgccacatcgacaaggactgccagctgccccgctggcacatgcatgacttcttccacagcttcctgaatgtgttccgcatcctgtgtggggagtgggtggagaccctgtgggactgcatggaggtggccggccagagctggtgcatccccttctacctgatggtgatcctgattggcaacctgctggtgctgtacctgttcctggccctggtgagcagcttcagcagctgcaaggatgtgacagcagaagaaaataatgaggccaagaacctgcagctggccgtggcccgcatcaagaagggcatcaactacgtgctgctgaagatcctgtgcaagacccagaatgtgcccaaggacaccatggaccacgtgaatgaggtgtatgtgaaggaggacatcagtgaccacaccctgtctgagctgagcaacacccaggacttcctgaaggacaaggagaagagcagcggcacagagaagaatgccacagaaaatgaaagccagagcctcatccccagccccagcgtgtctgaaacagtgcccatcgccagcggggagagtgacatcgagaacctggacaacaaggagatccagagcaagtctggagatggcggcagcaaggagaagatcaagcagagcagcagcagtgaatgttccacagtggacatcgccatcagcgaggaggaggagatgttttatggaggagagaggagcaagcacctgaagaatggctgccggcggggcagcagcctgggccagatcagcggggccagcaagaagggcaagatctggcagaacatcaggaagacctgctgcaagatcgtggagaacaactggttcaagtgcttcatcggcctggtgaccctgctgagcacaggcaccctggcctttgaggacatctacatggaccagaggaagaccatcaagatcctgctggagtatgctgacatgatcttcacctacatcttcatcctggagatgctgctgaagtggatggcctacggcttcaaggcctacttcagcaatggctggtaccgcctggactttgtggtggtgattgtgttctgcctgagcctcatcggcaagacccgggaggagctgaagcccctcatctccatgaagttcctgcggcccctgcgggtgctgagccagtttgagaggatgaaggtggtggtgcgggccctgatcaagaccaccctgcccaccctgaatgtgttcctggtgtgcctgatgatctggctgatcttcagcatcatgggcgtggacctgtttgctggccgcttctatgagtgcatcgaccccaccagcggggagcgcttccccagcagcgaggtgatgaacaagagccgctgtgagagcctgctcttcaatgaatccatgctgtgggagaatgccaagatgaactttgacaacgtgggcaatggcttcctgagcctgctgcaggtggccaccttcaacggctggatcaccatcatgaacagcgccatcgacagcgtggccgtgaacatccagccccactttgaggtgaacatctacatgtactgctacttcatcaacttcatcatctttggagtcttcctgcccctgtccatgctgatcaccgtcatcatcgacaacttcaacaagcacaagatcaagctgggcggcagcaacatcttcatcaccgtgaagcagaggaagcagtacagaaggctgaagaagctgatgtatgaggacagccagaggcctgtgccccggcccctgaacaagctgcagggcttcatctttgatgtggtgaccagccaggccttcaacgtcatcgtgatggtgctgatctgcttccaggccatcgccatgatgattgacacagatgtgcagagcctgcagatgagcatcgccctgtactggatcaacagcatctttgtgatgctgtacaccatggagtgcatcctgaagctgattgccttccgctgcttctacttcaccatcgcctggaacatctttgacttcatggtggtgatcttcagcatcaccggcctgtgcctgcccatgacagtgggcagctacctggtgccccccagcctggtgcagctgatcctgctgagccgcatcatccacatgctgcggctgggcaagggccccaaggtgttccacaacctgatgctgcccctgatgctgagcctgcctgccctgctgaacatcatcctgctgatcttcctggtgatgttcatctatgctgtgtttggcatgtacaactttgcctacgtgaagaaggaggccggcatcaatgatgtgagcaactttgagaccttcggcaacagcatgctgtgcctcttccaggtggccatctttgctggctgggatggcatgctggatgccatcttcaacagcaagtggagcgactgtgaccctgacaagatcaaccctggcacccaggtgcggggggactgtggcaaccccagcgtgggcatcttctactttgtgtcctacatcctgatctcctggctgatcatcgtgaacatgtacatcgtggtggtgatggagttcctgaacatcgccagcaagaagaagaacaagaccctgtctgaagatgacttcaggaagttcttccaggtgtggaagagatttgatcctgacaggacccagtacatcgacagcagcaagctgagtgactttgctgctgccctggaccccccactcttcatggccaagcccaacaagggccagctgattgccctggacctgcccatggctgtgggggaccgcatccactgcctggacatcctgctggccttcaccaagagggtgatgggccaggatgtgaggatggagaaggtggtgtctgaaattgaaagtggcttcctgctggccaaccccttcaagatcacctgtgagcccatcaccaccaccctgaagaggaagcaggaggccgtgtctgccaccatcatccagagggcctacaagaactaccgcctgcggagaaatgacaagaacaccagtgacatccacatgattgatggagacagagatgtgcacgccaccaaggagggcgcctactttgacaaggccaaggagaagagccccatccagagccagatctag

SEQ ID NO: 170120 - DNA, 5049 bp, synthetic construct; identical to SEQ ID NO: 170119
  misc_feature 1..5049: note = Description of Artificial Sequence: Synthetic coding sequence
  source 1..5049: mol_type = other DNA

SEQ ID NO: 170121 - DNA, 2592 bp, synthetic construct
  misc_feature 1..2592: note = Description of Artificial Sequence: Synthetic coding sequence
  source 1..2592: mol_type = other DNA
atgctggccagccctgagcccaagggcctggtgcccttcaccaaggagagctttgagctgatcaagcagcacatcgccaagacccacaatgaagatcatgaggaggaggacctgaagcccaccccagacctggaggtgggcaagaagctgcccttcatctacggcaacctgagccagggcatggtgtctgagcccctggaggatgtggacccctactactacaagaagaagaacaccttcatcgtgctgaacaagaacagaaccatcttccgcttcaatgctgccagcatcctgtgcaccctgagccccttcaactgcatccggaggaccaccatcaaggtgctggtgcaccccttcttccagctgttcatcctgatctctgtgctgattgactgtgtgttcatgagcctgaccaacctgcccaagtggaggcctgtgctggagaacaccctgctgggcatctacacctttgagatcctggtgaagctgtttgcccggggcgtgtgggccggcagcttctccttcctgggggacccctggaactggctggacttctctgtgacagtgtttgaggtgatcatccgctacagccccctggacttcatccccaccctgcagacagcccggaccctgcgcatcctgaagatcatccccctgaaccagggcctgaagagcctggtgggcgtgctgatccactgcctgaagcagctgattggagtcatcatcctgaccctcttcttcctgagcatcttcagcctcatcggcatgggcctcttcatgggcaacctgaagcacaagtgcttccgctggccccaggagaatgaaaatgagaccctgcacaacagaactggaaacccctactacatccgggagacagagaacttctactacctggagggggagagatatgccctgctgtgtggcaacagaacagatgctggccagtgcccagagggctacgtgtgtgtgaaggccggcatcaacccagaccagggcttcaccaactttgacagctttggctgggccctgtttgccctcttccggctgatggcccaggactacccagaggtgctgtaccaccagatcctgtatgccagcggcaaggtgtacatgatcttctttgtggtggtgtccttcctgttctccttctacatggccagcctcttcctgggcatcctggccatggcctatgaggaggagaagcagagggtgggggagatcagcaagaagattgagcccaagttccagcagacaggcaaggagctgcaggagggcaatgaaacagatgaggccaagaccatccagatcgagatgaagaagaggagccccatcagcacagacaccagcctggatgtgctggaggatgccaccctgcggcacaaggaggagctggagaagagcaagaagatctgccccctgtactggtacaagtttgccaagaccttcctgatctggaactgcagcccctgctggctgaagctgaaggagtttgtgcaccgcatcatcatggcccccttcacagacctcttcctgatcatctgcatcatcctgaatgtgtgcttcctgaccctggagcactaccccatgagcaagcagaccaacaccctgctgaacatcggcaacctggtgttcatcggcatcttcaccgctgagatgatcttcaagatcatcgccatgcacccctacggctacttccaggtgggctggaacatctttgacagcatgattgtgttccacggcctcatcgagctgtgcctggccaacgtggccggcatggccctgctgcggctcttcaggatgctgcgcatcttcaagctgggcaagtactggcccaccttccagatcctgatgtggagcctgagcaacagctgggtggccctgaaggacctggtgctgctgctcttcaccttcatcttcttctctgctgccttcggcatgaagctgtttgggaagaactatgaggagtttgtgtgccacatcgacaaggactgccagctgccccgctggcacatgcatgacttcttccacagcttcctgaatgtgttccgcatcctgtgtggggagtgggtggagaccctgtgggactgcatggaggtggccggccagagctggtgcatccccttctacctgatggtgatcctgattggcaacctgctggtgctgtacctgttcctggccctggtgagcagcttcagcagctgcaaggatgtgacagcagaagaaaataatgaggccaagaacctgcagctggccgtggcccgcatcaagaagggcatcaactacgtgctgctgaagatcctgtgcaagacccagaatgtgcccaaggacaccatggaccacgtgaatgaggtgtatgtgaaggaggacatcagtgaccacaccctgtctgagctgagcaacacccaggacttcctgaaggacaaggagaagagcagcggcacagagaagaatgccacagaaaatgaaagccagagcctcatccccagccccagcgtgtctgaaacagtgcccatcgccagcggggagagtgacatcgagaacctggacaacaaggagatccagagcaagtctggagatggcggcagcaagtag

SEQ ID NO: 170122 - DNA, 1209 bp, synthetic construct
  misc_feature 1..1209: note = Description of Artificial Sequence: Synthetic coding sequence
  source 1..1209: mol_type = other DNA
atgctggccagccctgagcccaagggcctggtgcccttcaccaaggagagctttgagctgatcaagcagcacatcgccaagacccacaatgaagatcatgaggaggaggacctgaagcccaccccagacctggaggtgggcaagaagctgcccttcatctacggcaacctgagccagggcatggtgtctgagcccctggaggatgtggacccctactactacaagaagaagaacaccttcatcgtgctgaacaagaacagaaccatcttccgcttcaatgctgccagcatcctgtgcaccctgagccccttcaactgcatccggaggaccaccatcaaggtgctggtgcaccccttcttccagctgttcatcctgatctctgtgctgattgactgtgtgttcatgagcctgaccaacctgcccaagtggaggcctgtgctggagaacaccctgctgggcatctacacctttgagatcctggtgaagctgtttgcccggggcgtgtgggccggcagcttctccttcctgggggacccctggaactggctggacttctctgtgacagtgtttgaggtgatcatccgctacagccccctggacttcatccccaccctgcagacagcccggaccctgcgcatcctgaagatcatccccctgaaccagggcctgaagagcctggtgggcgtgctgatccactgcctgaagcagctgattggagtcatcatcctgaccctcttcttcctgagcatcttcagcctcatcggcatgggcctcttcatgggcaacctgaagcacaagtgcttccgctggccccaggagaatgaaaatgagaccctgcacaacagaactggaaacccctactacatccgggagacagagaacttctactacctggagggggagagatatgccctgctgtgtggcaacagaacagatgctggccagtgcccagagggctacgtgtgtgtgaaggccggcatcaacccagaccagggcttcaccaactttgacagctttggctgggccctgtttgccctcttccggctgatggcccaggactacccagaggtgctgtaccaccagatcctgtatgccagcggcaaggtgtacatgatcttctttgtggtggtgtccttcctgttctccttctacatggccagcctcttcctgggcatcctggccatggcctatgaggaggagaagcagtag

SEQ ID NO: 170123 - DNA, 5871 bp, synthetic construct
  misc_feature 1..5871: note = Description of Artificial Sequence: Synthetic coding sequence
  source 1..5871: mol_type = other DNA
atggagttccccatcggcagcctggagaccaacaacttccgccgcttcaccccagagagcctggtggagattgagaagcagattgctgccaagcagggcaccaagaaggcccgggagaagcaccgggagcagaaggaccaggaggagaagccccggccccagctggacctgaaggcctgcaaccagctgcccaagttctatggagagctgcctgctgagctgattggagagcccctggaggacctggaccccttctacagcacccacaggaccttcatggtgctgaacaagggccgcaccatcagccgcttcagcgccacccgggccctgtggctgttcagccccttcaacctgatccggaggacagccatcaaggtgtctgtgcacagctggttcagcctcttcatcaccgtgaccatcctggtgaactgtgtgtgcatgaccaggacagacctgcctgagaagattgaatatgtgttcaccgtcatctacacctttgaggccctgatcaagatcctggcccggggcttctgcctgaatgagttcacctacctgcgggacccctggaactggctggacttcagcgtcatcaccctggcctacgtgggcacagccatcgacctgcggggcatcagcggcctgcggaccttccgggtgctgcgggccctgaagacagtgtctgtcatccctggcctgaaggtgattgtgggcgccctgatccacagcgtgaagaagctggctgatgtgaccatcctgaccatcttctgcctgtctgtgtttgccctggtgggcctgcagctgttcaagggcaacctgaagaacaagtgtgtgaagaatgacatggctgtgaatgagaccaccaactacagcagccacaggaagccagacatctacatcaacaagaggggcaccagtgaccccctgctgtgtggaaatggaagtgacagcggccactgcccagatggctacatctgcctgaagaccagtgacaacccagacttcaactacaccagctttgacagctttgcctgggccttcctgagcctcttccggctgatgacccaggacagctgggagcggctgtaccagcagaccctgcggaccagcggcaagatctacatgatcttctttgtgctggtgatcttcctgggcagcttctacctggtgaacctgatcctggccgtggtgaccatggcctatgaggagcagaaccaggccaccacagatgaaattgaggccaaggagaagaagttccaggaggccctggagatgctgaggaaggagcaggaggtgctggccgccctgggcatcgacaccaccagcctgcacagccacaacggcagccccctgaccagcaagaatgccagcgagcggcggcaccgcatcaagccccgggtgtctgagggcagcacagaggacaacaagagccccaggagtgacccctacaaccagaggaggatgtccttcctgggcctggccagcggcaagagaagagccagccacggctctgtgttccacttccgcagccctggccgggacatcagcctgcctgagggcgtgacagatgatggagtcttccctggggaccacgagagccaccggggcagcctgctgctgggcggcggggccggccagcagggccccctgcccaggagccccctgccccagcccagcaacccagacagccgccacggggaggatgagcaccagcccccacccaccagcgagctggcccctggagctgtggatgtgtctgcctttgatgctggccagaagaagaccttcctgtctgctgagtacctggatgagcccttccgggcccagagggccatgtctgtggtgtccatcatcacctctgtgctggaggagctggaggagagcgagcagaagtgccccccctgcctgaccagcctgagccagaagtacctgatctgggactgctgccccatgtgggtgaagctgaagaccatcctgtttggcctggtgacagacccctttgctgagctgaccatcaccctgtgcatcgtggtgaacaccatcttcatggccatggagcaccacggcatgagccccacctttgaggccatgctgcagatcggcaacatcgtgttcaccatcttcttcaccgctgagatggtgttcaagatcatcgcctttgacccctactactacttccagaagaagtggaacatctttgactgcatcatcgtgacagtgtccctgctggagctgggcgtggccaagaagggcagcctgtctgtgctgcgctccttccggctgctgcgggtcttcaagctggccaagtcctggcccaccctgaacaccctcatcaagatcatcggcaacagcgtgggcgccctgggcaacctgaccatcatcctggccatcatcgtgtttgtgtttgccctggtgggcaagcagctgctgggggagaactacagaaacaacaggaagaacatcagcgcccctcatgaggactggccccgctggcacatgcatgacttcttccacagcttcctgattgtgttccgcatcctgtgtggggagtggattgagaacatgtgggcctgcatggaggtgggccagaagagcatctgcctgatcctcttcctgactgtgatggtgctgggcaacctggtggtgctgaacctcttcatcgccctgctgctgaacagcttctctgctgacaacctgacagccccagaagatgatggagaggtgaacaacctgcaggtggccctggcccgcatccaggtgtttggccacaggaccaagcaggccctgtgcagcttcttcagccgcagctgccccttcccccagcccaaggccgagcctgagctggtggtgaagctgcccctgagcagcagcaaggccgagaaccacatcgccgccaacacagcccggggcagcagcggcggcctgcaggccccccggggccccagagatgagcacagcgacttcatcgccaaccccaccgtgtgggtgtctgtgcccatcgccgagggggagagtgacctggatgacctggaggatgatggaggagaagatgcccagagcttccagcaggaggtgatccccaagggccagcaggagcagctgcagcaggtggagcgctgtggggaccacctgacccccaggagccctggcaccggcaccagcagcgaggacctggcccccagcctgggggagacctggaaggatgaatctgtgccccaggtgcctgctgagggcgtggatgacaccagcagcagcgagggcagcacagtggactgcctggaccctgaggagatcctgaggaagatccctgagctggctgatgacctggaggagccagatgactgcttcacagagggctgcatccgccactgcccctgctgcaagctggacaccaccaagagcccctgggatgtgggctggcaggtgaggaagacctgctaccgcatcgtggagcacagctggtttgagagcttcatcatcttcatgatcctgctgagcagcggcagcctggcctttgaggactactacctggaccagaagcccaccgtgaaggccctgctggagtacacagacagagtcttcaccttcatctttgtgtttgagatgctgctgaagtgggtggcctacggcttcaagaagtacttcaccaatgcctggtgctggctggacttcctgattgtgaacatcagcctcatcagcctgacagccaagatcctggagtacagcgaggtggcccccatcaaggccctgcggaccctgcgggccctgcggcccctgcgggccctgagcagatttgagggcatgagggtggtggtggatgccctggtgggcgccatccccagcatcatgaatgtgctgctggtgtgcctgatcttctggctgatcttcagcatcatgggcgtgaacctgtttgctgggaagttctggcgctgcatcaactacacagatggagagttcagcctggtgcccctgagcatcgtgaacaacaagagtgactgcaagatccagaacagcacaggcagcttcttctgggtgaatgtgaaggtgaactttgacaacgtggccatgggctacctggccctgctgcaggtggccaccttcaagggctggatggacatcatgtatgctgctgtggacagccgggaggtgaacatgcagcccaagtgggaggacaacgtgtacatgtacctgtacttcgtcatcttcatcatctttggaggcttcttcaccctgaacctgtttgtgggcgtcatcatcgacaacttcaaccagcagaagaagaagctgggcggccaggacatcttcatgacagaggagcagaagaagtactacaatgccatgaagaagctgggcagcaagaagccccagaagcccatcccccggcccctgaacaagttccagggctttgtgtttgacatcgtgacccggcaggcctttgacatcaccatcatggtgctgatctgcctgaacatgatcaccatgatggtggagacagatgaccagagcgaggagaagaccaagatcctgggcaagatcaaccagttctttgtggccgtgttcaccggggagtgtgtgatgaagatgtttgccctgcggcagtactacttcaccaacggctggaatgtgtttgacttcatcgtggtggtgctgagcatcgccagcctcatcttcagcgccatcctgaagagcctgcagagctacttcagccccaccctcttccgggtcatccggctggcccgcatcggccgcatcctgcggctcatccgggccgccaagggcatccgcaccctgctgtttgccctgatgatgagcctgcctgccctcttcaacatcggcctgctgctcttcctggtgatgttcatctacagcatcttcggcatgagcagcttcccccacgtgcgctgggaggccggcattgatgacatgttcaacttccagacctttgccaacagcatgctgtgcctcttccagatcaccaccagcgctggctgggatggcctgctgagccccatcctgaacacaggccccccctactgtgaccccaacctgcccaacagcaatggcaccaggggggactgtggcagccctgctgtgggcatcatcttcttcaccacctacatcatcatctccttcctgatcatggtgaacatgtacatcgctgtgatcctggagaacttcaacgtggccacagaggagagcacagagcccctgtctgaagatgactttgacatgttttatgagacctgggagaagtttgatcctgaggccacccagttcatcaccttcagcgccctgagtgactttgctgacaccctgagcggccccctgcgcatccccaagcccaacagaaacatcctgatccagatggacctgcccctggtgcctggggacaagatccactgcctggacatcctgtttgccttcaccaagaatgtgctgggggagagcggggagctggacagcctgaaggccaacatggaggagaagttcatggccaccaacctgagcaagagcagctatgagcccatcgccaccaccctgcgctggaagcaggaggacatcagcgccaccgtcatccagaaggcctaccgctcctatgtgctgcaccgctccatggccctgagcaacaccccctgtgtgcccagggctgaggaggaggccgccagcctgcctgatgagggctttgtggccttcaccgccaatgaaaactgtgtgctgcctgacaagtcagaaacagccagcgccaccagcttcccccccagctatgaatctgtgacccggggcctgagtgacagagtgaacatgaggaccagcagcagcatccagaatgaagatgaggccacctccatggagctgattgcccctggcccctag

SEQ ID NO: 170124 - DNA, 5376 bp, synthetic construct
  misc_feature 1..5376: note = Description of Artificial Sequence: Synthetic coding sequence
  source 1..5376: mol_type = other DNA
atggatgaccgctgctaccctgtgatcttcccagatgagaggaacttccggcccttcaccagtgacagcctggccgccatcgagaagagaattgccatccagaaggagaagaagaagagcaaggaccagacaggagaggtgccccagccccggccccagctggacctgaaggccagcaggaagctgcccaagctgtatggagacatcccccgggagctgattggcaagcccctggaggacctggaccccttctacagaaaccacaagaccttcatggtgctgaacaggaagaggaccatctaccgcttcagcgccaagcacgccctcttcatcttcggccccttcaacagcatccgcagcctggccatccgggtgtctgtgcacagcctcttctccatgttcatcatcggcaccgtcatcatcaactgtgtgttcatggccaccggccctgccaagaacagcaacagcaacaacacagacattgctgaatgtgtgttcaccggcatctacatctttgaggccctgatcaagatcctggcccggggcttcatcctggatgagttctccttcctgcgggacccctggaactggctggacagcatcgtgattggaattgccatcgtgtcctacatccctggcatcaccatcaagctgctgcccctgcggaccttccgggtcttccgggccctgaaggccatctctgtggtgtcccggctgaaggtgattgtgggcgccctgctgcggtctgtgaagaagctggtgaatgtcatcatcctgaccttcttctgcctgagcatctttgccctggtgggccagcagctgttcatgggcagcctgaacctgaagtgcatcagccgggactgcaagaacatcagcaaccctgaggcctatgaccactgctttgagaagaaggagaacagccctgagttcaagatgtgtggcatctggatgggcaacagcgcctgcagcatccagtatgagtgcaagcacaccaagatcaacccagactacaactacaccaactttgacaactttggctggagcttcctggccatgttccggctgatgacccaggacagctgggagaagctgtaccagcagaccctgcggaccaccggcctgtacagcgtcttcttcttcatcgtggtgatcttcctgggcagcttctacctgatcaacctgaccctggccgtggtgaccatggcctatgaggagcagaacaagaatgtggccgctgagattgaggccaaggagaagatgttccaggaggcccagcagctgctgaaggaggagaaggaggccctggtggccatgggcatcgacaggagcagcctgaccagcctggagaccagctacttcacccccaagaagaggaagctgtttggaaacaagaagaggaagagcttcttcctgcgggagagcggcaaggaccagcccccaggcagtgacagtgatgaggactgccagaagaagccccagctgctggagcagaccaagaggctgagccagaacctgagcctggaccactttgatgaacatggagaccccctgcagaggcagagggccctgtctgctgtgtccatcctgaccatcaccatgaaggagcaggagaagagccaggagccctgcctgccctgtggggagaacctggccagcaagtacctggtgtggaactgctgcccccagtggctgtgtgtgaagaaggtgctgaggacagtgatgacagaccccttcacagagctggccatcaccatctgcatcatcatcaacacagtgttcctggccatggagcaccacaagatggaggccagctttgagaagatgctgaacatcggcaacctggtgttcaccagcatcttcatcgccgagatgtgcctgaagatcatcgccctggacccctaccactacttccggcggggctggaacatctttgacagcatcgtggccctgctgagctttgctgatgtgatgaactgtgtgctgcagaagaggtcctggcccttcctgcgctccttccgggtgctgcgggtcttcaagctggccaagtcctggcccaccctgaacaccctcatcaagatcatcggcaacagcgtgggcgccctgggcagcctgactgtggtgctggtgattgtcatcttcatcttctctgtggtgggcatgcagctgtttggccgctccttcaacagccagaagagccccaagctgtgcaaccccaccggccccaccgtgtcctgcctgcggcactggcacatgggagacttctggcacagcttcctggtggtgttccgcatcctgtgtggggagtggattgagaacatgtgggagtgcatgcaggaggccaatgccagcagcagcctgtgtgtgattgtgttcatcctgatcaccgtgattggcaagctggtggtgctgaacctcttcatcgccctgctgctgaacagcttcagcaatgaggagagaaatggaaacctggagggggaggccaggaagaccaaggtgcagctggccctggaccgcttccggcgggccttctgctttgtgcgccacaccctggagcacttctgccacaagtggtgcaggaagcagaacctgccccagcagaaggaggtggccggcggctgtgccgcccagagcaaggacatcatccccctggtgatggagatgaagaggggcagcgagacccaggaggagctgggcatcctgacctctgtgcccaagaccctgggcgtgagacatgactggacctggctggcccccctggccgaggaggaggatgatgtggagttctctggagaagataatgcccagaggatcacccagcctgagcctgagcagcaggcctatgagctgcaccaggagaacaagaagcccaccagccagagggtgcagagcgtggagattgacatgttttctgaagatgagccccacctgaccatccaggaccccaggaagaagagtgatgtgaccagcatcctgtctgaatgttccaccatcgacctgcaggacggcttcggctggctgcctgagatggtgcccaagaagcagcctgagcgctgcctgcccaagggcttcggctgctgcttcccctgctgcagcgtggacaagaggaagccaccctgggtgatctggtggaacctgaggaagacctgctaccagatcgtgaagcacagctggtttgagagcttcatcatcttcgtcatcctgctgagcagcggggccctgatctttgaagatgtgcacctggagaaccagcccaagatccaggagctgctgaactgcacagacatcatcttcacccacatcttcatcctggagatggtgctgaagtgggtggccttcggctttgggaagtacttcaccagcgcctggtgctgcctggacttcatcatcgtgattgtgtctgtgaccaccctcatcaacctgatggagctgaagagcttccgcaccctgcgggccctgcggcccctgcgggccctgagccagtttgagggcatgaaggtggtggtgaatgccctgattggagccatcccagccatcctgaatgtgctgctggtgtgcctgatcttctggctggtgttctgcatcctgggcgtgtacttcttcagcggcaagtttgggaagtgcatcaatggaacagattctgtcatcaactacaccatcatcaccaacaagagccagtgtgagagcggcaacttctcctggatcaaccagaaggtgaactttgacaacgtgggcaatgcctacctggccctgctgcaggtggccaccttcaagggctggatggacatcatctatgctgctgtggacagcacagagaaggagcagcagcctgagtttgagagcaacagcctgggctacatctactttgtggtgttcatcatcttcggcagcttcttcaccctgaacctcttcatcggggtcatcatcgacaacttcaaccagcagcagaagaagctgggcggccaggacatcttcatgacagaggagcagaagaagtactacaatgccatgaagaagctgggcagcaagaagccccagaagcccatcccccggcccctgaacaagtgccagggcctggtgtttgacatcgtgaccagccagatctttgacatcatcatcatcagcctcatcatcctgaacatgatctccatgatggccgagagctacaaccagcccaaggccatgaagagcatcctggaccacctgaactgggtgtttgtggtgatcttcaccctggagtgcctgatcaagatctttgccctgcggcagtactacttcaccaacggctggaacctgtttgactgtgtggtggtgctgctgagcatcgtgtccaccatgatcagcaccctggagaaccaggagcacatccccttcccccccaccctcttccgcatcgtgcggctggcccgcatcggccgcatcctgcggctggtgcgggccgcccggggcatccgcaccctgctgtttgccctgatgatgagcctgcccagcctcttcaacatcggcctgctgctcttcctgatcatgttcatctatgccatcctgggcatgaactggttcagcaaggtgaaccctgagagcggcattgatgacatcttcaacttcaagacctttgccagctccatgctgtgcctcttccagatcagcaccagcgctggctgggacagcctgctgagccccatgctgcggagcaaggagagctgcaacagcagcagcgagaactgccacctgcccggcatcgccaccagctactttgtgtcctacatcatcatctccttcctgattgtggtgaacatgtacatcgctgtgatcctggagaacttcaacacagccacagaggagagcgaggaccccctgggggaggatgactttgacatcttctatgaggtgtgggagaagtttgatcctgaggccacccagttcatcaagtacagcgccctgagtgactttgctgatgccctgcctgagcccctgcgggtggccaagcccaacaagtaccagttcctggtgatggacctgcccatggtgtctgaagatcggctgcactgcatggacatcctgtttgccttcaccgcccgggtgctgggcggcagtgatggcctggacagcatgaaggccatgatggaggagaagttcatggaggccaaccccctgaagaagctgtatgagcccatcgtgaccaccaccaagaggaaggaggaggagagaggagctgccatcatccagaaggccttcaggaagtacatgatgaaggtgaccaagggggaccagggcgaccagaatgacctggagaatggcccccacagccccctgcagaccctgtgcaatggagacctgagcagctttggagtggccaagggcaaggtgcactgtgactag

SEQ ID NO: 170125 - DNA, 4335 bp, synthetic construct
  misc_feature 1..4335: note = Description of Artificial Sequence: Synthetic coding sequence
  source 1..4335: mol_type = other DNA
atggatgaccgctgctaccctgtgatcttcccagatgagaggaacttccggcccttcaccagtgacagcctggccgccatcgagaagagaattgccatccagaaggagaagaagaagagcaaggaccagacaggagaggtgccccagccccggccccagctggacctgaaggccagcaggaagctgcccaagctgtatggagacatcccccgggagctgattggcaagcccctggaggacctggaccccttctacagaaaccacaagaccttcatggtgctgaacaggaagaggaccatctaccgcttcagcgccaagcacgccctcttcatcttcggccccttcaacagcatccgcagcctggccatccgggtgtctgtgcacagcctcttctccatgttcatcatcggcaccgtcatcatcaactgtgtgttcatggccaccggccctgccaagaacagcaacagcaacaacacagacattgctgaatgtgtgttcaccggcatctacatctttgaggccctgatcaagatcctggcccggggcttcatcctggatgagttctccttcctgcgggacccctggaactggctggacagcatcgtgattggaattgccatcgtgtcctacatccctggcatcaccatcaagctgctgcccctgcggaccttccgggtcttccgggccctgaaggccatctctgtggtgtcccggctgaaggtgattgtgggcgccctgctgcggtctgtgaagaagctggtgaatgtcatcatcctgaccttcttctgcctgagcatctttgccctggtgggccagcagctgttcatgggcagcctgaacctgaagtgcatcagccgggactgcaagaacatcagcaaccctgaggcctatgaccactgctttgagaagaaggagaacagccctgagttcaagatgtgtggcatctggatgggcaacagcgcctgcagcatccagtatgagtgcaagcacaccaagatcaacccagactacaactacaccaactttgacaactttggctggagcttcctggccatgttccggctgatgacccaggacagctgggagaagctgtaccagcagaccctgcggaccaccggcctgtacagcgtcttcttcttcatcgtggtgatcttcctgggcagcttctacctgatcaacctgaccctggccgtggtgaccatggcctatgaggagcagaacaagaatgtggccgctgagattgaggccaaggagaagatgttccaggaggcccagcagctgctgaaggaggagaaggaggccctggtggccatgggcatcgacaggagcagcctgaccagcctggagaccagctacttcacccccaagaagaggaagctgtttggaaacaagaagaggaagagcttcttcctgcgggagagcggcaaggaccagcccccaggcagtgacagtgatgaggactgccagaagaagccccagctgctggagcagaccaagaggctgagccagaacctgagcctggaccactttgatgaacatggagaccccctgcagaggcagagggccctgtctgctgtgtccatcctgaccatcaccatgaaggagcaggagaagagccaggagccctgcctgccctgtggggagaacctggccagcaagtacctggtgtggaactgctgcccccagtggctgtgtgtgaagaaggtgctgaggacagtgatgacagaccccttcacagagctggccatcaccatctgcatcatcatcaacacagtgttcctggccatggagcaccacaagatggaggccagctttgagaagatgctgaacatcggcaacctggtgttcaccagcatcttcatcgccgagatgtgcctgaagatcatcgccctggacccctaccactacttccggcggggctggaacatctttgacagcatcgtggccctgctgagctttgctgatgtgatgaactgtgtgctgcagaagaggtcctggcccttcctgcgctccttccgggtgctgcgggtcttcaagctggccaagtcctggcccaccctgaacaccctcatcaagatcatcggcaacagcgtgggcgccctgggcagcctgactgtggtgctggtgattgtcatcttcatcttctctgtggtgggcatgcagctgtttggccgctccttcaacagccagaagagccccaagctgtgcaaccccaccggccccaccgtgtcctgcctgcggcactggcacatgggagacttctggcacagcttcctggtggtgttccgcatcctgtgtggggagtggattgagaacatgtgggagtgcatgcaggaggccaatgccagcagcagcctgtgtgtgattgtgttcatcctgatcaccgtgattggcaagctggtggtgctgaacctcttcatcgccctgctgctgaacagcttcagcaatgaggagagaaatggaaacctggagggggaggccaggaagaccaaggtgcagctggccctggaccgcttccggcgggccttctgctttgtgcgccacaccctggagcacttctgccacaagtggtgcaggaagcagaacctgccccagcagaaggaggtggccggcggctgtgccgcccagagcaaggacatcatccccctggtgatggagatgaagaggggcagcgagacccaggaggagctgggcatcctgacctctgtgcccaagaccctgggcgtgagacatgactggacctggctggcccccctggccgaggaggaggatgatgtggagttctctggagaagataatgcccagaggatcacccagcctgagcctgagcagcaggcctatgagctgcaccaggagaacaagaagcccaccagccagagggtgcagagcgtggagattgacatgttttctgaagatgagccccacctgaccatccaggaccccaggaagaagagtgatgtgaccagcatcctgtctgaatgttccaccatcgacctgcaggacggcttcggctggctgcctgagatggtgcccaagaagcagcctgagcgctgcctgcccaagggcttcggctgctgcttcccctgctgcagcgtggacaagaggaagccaccctgggtgatctggtggaacctgaggaagacctgctaccagatcgtgaagcacagctggtttgagagcttcatcatcttcgtcatcctgctgagcagcggggccctgatctttgaagatgtgcacctggagaaccagcccaagatccaggagctgctgaactgcacagacatcatcttcacccacatcttcatcctggagatggtgctgaagtgggtggccttcggctttgggaagtacttcaccagcgcctggtgctgcctggacttcatcatcgtgattgtgtctgtgaccaccctcatcaacctgatggagctgaagagcttccgcaccctgcgggccctgcggcccctgcgggccctgagccagtttgagggcatgaaggtggtggtgaatgccctgattggagccatcccagccatcctgaatgtgctgctggtgtgcctgatcttctggctggtgttctgcatcctgggcgtgtacttcttcagcggcaagtttgggaagtgcatcaatggaacagattctgtcatcaactacaccatcatcaccaacaagagccagtgtgagagcggcaacttctcctggatcaaccagaaggtgaactttgacaacgtgggcaatgcctacctggccctgctgcaggtggccaccttcaagggctggatggacatcatctatgctgctgtggacagcacagagaaggagcagcagcctgagtttgagagcaacagcctgggctacatctactttgtggtgttcatcatcttcggcagcttcttcaccctgaacctcttcatcggggtcatcatcgacaacttcaaccagcagcagaagaagctgggcggccaggacatcttcatgacagaggagcagaagaagtactacaatgccatgaagaagctgggcagcaagaagccccagaagcccatcccccggcccctgaacaagtgccagggcctggtgtttgacatcgtgaccagccagatctttgacatcatcatcatcagcctcatcatcctgaacatgatctccatgatggccgagagctacaaccagcccaaggccatgaagagcatcctggaccacctgaactgggtgtttgtggtgatcttcaccctggagtgcctgatcaagatctttgccctgcggcagtactacttcaccaacggctggaacctgtttgactgtgtggtggtgctgctgagcatcgtgtccaagtag

SEQ ID NO: 170126 - DNA, 5376 bp, synthetic construct; identical to SEQ ID NO: 170124
  misc_feature 1..5376: note = Description of Artificial Sequence: Synthetic coding sequence
  source 1..5376: mol_type = other DNA

SEQ ID NO: 170127 - DNA, 5217 bp, synthetic construct
  misc_feature 1..5217: note = Description of Artificial Sequence: Synthetic coding sequence
  source 1..5217: mol_type = other DNA
atgctgaagaggaagcagagcagccgggtggaggcccagcctgtgacagactttggaccagatgagagcctgagtgacaatgctgacatcctgtggatcaacaagccctgggtgcacagcctgctgcgcatctgtgccatcatcagcgtcatctctgtgtgcatgaacacccccatgacctttgagcactacccacccctgcagtatgtgaccttcaccctggacaccctgctgatgttcctgtacacagctgagatgattgccaagatgcacatccggggcatcgtgaagggggacagcagctatgtgaaggaccgctggtgtgtgtttgatggcttcatggtgttctgcctgtgggtgtccctggtgctgcaggtgtttgaaattgctgacatcgtggaccagatgagcccctggggcatgctgcgcatcccccggcccctcatcatgatccgggccttccgcatctacttccgctttgagctgcccaggacccgcatcaccaacatcctgaagaggtctggagagcagatctggagcgtgtccatcttcctgctcttcttcctgctgctgtatggcatcctgggcgtgcagatgtttggcaccttcacctaccactgtgtggtgaatgacaccaagccaggaaatgtgacctggaacagcctggccatcccagacacccactgcagccctgagctggaggagggctaccagtgccccccaggcttcaagtgcatggacctggaggacctgggcctgagccggcaggagctgggctacagcggcttcaatgagatcggcaccagcatcttcaccgtgtatgaggccgccagccaggagggctgggtgttcctgatgtaccgggccatcgacagcttcccccgctggaggagctacttctacttcatcaccctcatcttcttcctggcctggctggtgaagaatgtgttcatcgctgtgatcatcgagacctttgctgagatccgggtgcagttccagcagatgtggggcagccgcagcagcaccaccagcacagccaccacccagatgtttcatgaagatgctgctgggggctggcagctggtggccgtggatgtgaacaagccccagggccgggccccagcctgcctgcagaagatgatgaggagcagcgtcttccacatgttcatcctgtccatggtgacagtggatgtgattgtggccgccagcaactactacaagggggagaacttccggcggcagtatgatgagttctacctggccgaggtggccttcaccgtgctgtttgacctggaggccctgctgaagatctggtgcctgggcttcaccggctacatcagcagcagcctgcacaagtttgagctgctgctggtgattggcaccaccctgcacgtgtacccagacctgtaccacagccagttcacctacttccaggtgctgcgggtggtgcggctcatcaagatcagccctgccctggaggactttgtgtacaagatcttcggccctgggaagaagctgggcagcctggtggtgttcaccgccagcctgctgattgtgatgtctgccatcagcctgcagatgttctgctttgtggaggagctggaccgcttcaccaccttcccccgggccttcatgtccatgttccagatcctgacccaggagggctgggtggatgtgatggaccagaccctgaatgctgtgggccacatgtgggcccctgtggtggccatctacttcatcctgtaccacctgtttgccaccctcatcctgctgagcctgtttgtggccgtcatcctggacaacctggagctggatgaggacctgaagaagctgaagcagctgaagcagagcgaggccaatgctgacaccaaggagaagctgcccctgcggctgcgcatctttgagaagttccccaaccggccccagatggtgaagatcagcaagctgcccagcgacttcaccgtgcccaagatccgggagagcttcatgaagcagttcatcgaccggcagcagcaggacacctgctgcctgctgcggagcctgcccaccaccagcagcagcagctgtgaccacagcaagaggtctgccatcgaggacaacaagtacatcgaccagaagctgaggaagagcgtcttcagcatccgggccaggaacctgctggagaaggagacagctgtgaccaagatcctgcgggcctgcacccggcagaggatgctgagcggcagctttgagggccagcctgccaaggagaggagcatcctgtctgtgcagcaccacatccggcaggagcggcgcagcctgcggcacggcagcaacagccagaggatcagccggggcaagagcctggagaccctgacccaggaccacagcaacacagtgcgctacagaaatgcccagagagaagattctgagatcaagatgatccaggagaagaaggagcaggccgagatgaagaggaaggtgcaggaggaggagctgcgggagaaccacccctactttgacaagcccctcttcatcgtgggccgggagcaccgcttcaggaacttctgccgggtggtggtgcgggcccgcttcaatgccagcaagacagatcctgtgactggagctgtgaagaacaccaagtaccaccagctgtatgacctgctgggcctggtgacctacctggactgggtgatgatcatcgtgaccatctgcagctgcatctccatgatgtttgagagccccttccggcgggtgatgcacgcccccaccctgcagattgctgaatatgtgtttgtgatcttcatgagcattgagctgaacctgaagatcatggctgatggcctcttcttcacccccacagctgtgatccgggactttggaggagtgatggacatcttcatctacctggtgtccctcatcttcctgtgctggatgccccagaatgtgcctgctgagagcggggcccagctgctgatggtgctgcgctgcctgcggcccctgcgcatcttcaagctggtgccccagatgaggaaggtggtgcgggagctgttcagcggcttcaaggagatcttcctggtgtccatcctgctgctgaccctgatgctggtgtttgccagctttggagtgcagctgtttgctgggaagctggccaagtgcaatgaccccaacatcatcagaagagaggactgcaatggcatcttccgcatcaacgtgtctgtgtccaagaacctgaacctgaagctgcggcctggagagaagaagccaggcttctgggtgccccgggtgtgggccaaccccaggaacttcaactttgacaacgtgggcaatgccatgctggccctgtttgaggtgctgagcctgaagggctgggtggaggtgagagatgtgatcatccaccgggtgggccccatccacggcatctacatccacgtgtttgtgttcctgggctgcatgattggcctgaccctgtttgtgggcgtggtgattgccaacttcaatgaaaataaaggaacagccctgctgactgtggaccagaggcgctgggaggacctgaagagccggctgaagatcgcccagcccctgcacctgccccccaggccagacaatgatggcttccgggccaagatgtatgacatcacccagcaccccttcttcaagaggaccatcgccctgctggtgctggcccagagcgtgctgctgtctgtgaagtgggatgtggaggaccctgtgacagtgcccctggccaccatgtctgtggtgttcaccttcatctttgtgctggaggtgaccatgaagatcatcgccatgagccctgctggcttctggcagagcagaagaaacagatatgacctgctggtgaccagcctgggcgtggtgtgggtggtgctgcactttgccctgctgaatgcctacacctacatgatgggcgcctgtgtgattgtgttccgcttcttcagcatctgtgggaagcacgtgaccctgaagatgctgctgctgactgtggtggtgtccatgtacaagagcttcttcatcatcgtgggcatgttcctgctgctgctgtgctacgcctttgctggggtggtgctgtttggaacagtgaagtacggggagaacatcaacagacatgccaacttcagcagcgctgggaaggccatcaccgtgctcttcagaattgtgactggagaggactggaacaagatcatgcatgactgcatggtgcagccccccttctgcaccccagatgagttcacctactgggccacagactgtggcaactatgctggggccctgatgtacttctgcagcttctacgtgatcatcgcctacatcatgctgaacctgctggtggccatcatcgtggagaacttcagcctcttctacagcacagaggaggaccagctgctgagctacaatgacctgcggcacttccagatcatctggaacatggtggatgacaagcgggagggcgtcatccccaccttccgggtgaagttcctgctgcggctgctgcggggccgcctggaggtggacctggacaaggacaagctgctcttcaagcacatgtgctatgagatggagcggctgcacaatggaggagatgtgaccttccatgatgtgctgtccatgctgagctacagatctgtggacatcaggaagagcctgcagctggaggagctgctggcccgggagcagctggagtacaccatcgaggaggaggtggccaagcagaccatccgcatgtggctgaagaagtgcctgaagaggatccgggccaagcagcagcagagctgcagcatcatccacagcctgcgggagagccagcagcaggagctgagccgcttcctgaaccccccatccattgagaccacccagcccagcgaggacaccaatgccaacagccaggacaacagcatgcagcctgagaccagcagccagcagcagctgctgagccccaccctgagtgacagaggaggcagccggcaggatgctgctgatgctgggaagccccagaggaagtttggccagtggaggctgcccagcgcccccaagcccatcagccacagcgtgtcctctgtgaacctgcgctttggaggccgcaccaccatgaagtctgtggtgtgcaagatgaaccccatgacagatgctgccagctgtggcagcgaggtgaagaagtggtggacccggcagctgactgtggagagtgatgaaagtggagatgacctgctggacatctag

SEQ ID NO: 170128 - DNA, 2007 bp, synthetic construct
  misc_feature 1..2007: note = Description of Artificial Sequence: Synthetic coding sequence
  source 1..2007: mol_type = other DNA
atgctgaagaggaagcagagcagccgggtggaggcccagcctgtgacagactttggaccagatgagagcctgagtgacaatgctgacatcctgtggatcaacaagccctgggtgcacagcctgctgcgcatctgtgccatcatcagcgtcatctctgtgtgcatgaacacccccatgacctttgagcactacccacccctgcagtatgtgaccttcaccctggacaccctgctgatgttcctgtacacagctgagatgattgccaagatgcacatccggggcatcgtgaagggggacagcagctatgtgaaggaccgctggtgtgtgtttgatggcttcatggtgttctgcctgtgggtgtccctggtgctgcaggtgtttgaaattgctgacatcgtggaccagatgagcccctggggcatgctgcgcatcccccggcccctcatcatgatccgggccttccgcatctacttccgctttgagctgcccaggacccgcatcaccaacatcctgaagaggtctggagagcagatctggagcgtgtccatcttcctgctcttcttcctgctgctgtatggcatcctgggcgtgcagatgtttggcaccttcacctaccactgtgtggtgaatgacaccaagccaggaaatgtgacctggaacagcctggccatcccagacacccactgcagccctgagctggaggagggctaccagtgccccccaggcttcaagtgcatggacctggaggacctgggcctgagccggcaggagctgggctacagcggcttcaatgagatcggcaccagcatcttcaccgtgtatgaggccgccagccaggagggctgggtgttcctgatgtaccgggccatcgacagcttcccccgctggaggagctacttctacttcatcaccctcatcttcttcctggcctggctggtgaagaatgtgttcatcgctgtgatcatcgagacctttgctgagatccgggtgcagttccagcagatgtggggcagccgcagcagcaccaccagcacagccaccacccagatgtttcatgaagatgctgctgggggctggcagctggtggccgtggatgtgaacaagccccagggccgggccccagcctgcctgcagaagatgatgaggagcagcgtcttccacatgttcatcctgtccatggtgacagtggatgtgattgtggccgccagcaactactacaagggggagaacttccggcggcagtatgatgagttctacctggccgaggtggccttcaccgtgctgtttgacctggaggccctgctgaagatctggtgcctgggcttcaccggctacatcagcagcagcctgcacaagtttgagctgctgctggtgattggcaccaccctgcacgtgtacccagacctgtaccacagccagttcacctacttccaggtgctgcgggtggtgcggctcatcaagatcagccctgccctggaggactttgtgtacaagatcttcggccctgggaagaagctgggcagcctggtggtgttcaccgccagcctgctgattgtgatgtctgccatcagcctgcagatgttctgctttgtggaggagctggaccgcttcaccaccttcccccgggccttcatgtccatgttccagatcctgacccaggagggctgggtggatgtgatggaccagaccctgaatgctgtgggccacatgtgggcccctgtggtggccatctacttcatcctgtaccacctgtttgccaccctgccccccagcctcatccgggacctgtgtggcacccaggatgcctgccccagctgcctgcccctgcagccccccaaccccctgcccggcagccagaccctggcccggctgacccaccaggccctgaccaccccacctggcatgaggagcagccagctgttcagcaagatcagcctgctgctgggcatctgtgtggcctgggagagcatcctgggcagcctgagcctgagccacaacctgaggtag

SEQ ID NO: 170129 - DNA, 657 bp, synthetic construct
  misc_feature 1..657: note = Description of Artificial Sequence: Synthetic coding sequence
  source 1..657: mol_type = other DNA
atgctgaagaggaagcagagcagccgggtggaggcccagcctgtgacagactttggaccagatgagagcctgagtgacaatgctgacatcctgtggatcaacaagccctgggtgcacagcctgctgcgcatctgtgccatcatcagcgtcatctctgtgtgcatgaacacccccatgacctttgagcactacccacccctgcagtatgtgaccttcaccctggacaccctgctgatgttcctgtacacagctgagatgattgccaagatgcacatccggggcatcgtgaagggggacagcagctatgtgaaggaccgctggtgtgtgtttgatggcttcatggtgttctgcctgtgggtgtccctggtgctgcaggtgtttgaaattgctgacatcgtggaccagatgagcccctggggcatgctgcgcatcccccggcccctcatcatgatccgggccttccgcatctacttccgctttgagctgcccaggacccgcatcaccaacatcctgaagaggtctggagagcagatctggagcgtgtccatcttcctgctcttcttcctgctgctgtatggcatcctgggcgtgcagatgtttggcaccttcacctaccactgtgtggtgaatgacaccaagccaggcctgagcctgtag

SEQ ID NO: 170130 - DNA, 657 bp, synthetic construct
  misc_feature 1..657: note = Description of Artificial Sequence: Synthetic coding sequence
  source 1..657: mol_type = other DNA
atgctgaagaggaagcagagcagccgggtggaggcccagcctgtgacagactttggaccagatgagagcctgagtgacaatgctgacatcctgtggatcaacaagccctgggtgcacagcctgctgcgcatctgtgccatcatcagcgtcatctctgtgtgcatgaacacccccatgacctttgagcactacccacccctgcagtatgtgaccttcaccctggacaccctgctgatgttcctgtacacagctgagatgattgccaagatgcacatccggggcatcgtgaagggggacagcagctatgtgaaggaccgctggtgtgtgtttgatggcttcatggtgttctgcctgtgggtgtccctggtgctgcaggtgtttgaaattgctgacatcgtggaccagatgagcccctggggcatgctgcgcatcccccggcccctcatcatgatccgggccttccgcatctacttccgctttgagctgcccaggacccgcatcaccaacatcctgaagaggtctggagagcagatctggagcgtgtccatcttcctgctcttcttcctgctgctgtatggcatcctgggcgtgcagatgtttggcaccttcacctaccactgtgtggtgaatgacaccaagccaggcctgagcatctag

SEQ ID NO: 170131 - DNA, 1725 bp, synthetic construct
  misc_feature 1..1725: note = Description of Artificial Sequence: Synthetic coding sequence
  source 1..1725: mol_type = other DNA
atggccagcacagagggcgccaacaacatgcccaagcaggtggaggtgaggatgcatgacagccacctgggcagcgaggagcccaagcaccgccacctgggcctgcggctgtgtgacaagctgggcaagaacctgctgctgaccctgactgtgtttggagtcatcctgggcgctgtgtgtggcggcctgctgcggctggccagccccatccacccagatgtggtgatgctgattgccttccctggggacatcctgatgaggatgctgaagatgctgatcctgcccctcatcatcagcagcctcatcaccggcctgagcggcctggatgccaaggccagcggccgcctgggcacccgggccatggtgtactacatgagcaccaccatcatcgctgctgtgctgggcgtcatcctggtgctggccatccaccctggcaaccccaagctgaagaagcagctgggccctgggaagaagaatgatgaggtgagcagcctggatgccttcctggacctgatccggaacctcttccctgagaacctggtgcaggcctgcttccagcagatccagacagtgaccaagaaggtgctggtggcccctcctccagatgaggaggccaatgccaccagcgctgtggtgtccctgctgaatgagaccgtgacagaggtgcctgaggagaccaagatggtgatcaagaagggcctggagttcaaggatggcatgaatgtgctgggcctcatcggcttcttcatcgccttcggcatcgccatgggcaagatgggagaccaggccaagctgatggtggacttcttcaacatcctgaatgagatcgtgatgaagctggtgatcatgatcatgtggtacagccccctgggcatcgcctgcctgatctgtgggaagatcatcgccatcaaggacctggaggtggtggcccggcagctgggcatgtacatggtgaccgtcatcatcggcctcatcatccatggaggcatcttcctgcccctcatctactttgtggtgaccaggaagaaccccttctccttctttgctggcatcttccaggcctggatcacagccctgggcacagccagcagcgctggcaccctgcctgtgaccttccgctgcctggaggagaacctgggcatcgacaagagggtgaccaggtttgtgctgcctgtgggcgccaccatcaacatggatggaacagccctgtatgaggccgtggccgccatcttcatcgcccagatgaatggagtggtgctggatggcggccagatcgtgacagtgtccctgacagccaccctggcctctgtgggcgccgccagcatccccagcgctggcctggtgaccatgctgctgatcctgacagctgtgggcctgcccacagaggacatcagcctgctggtggccgtggactggctgctggacaggatgaggacctctgtgaatgtggtgggggacagctttggagctggcatcgtgtaccacctgagcaagtctgagctggacaccatcgacagccagcaccgggtgcatgaggacatcgagatgaccaagacccagagcatctatgatgacatgaagaaccaccgggagagcaacagcaaccagtgtgtgtatgctgcccacaacagcgtcatcgtggatgagtgcaaggtgaccctggccgccaacgggaagtctgctgactgcagcgtggaggaggagccctggaagcgggagaagtag

SEQ ID NO: 170132 - DNA, 1698 bp, synthetic construct
  misc_feature 1..1698: note = Description of Artificial Sequence: Synthetic coding sequence
  source 1..1698: mol_type = other DNA
atgcccaagcaggtggaggtgaggatgcatgacagccacctgggcagcgaggagcccaagcaccgccacctgggcctgcggctgtgtgacaagctgggcaagaacctgctgctgaccctgactgtgtttggagtcatcctgggcgctgtgtgtggcggcctgctgcggctggccagccccatccacccagatgtggtgatgctgattgccttccctggggacatcctgatgaggatgctgaagatgctgatcctgcccctcatcatcagcagcctcatcaccggcctgagcggcctggatgccaaggccagcggccgcctgggcacccgggccatggtgtactacatgagcaccaccatcatcgctgctgtgctgggcgtcatcctggtgctggccatccaccctggcaaccccaagctgaagaagcagctgggccctgggaagaagaatgatgaggtgagcagcctggatgccttcctggacctgatccggaacctcttccctgagaacctggtgcaggcctgcttccagcagatccagacagtgaccaagaaggtgctggtggcccctcctccagatgaggaggccaatgccaccagcgctgtggtgtccctgctgaatgaaacagtgacagaggtgcctgaggagaccaagatggtgatcaagaagggcctggagttcaaggatggcatgaatgtgctgggcctgattggcttcttcatcgcctttggaattgccatgggcaagatgggagaccaggccaagctgatggtggacttcttcaacatcctgaatgaaattgtgatgaagctggtgatcatgatcatgtggtacagccccctgggcatcgcctgcctgatctgtgggaagatcatcgccatcaaggacctggaggtggtggcccggcagctgggcatgtacatggtgaccgtcatcatcggcctcatcatccacggcggcatcttcctgcccctcatctactttgtggtgaccaggaagaaccccttctccttctttgctggcatcttccaggcctggatcacagccctgggcacagccagcagcgctggcaccctgcctgtgaccttccgctgcctggaggagaacctgggcatcgacaagagggtgaccaggtttgtgctgcctgtgggcgccaccatcaacatggatggaacagccctgtatgaagctgtggccgccatcttcatcgcccagatgaatggagtggtgctggatggcggccagatcgtgacagtgtccctgacagccaccctggcctctgtgggcgccgccagcatccccagcgctggcctggtgaccatgctgctgatcctgacagctgtgggcctgcccacagaggacatcagcctgctggtggccgtggactggctgctggacaggatgaggacctctgtgaatgtggtgggggacagctttggagctggcatcgtgtaccacctgagcaagtctgagctggacaccatcgacagccagcaccgggtgcatgaagatattgagatgaccaagacccagagcatctatgatgacatgaagaaccaccgggagagcaacagcaaccagtgtgtgtatgctgcccacaacagcgtgattgtggatgagtgcaaggtgaccctggccgccaacgggaagtctgctgactgcagcgtggaggaggagccctggaagcgggagaagtag

SEQ ID NO: 170133 - DNA, 1698 bp, synthetic construct; identical to SEQ ID NO: 170132
  misc_feature 1..1698: note = Description of Artificial Sequence: Synthetic coding sequence
  source 1..1698: mol_type = other DNA

SEQ ID NO: 170134 - DNA, 1629 bp, synthetic construct
  misc_feature 1..1629: note = Description of Artificial Sequence: Synthetic coding sequence
  source 1..1629: mol_type = other DNA
atgaccaagagcaatggagaggagcccaagatgggcggccgcatggagcgcttccagcagggcgtgaggaagaggaccctgctggccaagaagaaggtgcagaacatcaccaaggaggatgtgaagagctacctgttcagaaatgcctttgtgctgctgactgtgacagctgtgattgtgggcaccatcctgggcttcaccctgcggccctacaggatgagctaccgggaggtgaagtacttctccttccctggagagctgctgatgaggatgctgcagatgctggtgctgcccctcatcatcagcagcctggtgacaggcatggccgccctggacagcaaggccagcggcaagatgggcatgagagctgtggtgtactacatgaccaccaccatcatcgctgtggtgattggcatcatcatcgtcatcatcatccaccctgggaagggcaccaaggagaacatgcaccgggagggcaagatcgtgcgggtgacagctgctgatgccttcctggacctgatccggaacatgtttcctcccaacctggtggaggcctgcttcaagcagttcaagaccaactatgagaagaggagcttcaaggtgcccatccaggccaatgagaccctggtgggcgccgtcatcaacaacgtgtctgaggccatggagaccctgacccgcatcacagaggagctggtgcctgtgcccggctctgtgaatggagtgaatgccctgggcctggtggtgttctccatgtgctttggatttgtgattggcaacatgaaggagcagggccaggccctgcgggagttctttgacagcctgaatgaggccatcatgaggctggtggccgtcatcatgtggtacgcccctgtgggcatcctcttcctgattgctgggaagatcgtggagatggaggacatgggcgtcatcggcggccagctggccatgtacacagtgaccgtcatcgtgggcctgctgattcatgctgtgattgtgctgcccctgctgtacttcctggtgaccaggaagaacccctgggtgttcatcggcggcctgctgcaggccctgatcacagccctgggcaccagcagcagcagcgccaccctgcccatcaccttcaagtgcctggaggagaacaacggggtggacaagagggtgaccaggtttgtgctgcctgtgggcgccaccatcaacatggatggaacagccctgtatgaggccctggccgccatcttcatcgcccaggtgaacaactttgagctgaactttggccagatcatcaccatcagcatcacagccacagctgccagcatcggggctgctggcatcccccaggccggcctggtgaccatggtgattgtgctgacctctgtgggcctgcccacagatgacatcaccctcatcatcgctgtggactggttcctggaccggctgcggaccaccaccaacgtgctgggggacagcctgggcgccggcatcgtggagcacctgagcagacatgagctgaagaacagagatgtggagatgggcaacagcgtcatcgaggagaatgagatgaagaagccctaccagctgattgcccaggacaatgaaacagagaagcccatcgacagcgagaccaagatgtag

SEQ ID NO: 170135 - DNA, 1494 bp, synthetic construct
  misc_feature 1..1494: note = Description of Artificial Sequence: Synthetic coding sequence
  source 1..1494: mol_type = other DNA
atgaccaagagcaatggagaggagcccaagatgggcggccgcatggagcgcttccagcagggcgtgaggaagaggaccctgctggccaagaagaaggtgcagaacatcaccaaggaggatgtgaagagctacctgttcagaaatgcctttgtgctgctgactgtgacagctgtgattgtgggcaccatcctgggcttcaccctgcggccctacaggatgagctaccgggaggtgaagtacttctccttccctggagagctgctgatgaggatgctgcagatgctggtgctgcccctcatcatcagcagcctggtgacaggcatggccgccctggacagcaaggccagcggcaagatgggcatgagagctgtggtgtactacatgaccaccaccatcatcgctgtggtgattggcatcatcatcgtcatcatcatccaccctgggaagggcaccaaggagaacatgcaccgggagggcaagatcgtgcgggtgacagctgctgatgccttcctggacctgatccggaacatgtttcctcccaacctggtggaggcctgcttcaagcagttcaagaccaactatgagaagaggagcttcaaggtgcccatccaggccaatgagaccctggtgggcgccgtcatcaacaacgtgtctgaggccatggagaccctgacccgcatcacagaggagctggtgcctgtgcccggctctgtgaatggagtgaatgccctgggcctggtggtgttctccatgtgctttggatttgtgattggcaacatgaaggagcagggccaggccctgcgggagttctttgacagcctgaatgaggccatcatgaggctggtggccgtcatcatgtggtacgcccctgtgggcatcctcttcctgattgctgggaagatcgtggagatggaggacatgggcgtcatcggcggccagctggccatgtacacagtgaccgtcatcgtgggcctgctgattcatgctgtgattgtgctgcccctgctgtacttcctggtgaccaggaagaacccctgggtgttcatcggcggcctgctgcaggccctgatcacagccctgggcaccagcagcagcagcgccaccctgcccatcaccttcaagtgcctggaggagaacaacggggtggacaagagggtgaccaggtttgtgctgcctgtgggcgccaccatcaacatggatggaacagccctgtatgaggccctggccgccatcttcatcgcccaggtgaacaactttgagctgaactttggccagatcatcaccatccgggaccggctgcggaccaccaccaacgtgctgggggacagcctgggcgccggcatcgtggagcacctgagcagacatgagctgaagaacagagatgtggagatgggcaacagcgtgattgaagaaaatgagatgaagaagccctaccagctgattgcccaggacaatgaaacagagaagcccattgattctgagaccaagatgtag

SEQ ID NO: 170136 - DNA, 348 bp, synthetic construct
  misc_feature 1..348: note = Description of Artificial Sequence: Synthetic coding sequence
  source 1..348: mol_type = other DNA
atgaccaagagcaatggagaggagcccaagatgggcggccgcatggagcgcttccagcagggcgtgaggaagaggaccctgctggccaagaagaaggtgcagaacatcaccaaggaggatgtgaagagctacctgttcagaaatgcctttgtgctgctgactgtgacagctgtgattgtggatgagaagacagaggcccagatcctgaccacccagctgatgaacacagagtgggacagcaacccccccttccggctgcaggtgctgatccaccacacagtgctgggcgccatcacccccatcctggccctgctgcagcagtttgctgagggcctgcctgaggtgtag

SEQ ID NO: 170137 - DNA, 1473 bp, synthetic construct
  misc_feature 1..1473: note = Description of Artificial Sequence: Synthetic coding sequence
  source 1..1473: mol_type = other DNA
atgaccaagagcaatggagaggagcccaagatgggcggccgcatggagcgcttccagcagggcgtgaggaagaggaccctgctggccaagaagaaggtgcagaacatcaccaaggaggatgtgaagagctacctgttcagaaatgcctttgtgctgctgaccggcatggccgccctggacagcaaggccagcggcaagatgggcatgagagctgtggtgtactacatgaccaccaccatcatcgctgtggtgattggcatcatcatcgtcatcatcatccaccctgggaagggcaccaaggagaacatgcaccgggagggcaagatcgtgcgggtgacagctgctgatgccttcctggacctgatccggaacatgtttcctcccaacctggtggaggcctgcttcaagcagttcaagaccaactatgagaagaggagcttcaaggtgcccatccaggccaatgagaccctggtgggcgccgtcatcaacaacgtgtctgaggccatggagaccctgacccgcatcacagaggagctggtgcctgtgcccggctctgtgaatggagtgaatgccctgggcctggtggtgttctccatgtgctttggatttgtgattggcaacatgaaggagcagggccaggccctgcgggagttctttgacagcctgaatgaggccatcatgaggctggtggccgtcatcatgtggtacgcccctgtgggcatcctcttcctgattgctgggaagatcgtggagatggaggacatgggcgtcatcggcggccagctggccatgtacacagtgaccgtcatcgtgggcctgctgattcatgctgtgattgtgctgcccctgctgtacttcctggtgaccaggaagaacccctgggtgttcatcggcggcctgctgcaggccctgatcacagccctgggcaccagcagcagcagcgccaccctgcccatcaccttcaagtgcctggaggagaacaacggggtggacaagagggtgaccaggtttgtgctgcctgtgggcgccaccatcaacatggatggaacagccctgtatgaggccctggccgccatcttcatcgcccaggtgaacaactttgagctgaactttggccagatcatcaccatcagcatcacagccacagctgccagcatcggggctgctggcatcccccaggccggcctggtgaccatggtgattgtgctgacctctgtgggcctgcccacagatgacatcaccctcatcatcgctgtggactggttcctggaccggctgcggaccaccaccaacgtgctgggggacagcctgggcgccggcatcgtggagcacctgagcagacatgagctgaagaacagagatgtggagatgggcaacagcgtcatcgaggagaatgagatgaagaagccctaccagctgattgcccaggacaatgaaacagagaagcccatcgacagcgagaccaagatgtag

SEQ ID NO: 170138 - DNA, 324 bp, synthetic construct
  misc_feature 1..324: note = Description of Artificial Sequence: Synthetic coding sequence
  source 1..324: mol_type = other DNA
atgaccaagagcaatggagaggagcccaagatgggcggccgcatggagcgcttccagcagggcgtgaggaagaggaccctgctggccaagaagaaggtgcagaacatcaccaaggaggatgtgaagagctacctgttcagaaatgcctttgtgctgctgactgtgacagctgtgattgtgggcaccatcctgggcttcaccctgcggccctacaggatgagctaccgggaggtgaagtacttctccttccctggagagctgctgatgaggatgctgcagatgctggtgctgcccctcatcatcagcagcctggtgactggatag

SEQ ID NO: 170139 - DNA, 324 bp, synthetic construct; identical to SEQ ID NO: 170138
  misc_feature 1..324: note = Description of Artificial Sequence: Synthetic coding sequence
  source 1..324: mol_type = other DNA

SEQ ID NO: 170140 - DNA, 306 bp, synthetic construct
  misc_feature 1..306: note = Description of Artificial Sequence: Synthetic coding sequence
  source 1..306: mol_type = other DNA
atgaccaagagcaatggagaggagcccaagatgggcggccgcatggagcgcttccagcagggcgtgaggaagaggaccctgctggccaagaagaaggtgcagaacatcaccaaggaggatgtgaagagctacctgttcagaaatgcctttgtgctgctgactgtgacagctgtgattgtgggcaccatcctgggcttcaccctgcggccctacaggatgagctaccgggaggtgaagtacttctccttccctggagagctgctgatgaggatgctgcagatgctggtgctgcccctcatcatctag

SEQ ID NO: 170141 - DNA, 987 bp, synthetic construct
  misc_feature 1..987: note = Description of Artificial Sequence: Synthetic coding sequence
  source 1..987: mol_type = other DNA
atgactggagtgtttgacagcctggtggccgacatgcacagcacccagattgctgccagcagcacctaccaccagcaccagcagcccccatctgggggcggggccggccctgggggcaacagcagcagcagcagcagcctgcacaagccccaggagagccccaccctgcctgtgtccacagccacagacagcagctactacaccaaccagcagcaccctgctgggggcggcggcggcggcggcagcccctatgcccacatgggcagctaccagtaccaggccagcggcctgaacaacgtgccctacagcgccaagagcagctatgacctgggctacacagctgcctacaccagctatgccccctacggcaccagcagcagccctgccaacaatgaacctgagaaggaggacctggagcctgagatccgcatcgtgaatggcaagcccaagaaggtgaggaagcccaggaccatctacagcagcttccagctggccgccctgcagaggcgcttccagaagacccagtacctggccctgcctgagagagctgagctggccgccagcctgggcctgacccagacccaggtgaagatctggttccagaacagaagaagcaagttcaagaagatgtggaagtctggagagatccccagcgagcagcaccctggggccagcgccagccccccctgtgccagcccccctgtgtctgccccagcctcctgggactttggagtgccccagaggatggccggcggcggcggccctggcagcggcggcagcggggccggcagcagcggcagcagccccagcagcgctgccagcgccttcctgggcaactacccctggtaccaccagaccagcggcagcgccagccacctgcaggccacagcccccctgctgcaccccacccagaccccccagccccaccaccaccaccaccaccacggcggcggcggggcccctgtgtctgctggcaccatcttctag

SEQ ID NO: 170142 - DNA, 1359 bp, synthetic construct
  misc_feature 1..1359: note = Description of Artificial Sequence: Synthetic coding sequence
  source 1..1359: mol_type = other DNA
atgctgctgaggatgctgaggatgatcatcctgcccctggtggtgtgcagcctggtgtctggggccgccagcctggatgccagctgcctgggccgcctgggcggcattgctgtggcctacttcggcctgaccaccctgagcgccagcgccctggccgtggccctggccttcatcatcaagccaggcagcggggcccagaccctgcagagcagtgacctgggcctggaggacagcggccccccacctgtgcccaaggagaccgtggacagcttcctggacctggccaggaacctcttccccagcaacctggtggtggccgccttccgcacctacgccacagactacaaggtggtgacccagaacagcagcagtggaaatgtgacccatgagaagatccccatcggcacagaaattgagggcatgaacatcctgggcctggtgctgtttgccctggtgctgggcgtggccctgaagaagctgggctctgaaggagaagatctcatccgcttcttcaacagcctgaatgaggccaccatggtgctggtgtcctggatcatgtggtacgtgcctgtgggcatcatgttcctggtgggcagcaagatcgtggagatgaaggacatcatcgtgctggtgaccagcctgggcaagtacatctttgccagcatcctgggccacgtgatccacggcggcatcgtgctgcccctcatctactttgtgttcaccaggaagaaccccttccgcttcctgctgggcctgctggccccctttgccacagcctttgccacctgcagcagcagcgccaccctgcccagcatgatgaagtgcatcgaggagaacaacggggtggacaagaggatcagccgcttcatcctgcccatcggggccaccgtgaacatggatggagctgccatcttccagtgtgtggccgctgtgttcatcgcccagctgaacaacgtggagctgaatgccggccagatcttcaccatcctggtgacagccacagccagctctgtgggcgctgctggggtgcctgctggaggagtgctgaccatcgccatcatcctggaggccatcggcctgcccacccatgacctgcccctcatcctggccgtggactggatcgtggacaggaccaccaccgtggtgaatgtggagggagatgccctgggcgccggcatcctgcaccacctgaaccagaaggccaccaagaagggggagcaggagctggccgaggtgaaggtggaggccatccccaactgcaagtctgaggaggagaccagccccctggtgacccaccagaacccagctggccctgtggccagcgcccctgagctggagagcaaggagagcgtgctgtag

SEQ ID NO: 170143 - DNA, 705 bp, synthetic construct
  misc_feature 1..705: note = Description of Artificial Sequence: Synthetic coding sequence
  source 1..705: mol_type = other DNA
atgaacatcctgggcctggtgctgtttgccctggtgctgggcgtggccctgaagaagctgggctctgaaggagaagatctcatccgcttcttcaacagcctgaatgaggccaccatggtgctggtgtcctggatcatgtgcagcgccaccctgcccagcatgatgaagtgcatcgaggagaacaacggggtggacaagaggatcagccgcttcatcctgcccatcggggccaccgtgaacatggatggagctgccatcttccagtgtgtggccgctgtgttcatcgcccagctgaacaacgtggagctgaatgccggccagatcttcaccatcctggtgacagccacagccagctctgtgggcgctgctggggtgcctgctggaggagtgctgaccatcgccatcatcctggaggccatcggcctgcccacccatgacctgcccctcatcctggccgtggactggatcgtggacaggaccaccaccgtggtgaatgtggagggagatgccctgggcgccggcatcctgcaccacctgaaccagaaggccaccaagaagggggagcaggagctggccgaggtgaaggtggaggccatccccaactgcaagtctgaggaggagaccagccccctggtgacccaccagaacccagctggccctgtggccagcgcccctgagctggagagcaaggagagcgtgctgtag

SEQ ID NO: 170144 - DNA, 1575 bp, synthetic construct
  misc_feature 1..1575: note = Description of Artificial Sequence: Synthetic coding sequence
  source 1..1575: mol_type = other DNA
atgggcaagccagccaggaagggctgtgagtggaagcgcttcctgaagaacaactgggtgctgctgagcacagtggccgctgtggtgctgggcatcaccaccggggtgctggtgcgggagcacagcaacctgagcaccctggagaagttctactttgccttccctggagagatcctgatgaggatgctgaagctgatcatcctgcccctcatcatcagctccatgatcactggagtggccgccctggacagcaatgtgtctgggaagattggcctgcgggctgtggtgtactacttctgcaccaccctgattgctgtgatcctgggcatcgtgctggtggtgtccatcaagccaggagtgacccagaaggtgggggagatcgccaggacaggcagcaccccagaggtgtccacagtggatgccatgctggacctgatccggaacatgtttcctgagaacctggtgcaggcctgcttccagcagtacaagaccaagcgggaggaggtgaagcccccaagtgaccctgagatgaacatgacagaggagagcttcaccgctgtgatgaccacagccatcagcaagaacaagaccaaggagtacaagatcgtgggcatgtacagtgatggcatcaacgtgctgggcctcatcgtgttctgcctggtgtttggcctggtgattggcaagatgggagagaagggccagatcctggtggacttcttcaatgccctgagtgatgccaccatgaagatcgtgcagatcatcatgtgctacatgcccctgggcatcctcttcctgattgctgggaagatcatcgaggtggaggactgggagatcttcaggaagctgggcctgtacatggccaccgtgctgaccggcctggccatccacagcatcgtcatcctgcccctcatctacttcatcgtggtgaggaagaaccccttccgctttgccatgggcatggcccaggccctgctgacagccctgatgatcagcagcagcagcgccaccctgcctgtgaccttccgctgtgccgaggagaacaaccaggtggacaagaggatcaccaggtttgtgctgcctgtgggcgccaccatcaacatggatggaacagccctgtatgaagctgtggccgctgtgttcatcgcccagctgaatgacctggacctgggcatcggccagatcatcaccatcagcatcacagccaccagcgccagcatcggggctgctggggtgccccaggccggcctggtgaccatggtgattgtgctgtctgctgtgggcctgcctgcagaagatgtgaccctcatcatcgctgtggactggctgctggaccgcttccgcaccatggtgaatgtgctgggagatgcctttggaactggaattgtggagaagctgagcaagaaggagctggagcagatggatgtgtcctctgaggtgaacatcgtgaacccctttgccctggagagcaccatcctggacaatgaagattctgacaccaagaagagctatgtgaatggaggctttgctgtggacaagagtgacaccatctccttcacccagaccagccagttctag

SEQ ID NO: 170145 - DNA, 729 bp, synthetic construct
  misc_feature 1..729: note = Description of Artificial Sequence: Synthetic coding sequence
  source 1..729: mol_type = other DNA
tgattcttcaatgccctgagtgatgccaccatgaagatcgtgcagatcatcatgtgctacatgcccctgggcatcctcttcctgattgctgggaagatcatcgaggtggaggactgggagatcttcaggaagctgggcctgtacatggccaccgtgctgaccggcctggccatccacagcatcgtcatcctgcccctcatctacttcatcgtggtgaggaagaaccccttccgctttgccatgggcatggcccaggccctgctgacagccctgatgatcagcagcagcagcgccaccctgcctgtgaccttccgctgtgccgaggagaacaaccaggtggacaagaggatcaccaggtttgtgctgcctgtgggcgccaccatcaacatggatggaacagccctgtatgaggccgtggccgctgtgttcatcgcccagctgaatgacctggacctgggcatcggccagatcatcaccatccgggaccgcttccgcaccatggtgaatgtgctgggagatgcctttggaactggaattgtggagaagctgagcaagaaggagctggagcagatggatgtgtcctctgaggtgaacatcgtgaacccctttgccctggagagcaccatcctggacaatgaagattctgacaccaagaagagctatgtgaatggaggctttgctgtggacaagagtgacaccatctccttcacccagaccagccagttctag

SEQ ID NO: 170146 - DNA, 1647 bp, synthetic construct
  misc_feature 1..1647: note = Description of Artificial Sequence: Synthetic coding sequence
  source 1..1647: mol_type = other DNA
gagacccctgtgctgcccatcatggtggccgaccccccccgggacagcaagggcctggccgctgctgagcccacagccaatggaggcctggccctggccagcattgaggaccagggcgctgctgctgggggctactgcggcagccgggaccaggtgcggcgctgcctgcgggccaacctgctggtgctgctgactgtggtggccgtggtggccggcgtggccctgggcctgggcgtgtctggggccggcggggccctggccctgggccctgagcggctgagcgcctttgtgtttcctggagagctgctgctgcggctgctgaggatgatcatcctgcccctggtggtgtgcagcctcatcggcggggccgccagcctggaccccggggccctgggccgcctgggcgcctgggccctgctcttcttcctggtgaccaccctgctggccagcgccctgggcgtgggcctggccctggccctgcagcccggggccgccagcgctgccatcaatgcctctgtgggcgccgccggcagcgcagaaaatgcccccagcaaggaggtgctggacagcttcctggacctggccaggaacatcttccccagcaacctggtgtctgctgccttccgcagctacagcaccacctatgaggagaggaacatcaccggcaccagggtgaaggtgcctgtgggccaggaggtggagggcatgaacatcctgggcctggtggtgtttgccatcgtgtttggagtggccctgaggaagctgggccctgagggggagctgctgatccgcttcttcaacagcttcaatgaggccaccatggtgctggtgtcctggatcatgtggtacgcccctgtgggcatcatgttcctggtggccggcaagatcgtggagatggaggatgtgggcctgctgtttgcccggctgggcaagtacatcctgtgctgcctgctgggccacgccatccacggcctgctggtgctgcccctcatctacttcctgttcaccaggaagaacccctaccgcttcctgtggggcatcgtgacccccctggccacagccttcggcaccagcagcagcagcgccaccctgcccctgatgatgaagtgtgtggaggagaacaatggagtggccaagcacatcagccgcttcatcctgcccatcggggccaccgtgaacatggatggagctgccctcttccagtgtgtggccgctgtgttcatcgcccagctgagccagcagagcctggactttgtgaagatcatcaccatcctggtgacagccacagccagctctgtgggcgccgccggcatcccagctgggggcgtgctgaccctggccatcatcctggaggccgtgaacctgcctgtggaccacatcagcctcatcctggccgtggactggctggtggacaggagctgcaccgtgctgaatgtggagggagatgccctgggcgccggcctgctgcagaactacgtggacagaacagagagccgcagcacagagcctgagctgatccaggtgaagtctgagctgcccctggaccccctgcctgtgcccacagaggagggcaaccccctgctgaagcactaccggggccctgctggagatgccaccgtggccagcgagaaggagagcgtgatgtag

SEQ ID NO: 170147 - DNA, 942 bp, synthetic construct
  misc_feature 1..942: note = Description of Artificial Sequence: Synthetic coding sequence
  source 1..942: mol_type = other DNA
atgaacatcctgggcctggtggtgtttgccatcgtgtttggagtggccctgaggaagctgggccctgagggggagctgctgatccgcttcttcaacagcttcaatgaggccaccatggtgctggtgtcctggatcatgtggtacgcccctgtgggcatcatgttcctggtggccggcaagatcgtggagatggaggatgtgggcctgctgtttgcccggctgggcaagtacatcctgtgctgcctgctgggccacgccatccacggcctgctggtgctgcccctcatctacttcctgttcaccaggaagaacccctaccgcttcctgtggggcatcgtgacccccctggccacagccttcggcaccagcagcagcagcgccaccctgcccctgatgatgaagtgtgtggaggagaacaacggggtggccaagcacatcagccgcttcatcctgcccatcggggccaccgtgaacatggatggagctgccctcttccagtgtgtggccgctgtgttcatcgcccagctgagccagcagagcctggactttgtgaagatcatcaccatcctggtgacagccacagccagctctgtgggcgctgctggcatcccagctggaggagtgctgaccctggccatcatcctggaggccgtgaacctgcctgtggaccacatcagcctcatcctggccgtggactggctggtggacaggagctgcaccgtgctgaatgtggagggagatgccctgggcgccggcctgctgcagaactacgtggacagaacagagagccgcagcacagagcctgagctgatccaggtgaagtctgagctgcccctggaccccctgcctgtgcccacagaggagggcaaccccctgctgaagcactaccggggccctgctggagatgccaccgtggccagcgagaaggagagcgtgatgtag

SEQ ID NO: 170148 - DNA, 1020 bp, synthetic construct
  misc_feature 1..1020: note = Description of Artificial Sequence: Synthetic coding sequence
  source 1..1020: mol_type = other DNA
atgtacagcaccacctatgaggagaggaacatcaccggcaccagggtgaaggtgcctgtgggccaggaggtggagggcatgaacatcctgggcctggtggtgtttgccatcgtgtttggagtggccctgaggaagctgggccctgagggggagctgctgatccgcttcttcaacagcttcaatgaggccaccatggtgctggtgtcctggatcatgtggtacgcccctgtgggcatcatgttcctggtggccggcaagatcgtggagatggaggatgtgggcctgctgtttgcccggctgggcaagtacatcctgtgctgcctgctgggccacgccatccacggcctgctggtgctgcccctcatctacttcctgttcaccaggaagaacccctaccgcttcctgtggggcatcgtgacccccctggccacagccttcggcaccagcagcagcagcgccaccctgcccctgatgatgaagtgtgtggaggagaacaacggggtggccaagcacatcagccgcttcatcctgcccatcggggccaccgtgaacatggatggagctgccctcttccagtgtgtggccgctgtgttcatcgcccagctgagccagcagagcctggactttgtgaagatcatcaccatcctggtgacagccacagccagctctgtgggcgctgctggcatcccagctggaggagtgctgaccctggccatcatcctggaggccgtgaacctgcctgtggaccacatcagcctcatcctggccgtggactggctggtggacaggagctgcaccgtgctgaatgtggagggagatgccctgggcgccggcctgctgcagaactacgtggacagaacagagagccgcagcacagagcctgagctgatccaggtgaagtctgagctgcccctggaccccctgcctgtgcccacagaggagggcaaccccctgctgaagcactaccggggccctgctggagatgccaccgtggccagcgagaaggagagcgtgatgtag

SEQ ID NO: 170149 - DNA, 1626 bp, synthetic construct
  misc_feature 1..1626: note = Description of Artificial Sequence: Synthetic coding sequence
  source 1..1626: mol_type = other DNA
atggtggccgaccccccccgggacagcaagggcctggccgctgctgagcccacagccaacggcggcctggccctggccagcattgaggaccagggcgctgctgctgggggctactgcggcagccgggaccaggtgcggcgctgcctgcgggccaacctgctggtgctgctgactgtggtggccgtggtggccggcgtggccctgggcctgggcgtgtctggagctggaggagccctggccctgggccctgagcggctgagcgcctttgtgtttcctggagagctgctgctgcggctgctgaggatgatcatcctgcccctggtggtgtgcagcctgattggaggagctgccagcctggaccccggggccctgggccgcctgggcgcctgggccctgctcttcttcctggtgaccaccctgctggccagcgccctgggcgtgggcctggccctggccctgcagcctggagctgccagcgctgccatcaatgcctctgtgggcgctgctggcagcgcagaaaatgcccccagcaaggaggtgctggacagcttcctggacctggccaggaacatcttccccagcaacctggtgtctgctgccttccgcagctacagcaccacctatgaggagaggaacatcaccggcaccagggtgaaggtgcctgtgggccaggaggtggagggcatgaacatcctgggcctggtggtgtttgccatcgtgtttggagtggccctgaggaagctgggccctgagggggagctgctgatccgcttcttcaacagcttcaatgaggccaccatggtgctggtgtcctggatcatgtggtacgcccctgtgggcatcatgttcctggtggccggcaagatcgtggagatggaggatgtgggcctgctgtttgcccggctgggcaagtacatcctgtgctgcctgctgggccacgccatccacggcctgctggtgctgcccctcatctacttcctgttcaccaggaagaacccctaccgcttcctgtggggcatcgtgacccccctggccacagccttcggcaccagcagcagcagcgccaccctgcccctgatgatgaagtgtgtggaggagaacaacggggtggccaagcacatcagccgcttcatcctgcccatcggggccaccgtgaacatggatggagctgccctcttccagtgtgtggccgctgtgttcatcgcccagctgagccagcagagcctggactttgtgaagatcatcaccatcctggtgacagccacagccagctctgtgggcgctgctggcatcccagctggaggagtgctgaccctggccatcatcctggaggccgtgaacctgcctgtggaccacatcagcctcatcctggccgtggactggctggtggacaggagctgcaccgtgctgaatgtggagggagatgccctgggcgccggcctgctgcagaactacgtggacagaacagagagccgcagcacagagcctgagctgatccaggtgaagtctgagctgcccctggaccccctgcctgtgcccacagaggagggcaaccccctgctgaagcactaccggggccctgctggagatgccaccgtggccagcgagaaggagagcgtgatgtag

SEQ ID NO: 170150 - DNA, 1308 bp, synthetic construct
  misc_feature 1..1308: note = Description of Artificial Sequence: Synthetic coding sequence
  source 1..1308: mol_type = other DNA
atggccgagagcagcagcgagagtgaccacttccgctgccgggaccggctgagcccctgggccgcccggagcacccaccggggcaccaggagcctgcccaccgtggaggtgacagagaaggtgaacaccatcaccagcaccctgcaggacaccagcaggaacctgcggcaggtggaccagatgctgggccgctaccgggagtacagcaatggccaggccggggccatcgagcacctgaaggagagcctggagcagagcattgaccagctgcggagccagaggctgctgagaaattctgggggccgcagcatctctgtgaccagcctgagcgccagtgacctggatggcggcaccggcagcgagctgcaccacttcccccccaccagccccctgaaggactatggagacccccagggcatcaagaggatgaggagcaggactggagtgcgctttgtgcaggagacagatgacatgacccagctgcacggcttccaccagagcctgcgggacctgagcagcgagcagatccggctgggagatgacttcaaccgggagctgagccgccgcagcagaagtgatgctgagaccaagagggccctggaggagctgacagagaagctgaatgaggcccagaagcaggaggtggtgtctgacagagtggagcggcggctgcaggagctggagcgggagatgaggacagagcgggagctggtggagcggcggcaggaccagctgggcctgatgagcctgcagctgcaggaggccctgaagaagcaggaggccaaggcagatgagcacgagggcgccatcaagaacaagctgcggcagacagaaacagagaagaaccagctggagcaggagctggagctgagccggcggctgctgaaccagagcgagggcagccgggagaccctgctgcaccaggtggaggagctgcggacccagctgaccaaggccgagggggacaggaagggcctgcagcaccaggtgtcccagatcagcaagcagcagagcaactaccaggatgagcagggcgaggactggaggttcagaagaggagtggagcgggagaagcaggacctggagaagcagatgtctgacctgcgggtgcagctgaacttcagcgccatggccagcgagctggaggaggtgaagcgctgcatggagaggaaggacaaggagaaggcccacctggccagccaggtggagcacatcaacaggaagtgcctgctgaacctggtgcaggacctggactgcaaggacaatgagatcctgacctacagcctgcagagccccctgcacgtgtag

SEQ ID NO: 170151 - DNA, 1047 bp, synthetic construct
  misc_feature 1..1047: note = Description of Artificial Sequence: Synthetic coding sequence
  source 1..1047: mol_type = other DNA
atgaatgaccccaacagctgtgtggacaatgccaccgtgtgcagcggggccagctgtgtggtgcctgagagcaacttcaacaacatcctgtctgtggtgctgagcacagtgctgaccatcctgctggccctggtgatgttctccatgggctgcaatgtggagatcaagaagttcctgggccacatcaagaggccctggggcatctgtgtgggcttcctgtgccagtttggcatcatgcccctgaccggcttcatcctgtctgtggcctttgacatcctgcccctgcaggccgtggtggtgctgatcatcggctgctgccctgggggcacagccagcaacatcctggcctactgggtggatggagacatggacctgtctgtgtccatgaccacctgcagcaccctgctggccctgggcatgatgcccctgtgcctgctgatctacaccaagatgtgggtggacagcggcagcatcgtcatcccctatgacaacatcggcaccagcctggtgtccctggtggtgcctgtgtccatcggcatgtttgtgaaccacaagtggccccagaaggccaagatcatcctgaagattggcagcattgctggggccatcctgattgtgctgattgctgtggtgggcggcatcctgtaccagagcgcctggatcatcgcccccaagctgtggatcatcggcaccatcttccctgtggccggctacagcctgggcttcctgctggccagaattgctggcctgccctggtaccgctgcaggacagtggcctttgagaccggcatgcagaacacccagctgtgcagcaccatcgtgcagctgtccttcaccccagaggagctgaatgtggtgttcaccttccccctcatctacagcatcttccagctggcctttgctgccatcttcctgggcttctacgtggcctacaagaagtgccacggcaagaacaaggccgagatccctgagagcaaagaaaatggaacagagcctgagagcagcttctacaaggccaacggcggcttccagccagatgagaagtag

SEQ ID NO: 170152 - DNA, 1434 bp, synthetic construct
  misc_feature 1..1434: note = Description of Artificial Sequence: Synthetic coding sequence
  source 1..1434: mol_type = other DNA
atggtgctgatgcaggacaagggcagcagccagcagtggccaggcctgggcggggagggcggcggcaccggccccctgtccatgctgcgggccgccctgctgctgatcagcctgccctggggcgcccagggcacagccagcaccagcctgagcacagctgggggccacacagtgcccccaactggaggccgctacctgagcattggagatggctctgtgatggagtttgagttccctgaggacagcgagggcatcatcgtcatcagcagccagtacccaggccaggccaacagaacagcccctggccccatgctgcgggtgaccagcctggacacagaggtgctgaccatcaagaatgtgtctgccatcacctggggcggcggcggcggctttgtggtgtccatccacagcggcctggccggcctggcccccctgcacatccagctggtggatgcccacgaggccccacccaccctcatcgaggagcggcgggacttctgcatcaaggtgtccccagctgaggacaccccagccaccctgtctgctgacctggcccacttcagcgagaaccccatcctgtacctgctgctgcccctcatctttgtgaacaagtgcagctttggctgcaaggtggagctggaggtgctgaagggcctgatgcagagcccccagcccatgctgctgggcctgctgggccagttcctggtgatgcccctgtatgccttcctgatggccaaggtgttcatgctgcccaaggccctggccctgggcctcatcatcacctgcagcagccctgggggcggcggcagctacctgttcagcctgctgctgggcggagatgtgaccctggccatctccatgaccttcctgagcacagtggccgccaccggcttcctgcccctgagcagcgccatctacagccggctgctgagcatccacgagaccctgcacgtgcccatcagcaagatcctgggcaccctgctcttcatcgccatccccatcgctgtgggcgtgctgatcaagagcaagctgcccaagttcagccagctgctgctgcaggtggtgaagcccttctcctttgtgctgctgctgggcggcctcttcctggcctacaggatgggcgtcttcatcctggccggcatccggctgcccatcgtgctggtgggcatcaccgtgcccctggtgggcctgctggtgggctactgcctggccacctgcctgaagctgcctgtggcccagaggagaacagtgtccattgaggtgggcgtgcagaacagcctgctggccctggccatgctgcagctgagcctgcggcggctgcaggccgactatgccagccaggcccccttcatcgtggccctgagcggcaccagcgagatgctggccctggtgattggccacttcatctacagcagcctcttccctgtgccctag

SEQ ID NO: 170153 - DNA, 1347 bp, synthetic construct
  misc_feature 1..1347: note = Description of Artificial Sequence: Synthetic coding sequence
  source 1..1347: mol_type = other DNA
atggtgctgatgcaggacaagggcagcagccagcagtggccaggcctgggcggggagggcggcggcaccggccccctgtccatgctgcgggccgccctgctgctgatcagcctgccctggggcgcccagggcacagccagcaccagcctgagcacagctgggggccacacagtgcccccaactggaggccgctacctgagcattggagatggctctgtgatggagtttgagttccctgaggacagcgagggcatcatcgtcatcagcagccagtacccaggccaggccaacagaacagcccctggccccatgctgcgggtgaccagcctggacacagaggtgctgaccatcaagaacctggtggatgcccacgaggccccacccaccctgattgaggagcggcgggacttctgcatcaaggtgtccccagctgaggacaccccagccaccctgtctgctgacctggcccacttcagcgagaaccccatcctgtacctgctgctgcccctcatctttgtgaacaagtgcagctttggctgcaaggtggagctggaggtgctgaagggcctgatgcagagcccccagcccatgctgctgggcctgctgggccagttcctggtgatgcccctgtatgccttcctgatggccaaggtgttcatgctgcccaaggccctggccctgggcctcatcatcacctgcagcagccctgggggcggcggcagctacctgttcagcctgctgctgggcggagatgtgaccctggccatctccatgaccttcctgagcacagtggccgccaccggcttcctgcccctgagcagcgccatctacagccggctgctgagcatccacgagaccctgcacgtgcccatcagcaagatcctgggcaccctgctcttcatcgccatccccatcgctgtgggcgtgctgatcaagagcaagctgcccaagttcagccagctgctgctgcaggtggtgaagcccttctcctttgtgctgctgctgggcggcctcttcctggcctacaggatgggcgtcttcatcctggccggcatccggctgcccatcgtgctggtgggcatcaccgtgcccctggtgggcctgctggtgggctactgcctggccacctgcctgaagctgcctgtggcccagaggagaacagtgtccattgaggtgggcgtgcagaacagcctgctggccctggccatgctgcagctgagcctgcggcggctgcaggccgactatgccagccaggcccccttcatcgtggccctgagcggcaccagcgagatgctggccctggtgattggccacttcatctacagcagcctcttccctgtgccctag

SEQ ID NO: 170154 - DNA, 1599 bp, synthetic construct
  misc_feature 1..1599: note = Description of Artificial Sequence: Synthetic coding sequence
  source 1..1599: mol_type = other DNA
atggccggcccccggcccccaggggacagccctgccatcaaggaggacagcacaggcctgggccccacccatgagcccttcagcggccagcccaacagcaccagcggagatgtgctgctgagccggcggggccctggccacgccatccggcccccaggccgggccatggtgctgatgcaggacaagggcagcagccagcagtggccaggcctgggcggggagggcggcggcaccggccccctgtccatgctgcgggccgccctgctgctgatcagcctgccctggggcgcccagggcacagccagcaccagcctgagcacagctgggggccacacagtgccccccaccggcggccgctacctgagcattggagatggctctgtgatggagtttgagttcccagaagattctgagggcatcatcgtcatcagcagccagtacccaggccaggccaacagaacagcccctggccccatgctgcgggtgaccagcctggacacagaggtgctgaccatcaagaatgtgtctgccatcacctggggcggcggcggcggctttgtggtgtccatccacagcggcctggccggcctggcccccctgcacatccagctggtggatgcccacgaggccccacccaccctgattgaggagcggcgggacttctgcatcaaggtgtccccagctgaggacaccccagccaccctgtctgctgacctggcccacttcagcgagaaccccatcctgtacctgctgctgcccctcatctttgtgaacaagtgcagctttggctgcaaggtggagctggaggtgctgaagggcctgatgcagagcccccagcccatgctgctgggcctgctgggccagttcctggtgatgcccctgtatgccttcctgatggccaaggtgttcatgctgcccaaggccctggccctgggcctcatcatcacctgcagcagccctgggggcggcggcagctacctgttcagcctgctgctgggcggagatgtgaccctggccatctccatgaccttcctgagcacagtggccgccaccggcttcctgcccctgagcagcgccatctacagccggctgctgagcatccacgagaccctgcacgtgcccatcagcaagatcctgggcaccctgctcttcatcgccatccccatcgctgtgggcgtgctgatcaagagcaagctgcccaagttcagccagctgctgctgcaggtggtgaagcccttctcctttgtgctgctgctgggcggcctcttcctggcctacaggatgggcgtcttcatcctggccggcatccggctgcccatcgtgctggtgggcatcaccgtgcccctggtgggcctgctggtgggctactgcctggccacctgcctgaagctgcctgtggcccagaggagaacagtgtccattgaggtgggcgtgcagaacagcctgctggccctggccatgctgcagctgagcctgcggcggctgcaggccgactatgccagccaggcccccttcatcgtggccctgagcggcaccagcgagatgctggccctggtgattggccacttcatctacagcagcctcttccctgtgccctag

SEQ ID NO: 170155 - DNA, 1434 bp, synthetic construct; identical to SEQ ID NO: 170152
  misc_feature 1..1434: note = Description of Artificial Sequence: Synthetic coding sequence
  source 1..1434: mol_type = other DNA

SEQ ID NO: 170156 - DNA, 657 bp, synthetic construct
  misc_feature 1..657: note = Description of Artificial Sequence: Synthetic coding sequence
  source 1..657: mol_type = other DNA
atggtgctgatgcaggacaagggcagcagccagcagtggccaggcctgggcggggagggcggcggcaccggccccctgtccatgctgcgggccgccctgctgctgatcagcctgccctggggcgcccagggcacagccagcaccagcctgagcacagctgggggccacacagtgcccccaactggaggccgctacctgagcattggagatggctctgtgatggagtttgagttccctgaggacagcgagggcatcatcgtcatcagcagccagtacccaggccaggccaacagaacagcccctggccccatgctgcgggtgaccagcctggacacagaggtgctgaccatcaagaatgtgtctgccatcacctggggcggcggcggcggctttgtggtgtccatccacagcggcctggccggcctggcccccctgcacatccagctggtggatgcccacgaggccccacccaccctcatcgaggagcggcgggacttctgcatcaaggtgtccccagctgaggacaccccagccaccctgtctgctgacctggcccacttcagcgagaaccccatcctgtacctgctgctgcccctcatctttgtgaacaagtgcagctttggctgcaaggtggagctggaggtgctgaagggctag

SEQ ID NO: 170157 - DNA, 1314 bp, synthetic construct
  misc_feature 1..1314: note = Description of Artificial Sequence: Synthetic coding sequence
  source 1..1314: mol_type = other DNA
atggatggaaatgacaacgtgaccctgctgtttgcccccctgctgcgggacaactacaccctggccccaaatgccagcagcctgggccctggaacagacctggccctggccccagccagcagcgctggccctggccctggcctgagcctgggccctggccccagctttggcttcagccctggccccacccccaccccagagcccaccaccagcggcctggccggcggggccgccagccacggccccagccccttcccccggccctgggccccccacgccctgcccttctgggacacccccctgaaccacggcctgaatgtgtttgtgggcgccgccctgtgcatcaccatgctgggcctgggctgcaccgtggatgtgaaccactttggagcccacgtgcggcggcctgtgggcgccctgctggccgccctgtgccagtttggcctgctgcccctgctggccttcctgctggccctggccttcaagctggatgaggtggccgctgtggccgtgctgctgtgtggctgctgccctgggggcaacctgagcaacctgatgagcctgctggtggatggagacatgaacctgagcatcatcatgaccatcagcagcaccctgctggccctggtgctgatgcccctgtgcctgtggatctacagctgggcctggatcaacacccccatcgtgcagctgctgcccctgggcaccgtgaccctgaccctgtgcagcaccctcatccccatcggcctgggcgtcttcatccgctacaagtacagccgggtggccgactacatcgtgaaggtgtccctgtggagcctgctggtgaccctggtggtgctcttcatcatgacaggcaccatgctgggccctgagctgctggccagcatcccagctgctgtgtatgtgattgccatcttcatgcccctggccggctacgccagcggctacggcctggccaccctcttccacctgccccccaactgcaagaggacagtgtgcctggagaccggcagccagaatgtgcagctgtgcacagccatcctgaagctggccttccccccccagttcatcggctccatgtacatgttccccctgctgtatgccctcttccagagcgctgaggccggcatctttgtgctgatctacaagatgtatggcagcgagatgctgcacaagagggaccccctggatgaagatgaggacacagacatctcctacaagaagctgaaggaggaggagatggctgacaccagctatggaacagtgaaggccgagaacatcatcatgatggagacagcccagaccagcctgtag

SEQ ID NO: 170158 - DNA, 1134 bp, synthetic construct
  misc_feature 1..1134: note = Description of Artificial Sequence: Synthetic coding sequence
  source 1..1134: mol_type = other DNA
atgagggccaactgcagcagcagcagcgcctgcccagccaacagcagcgaggaggagctgcctgtgggcctggaggtgcacggcaacctggagctggtgttcaccgtggtgtccacagtgatgatgggcctgctgatgttcagcctgggctgcagcgtggagatcaggaagctgtggagccacatcagaagaccctggggcattgctgtgggcctgctgtgccagtttggcctgatgcccttcaccgcctacctgctggccatctccttcagcctgaagcctgtgcaggccatcgctgtgctgatcatgggctgctgccctgggggcaccatcagcaacatcttcaccttctgggtggatggagacatggacctgagcatctccatgaccacctgcagcacagtggccgccctgggcatgatgcccctgtgcatctacctgtacacctggagctggagcctgcagcagaacctgaccatcccctaccagaacatcggcatcaccctggtgtgcctgaccatccctgtggccttcggcgtgtatgtgaactaccgctggcccaagcagagcaagatcatcctgaagatcggggctgtggtgggcggcgtgctgctgctggtggtggccgtggccggcgtggtgctggccaagggctcctggaacagcgacatcaccctgctgaccatctccttcatcttccccctcatcggccacgtgacaggcttcctgctggccctcttcacccaccagagctggcagcgctgcaggaccatcagcctggagaccggggcccagaacatccagatgtgcatcaccatgctgcagctgtccttcaccgctgagcacctggtgcagatgctgtccttccccctggcctacggcctcttccagctgattgatggcttcctgattgtggccgcctaccagacctacaagaggcggctgaagaacaagcacggcaagaagaacagcggctgcacagaggtgtgccacaccaggaagagcaccagcagccgggagaccaatgccttcctggaggtgaatgaggagggcgccatcaccccaggccccccaggccccatggactgccaccgggccctggagcctgtgggccacatcaccagctgtgagtag

SEQ ID NO: 170159 - DNA, 2184 bp, synthetic construct; identical to SEQ ID NO: 161162
  misc_feature 1..2184: note = Description of Artificial Sequence: Synthetic coding sequence
  source 1..2184: mol_type = other DNA

SEQ ID NO: 170160 - DNA, 492 bp, synthetic construct
  misc_feature 1..492: note = Description of Artificial Sequence: Synthetic coding sequence
  source 1..492: mol_type = other DNA
atgaccggggacaagggcccccagaggctgagcggcagcagctatggcagcatcagcagccccaccagccccaccagccctggcccccagcaggccccaccccgggagacctacctgtctgagaagatccccatcccagacaccaagccaggcaccttcagcctgaggaagctgtgggccttcaccggccctggcttcctgatgagcatcgccttcctggaccccggcaacatcgagagtgacctgcaggccggggctgtggccggcttcaagctgctgtgggtgctgctgtgggccaccgtgctgggcctgctgtgccagaggctggccgcccggctgggcgtggtgacaggcaaggacctgggggaggtgtgccacctgtactaccccaagtctgagagccgctctgtggcccagagcggcgtgcagtggtgtgatgtgagcagcctgcagcccctgcccccacgctgcccagcccccagcagcggctag

SEQ ID NO: 170161 - DNA, 1299 bp, synthetic construct
  misc_feature 1..1299: note = Description of Artificial Sequence: Synthetic coding sequence
  source 1..1299: mol_type = other DNA
atggtgcgctgccagctgacagccaccagcaccagccaggtgcccaggacagtgctgtggctgaccatcgagctggccatcgtgggcagtgacatgcaggaggtgattggaacagccatcgccttcaacctgctgtctgctggccgcatccccctgtggggcggcgtgctgatcaccatcgtggacaccttcttcttcctgttcctggacaactacggcctgaggaagctggaggccttcttcggcctgctgatcaccatcatggccctgaccttcggctatgaatatgtggtggcccggcctgagcagggcgccctgctgcggggcctcttcctgcccagctgccccggctgcggccaccctgagctgctgcaggccgtgggcatcgtgggcgccatcatcatgccccacaacatctacctgcacagcgccctggtgaagagccgggagattgaccgggccaggagagctgacatccgggaggccaacatgtacttcctgattgaggccaccatcgccctgtctgtgtccttcatcatcaacctgtttgtgatggctgtgtttggccaggccttctaccagaagaccaaccaggccgccttcaacatctgtgccaacagcagcctgcatgactatgccaagatcttccccatgaacaatgccaccgtggccgtggacatctaccagggcggcgtcatcctgggctgcctgtttggacctgctgccctgtacatctgggccatcggcctgctggccgccggccagagcagcaccatgacaggcacctacgccggccagtttgtgatggagggcttcctgcggctgcgctggagcagatttgcccgggtgctgctgaccaggagctgtgccatcctgcccaccgtgctggtggccgtgttccgggacctgcgggacctgagcggcctgaatgacctgctgaatgtgctgcagagcctgctgctgccctttgctgtgctgcccatcctgaccttcacctccatgcccaccctgatgcaggagtttgccaacggcctgctgaacaaggtggtgaccagcagcatcatggtgctggtgtgtgccatcaacctgtactttgtggtgtcctacctgcccagcctgccccacccagcctacttcggcctggccgccctgctggccgccgcctacctgggcctgagcacctacctggtgtggacctgctgcctggcccacggggccaccttcctggcccacagcagccaccaccacttcctgtatggcctgctggaggaggaccagaagggggagaccagcggctag

SEQ ID NO: 170162 - DNA, 3351 bp, synthetic construct
  misc_feature 1..3351: note = Description of Artificial Sequence: Synthetic coding sequence
  source 1..3351: mol_type = other DNA
atgctgaacaacctgacagactgtgaagatggagatggaggagccaaccctggagatggcaaccccaaggagagcagccccttcatcaacagcacagacacagagaagggcaaggagtatgatggcaagaacatggccctgtttgaggaggagatggacaccagccccatggtgagcagcctgctgagcggcctggccaactacaccaacctgccccagggcagccgggagcacgaggaggccgagaacaatgaaggaggcaagaagaagcctgtgcaggcccccaggatgggcaccttcatgggcgtgtacctgccctgcctgcagaacatctttggagtcatcctcttcctgcggctgacctgggtggtgggcattgctggcatcatggagagcttctgcatggtgttcatctgctgcagctgcaccatgctgacagccatctccatgtctgccatcgccaccaacggggtggtgcctgctgggggcagctactacatgatcagccgcagcctgggccctgagtttggaggagctgtgggcctgtgcttctacctgggcaccacctttgctggggccatgtacatcctgggcaccatcgagatcctgctggcctacctgtttcctgccatggccatcttcaaggcagaagatgccagcggggaggccgccgccatgctgaacaacatgagggtgtatggcacctgtgtgctgacctgcatggccaccgtggtgtttgtgggcgtgaagtatgtgaacaagtttgccctggtgttcctgggctgcgtcatcctgagcatcctggccatctatgctggggtcatcaagagcgcctttgatcctcccaacttccccatctgcctgctgggcaacagaaccctgagcagacatggctttgatgtgtgtgccaagctggcctgggagggcaatgagaccgtgaccacccggctgtggggcctcttctgcagcagccgcttcctgaatgccacctgtgatgagtacttcaccagaaataatgtgacagagatccagggcatccctggagctgccagcggcctcatcaaggagaacctgtggagcagctacctgaccaagggcgtcatcgtggagaggagcggcatgacctctgtgggcctggctgatggcacccccatcgacatggaccacccctacgtgttcagtgacatgaccagctacttcaccctgctggtgggcatctacttccccagcgtgacaggcatcatggccggcagcaacagaagtggggacctgagagatgcccagaagagcatccccaccggcaccatcctggccatcgccaccaccagcgctgtgtacatcagctctgtggtgctgtttggagcctgcattgaaggagtggtgctgcgggacaagtttggagaggccgtgaatggaaacctggtggtgggcaccctggcctggcccagcccctgggtgattgtgattggcagcttcttcagcacctgtggggccggcctgcagagcctgaccggggccccccggctgctgcaggccatcagcagagatggcatcgtgcccttcctgcaggtgtttggacatggcaaggccaatggagagcccacctgggccctgctgctgacagcctgcatctgtgaaattggcatcctgattgccagcctggatgaggtggcccccatcctgtccatgttcttcctgatgtgctacatgtttgtgaacctggcctgtgctgtgcagaccctgctgcggacccccaactggaggccccgcttccgctactaccactggaccctgtccttcctgggcatgagcctgtgcctggccctgatgttcatctgctcctggtactatgccctggtggccatgctgattgctggcctcatctacaagtacatcgagtacagaggagctgagaaggagtggggagatggcatccggggcctgagcctgtctgctgcccgctatgccctgctgcggctggaggagggccccccccacaccaagaactggaggccccagctgctggtgctggtgcgggtggaccaggaccagaatgtggtgcacccccagctgctgagcctgaccagccagctgaaggccggcaagggcctgaccatcgtgggctctgtgctggagggcaccttcctggagaaccacccccaggcccagagagctgaggagagcatccggcggctgatggaggccgagaaggtgaagggcttctgccaggtggtgatcagcagcaacctgagagatggagtgagccacctgatccagagcggcggcctgggcggcctgcagcacaacacagtgctggtgggctggcccaggaactggaggcagaaggaggaccaccagacctggaggaacttcatcgagctggtgcgggagaccacagctggccacctggccctgctggtgaccaagaatgtgtccatgtttcctggcaaccctgagcgcttcagcgagggcagcattgatgtgtggtggatcgtgcatgatggcggcatgctgatgctgctgcccttcctgctgcggcaccacaaggtgtggaggaagtgcaagatgaggatcttcaccgtggcccagatggatgacaacagcatccagatgaagaaggacctgaccaccttcctgtaccacctgcgcatcacagctgaggtggaggtggtggagatgcatgaaagtgacatcagcgcctacacctatgagaagaccctggtgatggagcagaggagccagatcctgaagcagatgcacctgaccaagaatgaaagagagcgggagatccagagcatcacagatgagagccggggcagcatccggaggaagaacccagccaacacccggctgcggctgaatgtgcctgaggagacagctggggacagcgaggagaagccagaggaggaggtgcagctgattcatgaccagagcgcccccagctgccccagcagcagccccagccctggagaggagcctgagggggagggggagacagatcctgagaaggtgcacctgacctggaccaaggacaagtctgtggccgagaagaacaagggccccagccctgtgagcagcgagggcatcaaggacttcttctccatgaagccagagtgggagaacctgaaccagagcaatgtgcggaggatgcacacagctgtgcggctgaatgaagtcatcgtgaagaagagcagagatgccaagctggtgctgctgaacatgcctggccccccaagaaacagaaatggagatgagaactacatggagttcctggaggtgctgacagagcacctggacagagtgatgctggtgcggggcggcggccgggaggtgatcaccatctacagctag

SEQ ID NO: 170163 - DNA, 858 bp, synthetic construct
  misc_feature 1..858: note = Description of Artificial Sequence: Synthetic coding sequence
  source 1..858: mol_type = other DNA
atgctgaacaacctgacagactgtgaagatggagatggaggagccaaccctggagatggcaaccccaaggagagcagccccttcatcaacagcacagacacagagaagggcaaggagtatgatggcaagaacatggccctgtttgaggaggagatggacaccagccccatggtgagcagcctgctgagcggcctggccaactacaccaacctgccccagggcagccgggagcacgaggaggccgagaacaatgaaggaggcaagaagaagcctgtgcaggcccccaggatgggcaccttcatgggcgtgtacctgccctgcctgcagaacatctttggagtcatcctcttcctgcggctgacctgggtggtgggcattgctggcatcatggagagcttctgcatggtgttcatctgctgcagctgcaccatgctgacagccatctccatgtctgccatcgccaccaacggggtggtgcctgctgggggcagctactacatgatcagccgcagcctgggccctgagtttggaggagctgtgggcctgtgcttctacctgggcaccacctttgctggggccatgtacatcctgggcaccatcgagatcctgctggcctacctgtttcctgccatggccatcttcaaggcagaagatgccagcggggaggccgccgccatgctgaacaacatgagggtgtatggcacctgtgtgctgacctgcatggccaccgtggtgtttgtgggcgtgaagtatgtgaacaagtttgccctggtgttcctgggctgcgtcatcctgagcatcctggccatctatgctggggtcatcaagagcgcctttgatcctcccaacttcccctag

SEQ ID NO: 170164 - DNA, 3420 bp, synthetic construct
  misc_feature 1..3420: note = Description of Artificial Sequence: Synthetic coding sequence
  source 1..3420: mol_type = other DNA
atgagccgccgcttcaccgtgaccagcctgcccccagctggccctgcccggagcccagaccctgagagccgccgccacagcgtggccgaccccaggcacctgcctggagaagatgtgaagggagatggcaaccccaaggagagcagccccttcatcaacagcacagacacagagaagggcaaggagtatgatggcaagaacatggccctgtttgaggaggagatggacaccagccccatggtgagcagcctgctgagcggcctggccaactacaccaacctgccccagggcagccgggagcacgaggaggctgaaaataatgaaggaggcaagaagaagcctgtgcaggcccccaggatgggcaccttcatgggcgtgtacctgccctgcctgcagaacatctttggagtcatcctcttcctgcggctgacctgggtggtgggcattgctggcatcatggagagcttctgcatggtgttcatctgctgcagctgcaccatgctgacagccatctccatgtctgccatcgccaccaatggagtggtgcctgctgggggcagctactacatgatcagccgcagcctgggccctgagtttggaggagctgtgggcctgtgcttctacctgggcaccacctttgctggggccatgtacatcctgggcaccatcgagatcctgctggcctacctgtttcctgccatggccatcttcaaggccgaggatgccagcggggaggccgccgccatgctgaacaacatgagggtgtatggcacctgtgtgctgacctgcatggccaccgtggtgtttgtgggcgtgaagtatgtgaacaagtttgccctggtgttcctgggctgtgtgatcctgagcatcctggccatctatgctggggtcatcaagagcgcctttgacccccccaacttccccatctgcctgctgggcaacagaaccctgagccgccacggctttgatgtgtgtgccaagctggcctgggagggcaatgaaacagtgaccacccggctgtggggcctcttctgcagcagccgcttcctgaatgccacctgtgatgagtacttcaccaggaacaacgtgacagagatccagggcatccctggggccgccagcggcctcatcaaggagaacctgtggagcagctacctgaccaagggcgtgattgtggagaggagcggcatgacctctgtgggcctggctgatggcacccccatcgacatggaccacccctacgtgttcagtgacatgaccagctacttcaccctgctggtgggcatctacttccccagcgtgacaggcatcatggccggcagcaacagaagtggggacctgagagatgcccagaagagcatccccaccggcaccatcctggccatcgccaccaccagcgctgtgtacatcagctctgtggtgctgtttggagcctgcatcgagggcgtggtgctgcgggacaagtttggagaggccgtgaatggaaacctggtggtgggcaccctggcctggcccagcccctgggtgattgtcatcggcagcttcttcagcacctgtggggccggcctgcagagcctgactggagccccccggctgctgcaggccatcagcagagatggcatcgtgcccttcctgcaggtgtttggccacggcaaggccaacggggagcccacctgggccctgctgctgacagcctgcatctgtgagatcggcatcctgattgccagcctggatgaggtggcccccatcctgtccatgttcttcctgatgtgctacatgtttgtgaacctggcctgtgctgtgcagaccctgctgcggacccccaactggaggccccgcttccgctactaccactggaccctgtccttcctgggcatgagcctgtgcctggccctgatgttcatctgctcctggtactatgccctggtggccatgctgattgctggcctcatctacaagtacatcgagtacagaggagctgagaaggagtggggagatggcatccggggcctgagcctgtctgctgcccgctatgccctgctgcggctggaggagggccccccccacaccaagaactggaggccccagctgctggtgctggtgcgggtggaccaggaccagaatgtggtgcacccccagctgctgagcctgaccagccagctgaaggccggcaagggcctgaccatcgtgggctctgtgctggagggcaccttcctggagaaccacccccaggcccagagagctgaggagagcatccggcggctgatggaggccgagaaggtgaagggcttctgccaggtggtgatcagcagcaacctgagagatggagtgagccacctgatccagagcggcggcctgggcggcctgcagcacaacacagtgctggtgggctggcccaggaactggaggcagaaggaggaccaccagacctggaggaacttcatcgagctggtgcgggagaccacagctggccacctggccctgctggtgaccaagaatgtgtccatgtttcctggcaaccctgagcgcttcagcgagggcagcattgatgtgtggtggatcgtgcatgatggcggcatgctgatgctgctgcccttcctgctgcggcaccacaaggtgtggaggaagtgcaagatgaggatcttcaccgtggcccagatggatgacaacagcatccagatgaagaaggacctgaccaccttcctgtaccacctgcgcatcacagctgaggtggaggtggtggagatgcatgaaagtgacatcagcgcctacacctatgagaagaccctggtgatggagcagaggagccagatcctgaagcagatgcacctgaccaagaatgaaagagagcgggagatccagagcatcacagatgagagccggggcagcatccggaggaagaacccagccaacacccggctgcggctgaatgtgcctgaggagacagctggggacagcgaggagaagccagaggaggaggtgcagctgattcatgaccagagcgcccccagctgccccagcagcagccccagccctggagaggagcctgagggggagggggagacagatcctgagaaggtgcacctgacctggaccaaggacaagtctgtggccgagaagaacaagggccccagccctgtgtcctctgagggcatcaaggacttcttctccatgaagccagagtgggagaacctgaaccagagcaatgtgcggaggatgcacacagctgtgcggctgaatgaggtgattgtgaagaagagcagagatgccaagctggtgctgctgaacatgcctggcccccccaggaacagaaatggagatgagaactacatggagttcctggaggtgctgacagagcacctggacagagtgatgctggtgcggggcggcggccgggaggtgatcaccatctacagctag

SEQ ID NO: 170165 - DNA, 561 bp, synthetic construct
  misc_feature 1..561: note = Description of Artificial Sequence: Synthetic coding sequence
  source 1..561: mol_type = other DNA
atgctgaacaacctgacagactgtgaagatggagatggaggagccaaccctggagatggcaaccccaaggagagcagccccttcatcaacagcacagacacagagaagggcaaggagtatgatggcaagaacatggccctgtttgaggaggagatggacaccagccccatggtgagcagcctgctgagcggcctggccaactacaccaacctgccccagggcagccgggagcacgaggaggccgagaacaatgaaggaggcaagaagaagcctgtgcaggcccccaggatgggcaccttcatgggcgtgtacctgccctgcctgcagaacatctttggagtcatcctcttcctgcggctgacctgggtggtgggcattgctggcatcatggagagcttctgcatggtgttcatctgctgcagctgcaccatgctgacagccatctccatgtctgccatcgccaccaacggggtggtgcctgctgggggcagctactacatgatcagccgcagcctggccatggcccggcccatggagagccggcccggcccctgcagctag

SEQ ID NO: 170166 - DNA, 3258 bp, synthetic construct
  misc_feature 1..3258: note = Description of Artificial Sequence: Synthetic coding sequence
  source 1..3258: mol_type = other DNA
atgccccacttcaccgtggtgcctgtggatggccccaggagaggagactatgacaacctggagggcctgtcctgggtggactatggagagcgggcagagctggatgacagtgatggccacggcaaccaccgggagagcagccccttcctgagccccctggaggccagccggggcatcgactactatgacaggaacctggccctgtttgaggaggagctggacatccggcccaaggtgagcagcctgctgggcaagctggtgtcctacaccaacctgacccagggcgccaaggagcacgaggaggccgagagcggggagggcacccggcggcgggctgctgaggcccccagcatgggcaccctgatgggcgtgtacctgccctgcctgcagaacatctttggagtcatcctcttcctgcggctgacctggatggtgggcacagctggggtgctgcaggccctgctgattgtgctgatctgctgctgctgcaccctgctgacagccatctccatgtctgccatcgccaccaatggagtggtgcctgctgggggcagctacttcatgatcagccgcagcctgggccctgagtttggaggagctgtgggcctgtgcttctacctgggcaccacctttgctgctgccatgtacatcctgggcgccatcgagatcctgctgacctacatcgcccccccagctgccatcttctaccccagcggggcccatgacaccagcaatgccaccctgaacaacatgagggtgtatggcaccatcttcctgaccttcatgaccctggtggtgtttgtgggcgtgaagtatgtgaacaagtttgccagcctcttcctggcctgtgtgatcatcagcatcctgagcatctatgccggcggcatcaagagcatctttgacccccctgtgtttcctgtgtgcatgctgggcaacagaaccctgagccgggaccagtttgacatctgtgccaagacagctgtggtggacaatgaaacagtggccacccagctgtggagcttcttctgccacagccccaacctgaccacagacagctgtgacccctacttcatgctgaacaacgtgacagagatccctggcatccctggagctgctgctggggtgctgcaggagaacctgtggagcgcctacctggagaagggggacatcgtggagaagcacggcctgcccagcgcagatgcccccagcctgaaggagagcctgcccctgtatgtggtggccgacatcgccaccagcttcaccgtgctggtgggcatcttcttccccagcgtgacaggcatcatggccggcagcaacagaagtggggacctgagagatgcccagaagagcatccctgtgggcaccatcctggccatcatcaccaccagcctggtgtacttcagctctgtggtgctgtttggagcctgcattgaaggagtggtgctgcgggacaagtatggagatggagtgtccaggaacctggtggtgggcaccctggcctggcccagcccctgggtgattgtgattggcagcttcttcagcacctgtggggccggcctgcagagcctgaccggggccccccggctgctgcaggccatcgccaaggacaacatcatccccttcctgcgggtgtttggacatggcaaggtgaatggagagcccacctgggccctgctgctgacagccctgattgctgagctgggcatcctgattgccagcctggacatggtggcccccatcctgtccatgttcttcctgatgtgctacctgtttgtgaacctggcctgtgctgtgcagaccctgctgcggacccccaactggaggccccgcttcaagtactaccactgggccctgtccttcctgggcatgagcctgtgcctggccctgatgtttgtgtcctcctggtactatgccctggtggccatgctgattgctggcatgatctacaagtacatcgagtaccagggcgctgagaaggagtggggagatggcatccggggcctgagcctgtctgctgcccgctatgccctgctgcggctggaggagggccccccccacaccaagaactggaggccccagctgctggtgctgctgaagctggatgaggacctgcacgtgaagtacccccggctgctgacctttgccagccagctgaaggccggcaagggcctgaccatcgtgggcagcgtcatccagggcagcttcctggagagctatggagaggcccaggccgctgagcagaccatcaagaacatgatggagattgagaaggtgaagggcttctgccaggtggtggtggccagcaaggtgcgggagggcctggcccacctgatccagagctgtggcctgggcggcatgaggcacaacagcgtggtgctgggctggccctacggctggaggcagagcgaggacccccgggcctggaagaccttcatcgacacagtgcgctgcaccacagctgcccacctggccctgctggtgcccaagaacatcgccttctaccccagcaaccacgagcgctacctggagggccacattgatgtgtggtggatcgtgcatgatggcggcatgctgatgctgctgcccttcctgctgcggcagcacaaggtgtggaggaaatgtaggatgaggatcttcaccgtggcccagatggatgacaacagcatccagatgaagaaggacctggccgtgttcctgtaccacctgcggctggaggccgaggtggaggtggtggagatgcacaacagcgacatcagcgcctacacctatgaaagaaccctgatgatggagcagaggagccagatgctgcggcagatgaggctgaccaagacagagcgggagcgggaggcccagctggtgaaggacagacacagcgccctgcggctggagagcctgtacagtgatgaggaggatgaatctgctgtgggcgctgacaagatccagatgacctggacccgggacaagtacatgacagagacctgggaccccagccacgccccagacaacttccgggagctggtgcacatcaagccagaccagagcaatgtgcggaggatgcacacagctgtgaagctgaatgaggtgattgtgaccaggagccatgatgcccggctggtgctgctgaacatgcctggcccccccaggaacagtgaaggagatgagaactacatggagttcctggaggtgctgacagagggcctggagcgggtgctgctggtgcggggcggcggccgggaggtgatcaccatctacagctag

SEQ ID NO: 170167 - DNA, 2343 bp, synthetic construct
  misc_feature 1..2343: note = Description of Artificial Sequence: Synthetic coding sequence
  source 1..2343: mol_type = other DNA
atgccccacttcaccgtggtgcctgtggatggccccaggagaggagactatgacaacctggagggcctgtcctgggtggactatggagagcgggcagagctggatgacagtgatggccacggcaaccaccgggagagcagccccttcctgagccccctggaggccagccggggcatcgactactatgacaggaacctggccctgtttgaggaggagctggacatccggcccaaggtgagcagcctgctgggcaagctggtgtcctacaccaacctgacccagggcgccaaggagcacgaggaggccgagagcggggagggcacccggcggcgggctgctgaggcccccagcatgggcaccctgatgggcgtgtacctgccctgcctgcagaacatctttggagtcatcctcttcctgcggctgacctggatggtgggcacagctggggtgctgcaggccctgctgattgtgctgatctgctgctgctgcaccctgctgacagccatctccatgtctgccatcgccaccaatggagtggtgcctgctgggggcagctacttcatgatcagccgcagcctgggccctgagtttggaggagctgtgggcctgtgcttctacctgggcaccacctttgctgctgccatgtacatcctgggcgccatcgagatcctgctgacctacatcgcccccccagctgccatcttctaccccagcggggcccatgacaccagcaatgccaccctgaacaacatgagggtgtatggcaccatcttcctgaccttcatgaccctggtggtgtttgtgggcgtgaagtatgtgaacaagtttgccagcctcttcctggcctgtgtgatcatcagcatcctgagcatctatgccggcggcatcaagagcatctttgacccccctgtgtttcctgtgtgcatgctgggcaacagaaccctgagccgggaccagtttgacatctgtgccaagacagctgtggtggacaatgaaacagtggccacccagctgtggagcttcttctgccacagccccaacctgaccacagacagctgtgacccctacttcatgctgaacaacgtgacagagatccctggcatccctggagctgctgctggggtgctgcaggagaacctgtggagcgcctacctggagaagggggacatcgtggagaagcacggcctgcccagcgcagatgcccccagcctgaaggagagcctgcccctgtatgtggtggccgacatcgccaccagcttcaccgtgctggtgggcatcttcttccccagcgtgacaggcatcatggccggcagcaacagaagtggggacctgagagatgcccagaagagcatccctgtgggcaccatcctggccatcatcaccaccagcctggtgtacttcagctctgtggtgctgtttggagcctgcattgaaggagtggtgctgcgggacaagtatggagatggagtgtccaggaacctggtggtgggcaccctggcctggcccagcccctgggtgattgtgattggcagcttcttcagcacctgtggggccggcctgcagagcctgaccggggccccccggctgctgcaggccatcgccaaggacaacatcatccccttcctgcgggtgtttggacatggcaaggtgaatggagagcccacctgggccctgctgctgacagccctgattgctgagctgggcatcctgattgccagcctggacatggtggcccccatcctgtccatgttcttcctgatgtgctacctgtttgtgaacctggcctgtgctgtgcagaccctgctgcggacccccaactggaggccccgcttcaagtactaccactgggccctgtccttcctgggcatgagcctgtgcctggccctgatgtttgtgtcctcctggtactatgccctggtggccatgctgattgctggcatgatctacaagtacatcgagtaccagggcgctgagaaggagtggggagatggcatccggggcctgagcctgtctgctgcccgctatgccctgctgcggctggaggagggccccccccacaccaagaactggaggccccagctgctggtgctgctgaagctggatgaggacctgcacgtgaagtacccccggctgctgacctttgccagccagctgaaggccggcaagggcctgaccatcgtgggcagcgtcatccagggcagcttcctggagagctatggagaggcccaggccgctgagcagaccccctgtgccgccctgcggctgcccacctggccctgcagctgccccaggaccagccccagcaccccagccaccaccagcgccacctggagggccacctag

SEQ ID NO: 170168 - DNA, 3264 bp, synthetic construct
  misc_feature 1..3264: note = Description of Artificial Sequence: Synthetic coding sequence
  source 1..3264: mol_type = other DNA
atgagagctggaggagcctgcaggcctggagctgctggaacagctgctggaacagctgctgggggctgggatggcggctgcggcggcgctgagcccgcccgctgcctgaccagcccctggtgccagtggacaggccgcggggccgccaccatgaccaccagccggggctctgtgggctggaccaccggcagcgcccccagctggatgaccaggacagaggagctggacatccggcccaaggtgagcagcctgctgggcaagctggtgtcctacaccaacctgacccagggcgccaaggagcacgaggaggccgagagcggggagggcacccggcggcgggctgctgaggcccccagcatgggcaccctgatgggcgtgtacctgccctgcctgcagaacatctttggagtcatcctcttcctgcggctgacctggatggtgggcacagctggggtgctgcaggccctgctgattgtgctgatctgctgctgctgcaccctgctgacagccatctccatgtctgccatcgccaccaatggagtggtgcctgctgggggcagctacttcatgatcagccgcagcctgggccctgagtttggaggagctgtgggcctgtgcttctacctgggcaccacctttgctgctgccatgtacatcctgggcgccatcgagatcctgctgacctacatcgcccccccagctgccatcttctaccccagcggggcccatgacaccagcaatgccaccctgaacaacatgagggtgtatggcaccatcttcctgaccttcatgaccctggtggtgtttgtgggcgtgaagtatgtgaacaagtttgccagcctcttcctggcctgtgtgatcatcagcatcctgagcatctatgccggcggcatcaagagcatctttgacccccctgtgtttcctgtgtgcatgctgggcaacagaaccctgagccgggaccagtttgacatctgtgccaagacagctgtggtggacaatgaaacagtggccacccagctgtggagcttcttctgccacagccccaacctgaccacagacagctgtgacccctacttcatgctgaacaacgtgacagagatccctggcatccctggagctgctgctggggtgctgcaggagaacctgtggagcgcctacctggagaagggggacatcgtggagaagcacggcctgcccagcgcagatgcccccagcctgaaggagagcctgcccctgtatgtggtggccgacatcgccaccagcttcaccgtgctggtgggcatcttcttccccagcgtgacaggcatcatggccggcagcaacagaagtggggacctgagagatgcccagaagagcatccctgtgggcaccatcctggccatcatcaccaccagcctggtgtacttcagctctgtggtgctgtttggagcctgcattgaaggagtggtgctgcgggacaagtatggagatggagtgtccaggaacctggtggtgggcaccctggcctggcccagcccctgggtgattgtgattggcagcttcttcagcacctgtggggccggcctgcagagcctgaccggggccccccggctgctgcaggccatcgccaaggacaacatcatccccttcctgcgggtgtttggacatggcaaggtgaatggagagcccacctgggccctgctgctgacagccctgattgctgagctgggcatcctgattgccagcctggacatggtggcccccatcctgtccatgttcttcctgatgtgctacctgtttgtgaacctggcctgtgctgtgcagaccctgctgcggacccccaactggaggccccgcttcaagtactaccactgggccctgtccttcctgggcatgagcctgtgcctggccctgatgtttgtgtcctcctggtactatgccctggtggccatgctgattgctggcatgatctacaagtacatcgagtaccagggcgctgagaaggagtggggagatggcatccggggcctgagcctgtctgctgcccgctatgccctgctgcggctggaggagggccccccccacaccaagaactggaggccccagctgctggtgctgctgaagctggatgaggacctgcacgtgaagtacccccggctgctgacctttgccagccagctgaaggccggcaagggcctgaccatcgtgggcagcgtcatccagggcagcttcctggagagctatggagaggcccaggccgctgagcagaccatcaagaacatgatggagattgagaaggtgaagggcttctgccaggtggtggtggccagcaaggtgcgggagggcctggcccacctgatccagagctgtggcctgggcggcatgaggcacaacagcgtggtgctgggctggccctacggctggaggcagagcgaggacccccgggcctggaagaccttcatcgacacagtgcgctgcaccacagctgcccacctggccctgctggtgcccaagaacatcgccttctaccccagcaaccacgagcgctacctggagggccacattgatgtgtggtggatcgtgcatgatggcggcatgctgatgctgctgcccttcctgctgcggcagcacaaggtgtggaggaaatgtaggatgaggatcttcaccgtggcccagatggatgacaacagcatccagatgaagaaggacctggccgtgttcctgtaccacctgcggctggaggccgaggtggaggtggtggagatgcacaacagcgacatcagcgcctacacctatgaaagaaccctgatgatggagcagaggagccagatgctgcggcagatgaggctgaccaagacagagcgggagcgggaggcccagctggtgaaggacagacacagcgccctgcggctggagagcctgtacagtgatgaggaggatgaatctgctgtgggcgctgacaagatccagatgacctggacccgggacaagtacatgacagagacctgggaccccagccacgccccagacaacttccgggagctggtgcacatcaagccagaccagagcaatgtgcggaggatgcacacagctgtgaagctgaatgaggtgattgtgaccaggagccatgatgcccggctggtgctgctgaacatgcctggcccccccaggaacagtgaaggagatgagaactacatggagttcctggaggtgctgacagagggcctggagcgggtgctgctggtgcggggcggcggccgggaggtgatcaccatctacagctag

SEQ ID NO: 170169 - DNA, 3240 bp, synthetic construct
  misc_feature 1..3240: note = Description of Artificial Sequence: Synthetic coding sequence
  source 1..3240: mol_type = other DNA
atggctgctgagggcgctgtgtgtggctttgtgtacctggagggcacagcctgggccgtgcctgaggacacagagcccctggccagctgcaccctgggccacggcaaccaccgggagagcagccccttcctgagccccctggaggccagccggggcatcgactactatgacaggaacctggccctgtttgaggaggagctggacatccggcccaaggtgagcagcctgctgggcaagctggtgtcctacaccaacctgacccagggcgccaaggagcacgaggaggccgagagcggggagggcacccggcggcgggctgctgaggcccccagcatgggcaccctgatgggcgtgtacctgccctgcctgcagaacatctttggagtcatcctcttcctgcggctgacctggatggtgggcacagctggggtgctgcaggccctgctgattgtgctgatctgctgctgctgcaccctgctgacagccatctccatgtctgccatcgccaccaatggagtggtgcctgctgggggcagctacttcatgatcagccgcagcctgggccctgagtttggaggagctgtgggcctgtgcttctacctgggcaccacctttgctgctgccatgtacatcctgggcgccatcgagatcctgctgacctacatcgcccccccagctgccatcttctaccccagcggggcccatgacaccagcaatgccaccctgaacaacatgagggtgtatggcaccatcttcctgaccttcatgaccctggtggtgtttgtgggcgtgaagtatgtgaacaagtttgccagcctcttcctggcctgtgtgatcatcagcatcctgagcatctatgccggcggcatcaagagcatctttgacccccctgtgtttcctgtgtgcatgctgggcaacagaaccctgagccgggaccagtttgacatctgtgccaagacagctgtggtggacaatgaaacagtggccacccagctgtggagcttcttctgccacagccccaacctgaccacagacagctgtgacccctacttcatgctgaacaacgtgacagagatccctggcatccctggagctgctgctggggtgctgcaggagaacctgtggagcgcctacctggagaagggggacatcgtggagaagcacggcctgcccagcgcagatgcccccagcctgaaggagagcctgcccctgtatgtggtggccgacatcgccaccagcttcaccgtgctggtgggcatcttcttccccagcgtgacaggcatcatggccggcagcaacagaagtggggacctgagagatgcccagaagagcatccctgtgggcaccatcctggccatcatcaccaccagcctggtgtacttcagctctgtggtgctgtttggagcctgcattgaaggagtggtgctgcgggacaagtatggagatggagtgtccaggaacctggtggtgggcaccctggcctggcccagcccctgggtgattgtgattggcagcttcttcagcacctgtggggccggcctgcagagcctgaccggggccccccggctgctgcaggccatcgccaaggacaacatcatccccttcctgcgggtgtttggacatggcaaggtgaatggagagcccacctgggccctgctgctgacagccctgattgctgagctgggcatcctgattgccagcctggacatggtggcccccatcctgtccatgttcttcctgatgtgctacctgtttgtgaacctggcctgtgctgtgcagaccctgctgcggacccccaactggaggccccgcttcaagtactaccactgggccctgtccttcctgggcatgagcctgtgcctggccctgatgtttgtgtcctcctggtactatgccctggtggccatgctgattgctggcatgatctacaagtacatcgagtaccagggcgctgagaaggagtggggagatggcatccggggcctgagcctgtctgctgcccgctatgccctgctgcggctggaggagggccccccccacaccaagaactggaggccccagctgctggtgctgctgaagctggatgaggacctgcacgtgaagtacccccggctgctgacctttgccagccagctgaaggccggcaagggcctgaccatcgtgggcagcgtcatccagggcagcttcctggagagctatggagaggcccaggccgctgagcagaccatcaagaacatgatggagattgagaaggtgaagggcttctgccaggtggtggtggccagcaaggtgcgggagggcctggcccacctgatccagagctgtggcctgggcggcatgaggcacaacagcgtggtgctgggctggccctacggctggaggcagagcgaggacccccgggcctggaagaccttcatcgacacagtgcgctgcaccacagctgcccacctggccctgctggtgcccaagaacatcgccttctaccccagcaaccacgagcgctacctggagggccacattgatgtgtggtggatcgtgcatgatggcggcatgctgatgctgctgcccttcctgctgcggcagcacaaggtgtggaggaaatgtaggatgaggatcttcaccgtggcccagatggatgacaacagcatccagatgaagaaggacctggccgtgttcctgtaccacctgcggctggaggccgaggtggaggtggtggagatgcacaacagcgacatcagcgcctacacctatgaaagaaccctgatgatggagcagaggagccagatgctgcggcagatgaggctgaccaagacagagcgggagcgggaggcccagctggtgaaggacagacacagcgccctgcggctggagagcctgtacagtgatgaggaggatgaatctgctgtgggcgctgacaagatccagatgacctggacccgggacaagtacatgacagagacctgggaccccagccacgccccagacaacttccgggagctggtgcacatcaagccagaccagagcaatgtgcggaggatgcacacagctgtgaagctgaatgaggtgattgtgaccaggagccatgatgcccggctggtgctgctgaacatgcctggcccccccaggaacagtgaaggagatgagaactacatggagttcctggaggtgctgacagagggcctggagcgggtgctgctggtgcggggcggcggccgggaggtgatcaccatctacagctag

SEQ ID NO: 170170 - DNA, 3165 bp, synthetic construct
  misc_feature 1..3165: note = Description of Artificial Sequence: Synthetic coding sequence
  source 1..3165: mol_type = other DNA
atgggagacaccctgagccctggccacggcaaccaccgggagagcagccccttcctgagccccctggaggccagccggggcatcgactactatgacaggaacctggccctgtttgaggaggagctggacatccggcccaaggtgagcagcctgctgggcaagctggtgtcctacaccaacctgacccagggcgccaaggagcacgaggaggccgagagcggggagggcaccaggagaagagctgctgaggcccccagcatgggcaccctgatgggcgtgtacctgccctgcctgcagaacatctttggagtcatcctcttcctgcggctgacctggatggtgggcacagctggggtgctgcaggccctgctgattgtgctgatctgctgctgctgcaccctgctgacagccatctccatgtctgccatcgccaccaacggggtggtgcctgctgggggcagctacttcatgatcagccgcagcctgggccctgagtttggaggagctgtgggcctgtgcttctacctgggcaccacctttgctgctgccatgtacatcctgggcgccatcgagatcctgctgacctacatcgcccctcctgctgccatcttctaccccagcggggcccatgacaccagcaatgccaccctgaacaacatgagggtgtatggcaccatcttcctgaccttcatgaccctggtggtgtttgtgggcgtgaagtatgtgaacaagtttgccagcctcttcctggcctgcgtcatcatcagcatcctgagcatctatgctgggggcatcaagagcatctttgatcctcctgtgtttcctgtgtgcatgctgggcaacagaaccctgagccgggaccagtttgacatctgtgccaagacagctgtggtggacaatgagaccgtggccacccagctgtggagcttcttctgccacagccccaacctgaccacagacagctgtgacccctacttcatgctgaacaacgtgacagagatccctggcatccctggagctgctgctggggtgctgcaggagaacctgtggagcgcctacctggagaagggggacatcgtggagaagcacggcctgcccagcgcagatgcccccagcctgaaggagagcctgcccctgtatgtggtggccgacatcgccaccagcttcaccgtgctggtgggcatcttcttccccagcgtgacaggcatcatggccggcagcaacagaagtggggacctgagagatgcccagaagagcatccctgtgggcaccatcctggccatcatcaccaccagcctggtgtacttcagctctgtggtgctgtttggagcctgcatcgagggcgtggtgctgcgggacaagtatggagatggagtgtccaggaacctggtggtgggcaccctggcctggcccagcccctgggtgattgtcatcggcagcttcttcagcacctgtggggccggcctgcagagcctgactggagccccccggctgctgcaggccatcgccaaggacaacatcatccccttcctgcgggtgtttggccacggcaaggtgaatggagagcccacctgggccctgctgctgacagccctgattgctgagctgggcatcctgattgccagcctggacatggtggcccccatcctgtccatgttcttcctgatgtgctacctgtttgtgaacctggcctgtgctgtgcagaccctgctgcggacccccaactggaggccccgcttcaagtactaccactgggccctgtccttcctgggcatgagcctgtgcctggccctgatgtttgtgtcctcctggtactatgccctggtggccatgctgattgctggcatgatctacaagtacatcgagtaccagggcgctgagaaggagtggggagatggcatccggggcctgagcctgtctgctgcccgctatgccctgctgcggctggaggagggccccccccacaccaagaactggaggccccagctgctggtgctgctgaagctggatgaggacctgcacgtgaagtacccccggctgctgacctttgccagccagctgaaggccggcaagggcctgaccatcgtgggcagcgtcatccagggcagcttcctggagagctatggagaggcccaggccgctgagcagaccatcaagaacatgatggagattgagaaggtgaagggcttctgccaggtggtggtggccagcaaggtgcgggagggcctggcccacctgatccagagctgtggcctgggcggcatgaggcacaacagcgtggtgctgggctggccctacggctggaggcagagcgaggacccccgggcctggaagaccttcatcgacacagtgcgctgcaccacagctgcccacctggccctgctggtgcccaagaacatcgccttctaccccagcaaccacgagcgctacctggagggccacattgatgtgtggtggatcgtgcatgatggcggcatgctgatgctgctgcccttcctgctgcggcagcacaaggtgtggaggaagtgcaggatgaggatcttcaccgtggcccagatggatgacaacagcatccagatgaagaaggacctggccgtgttcctgtaccacctgcggctggaggccgaggtggaggtggtggagatgcacaacagcgacatcagcgcctacacctatgaaagaaccctgatgatggagcagaggagccagatgctgcggcagatgaggctgaccaagacagagcgggagcgggaggcccagctggtgaaggacagacattctgccctgcggctggagagcctgtacagtgatgaagaagatgagagcgctgtgggcgctgacaagatccagatgacctggacccgggacaagtacatgacagagacctgggaccccagccacgccccagacaacttccgggagctggtgcacatcaagccagaccagagcaatgtgcggaggatgcacacagctgtgaagctgaatgaagtcatcgtgaccaggagccatgatgcccggctggtgctgctgaacatgcctggccccccaagaaattctgaaggagatgagaactacatggagttcctggaggtgctgacagagggcctggagcgggtgctgctggtgcggggcggcggccgggaggtgatcaccatctacagctag

SEQ ID NO: 170171 - DNA, 3300 bp, synthetic construct
  misc_feature 1..3300: note = Description of Artificial Sequence: Synthetic coding sequence
  source 1..3300: mol_type = other DNA
atgccccacttcaccgtgaccaaggtggaggaccctgaggagggcgctgctgccagcatcagccaggagcccagcctggccgacatcaaggcccgcatccaggacagtgatgagccagacctgagccagaacagcatcactggagagcacagccagctgctggatgatggccacaagaaggccagaaatgcctacctgaacaacagcaactatgaggagggagatgagtactttgacaagaacctggccctgtttgaggaggagatggacacccggcccaaggtgagcagcctgctgaacaggatggccaactacaccaacctgacccagggcgccaaggagcacgaggaggccgagaacatcacagagggcaagaagaagcccaccaagaccccccagatgggcaccttcatgggcgtgtacctgccctgcctgcagaacatctttggagtcatcctcttcctgcggctgacctgggtggtgggcacagctggggtgctgcaggcctttgccatcgtgctgatctgctgctgctgcaccatgctgacagccatctccatgtctgccatcgccaccaatggagtggtgcctgctgggggcagctacttcatgatcagccgggccctgggccctgagtttggaggagctgtgggcctgtgcttctacctgggcaccacctttgctgctgccatgtacatcctgggcgccatcgagatcttcctggtgtacatcgtgccccgggccgccatcttccacagtgatgatgccctgaaggagagcgctgccatgctgaacaacatgagggtgtatggaacagccttcctggtgctgatggtgctggtggtgttcatcggcgtgcgctacgtgaacaagtttgccagcctcttcctggcctgtgtgattgtgtccatcctggccatctatgctggggccatcaagagcagctttgccccaccccacttccctgtgtgcatgctgggcaacagaaccctgagcagccgccacattgatgtgtgcagcaagaccaaggagatcaacaacatgacagtgcccagcaagctgtggggcttcttctgcaacagcagccagttcttcaatgccacctgtgatgagtactttgtgcacaacaacgtgaccagcatccagggcatccctggcctggccagcggcatcatcacagagaacctgtggagcaactacctgcccaagggggagatcatcgagaagcccagcgccaagagcagtgatgtgctgggcagcctgaaccatgaatatgtgctggtggacatcaccaccagcttcaccctgctggtgggcatcttcttccccagcgtgacaggcatcatggccggcagcaacagaagtggggacctgaaggatgcccagaagagcatccccatcggcaccatcctggccatcctgaccaccagctttgtgtacctgagcaatgtggtgctgtttggagcctgcattgaaggagtggtgctgcgggacaagtttggagatgctgtgaagggcaacctggtggtgggcaccctgtcctggcccagcccctgggtgattgtgattggcagcttcttcagcacctgtggggccggcctgcagagcctgaccggggccccccggctgctgcaggccatcgccaaggacaacatcatccccttcctgcgggtgtttggccacagcaaggccaatggagagcccacctgggccctgctgctgacagctgccatcgccgagctgggcatcctgattgccagcctggacctggtggcccccatcctgtccatgttcttcctgatgtgctacctgtttgtgaacctggcctgtgccctgcagaccctgctgcggacccccaactggaggccccgcttccgctactaccactgggccctgtccttcatgggcatgagcatctgcctggccctgatgttcatcagctcctggtactatgccatcgtggccatggtgattgctggcatgatctacaagtacatcgagtaccagggcgctgagaaggagtggggagatggcatccggggcctgagcctgtctgctgccaggtttgccctgctgcggctggaggagggccccccccacaccaagaactggaggccccagctgctggtgctgctgaagctggatgaggacctgcacgtgaagcacccccggctgctgacctttgccagccagctgaaggccggcaagggcctgaccatcgtgggctctgtgattgtgggcaacttcctggagaactatggagaggccctggccgctgagcagaccatcaagcacctgatggaggccgagaaggtgaagggcttctgccagctggtggtggccgccaagctgcgggagggcatcagccacctgatccagagctgtggcctgggcggcatgaagcacaacacagtggtgatgggctggcccaacggctggaggcagagtgaagatgcccgggcctggaagaccttcatcggcaccgtgcgggtgaccacagctgcccacctggccctgctggtggccaagaacatctccttcttccccagcaatgtggagcagttcagcgagggcaacattgatgtgtggtggatcgtgcatgatggcggcatgctgatgctgctgcccttcctgctgaagcagcacaaggtgtggaggaaatgttccatccgcatcttcaccgtggcccagctggaggacaacagcatccagatgaagaaggacctggccaccttcctgtaccacctgcgcatcgaggccgaggtggaggtggtggagatgcatgacagcgacatcagcgcctacacctatgaaagaaccctgatgatggagcagaggagccagatgctgcggcacatgaggctgagcaagacagagcgggaccgggaggcccagctggtgaaggacaggaacagcatgctgcggctgaccagcattggaagtgatgaagatgaggagacagagacctaccaggagaaggtgcacatgacctggaccaaggacaagtacatggccagccggggccagaaggccaagtccatggagggcttccaggacctgctgaacatgaggccagaccagagcaatgtgcggaggatgcacacagctgtgaagctgaatgaggtgattgtgaacaagagccatgaggccaagctggtgctgctgaacatgcctggcccccccaggaacccagaaggagatgagaactacatggagttcctggaggtgctgacagagggcctggagcgggtgctgctggtgcggggcggcggcagcgaggtgatcaccatctacagctag

SEQ ID NO: 170172 - DNA, 3453 bp, synthetic construct
  misc_feature 1..3453: note = Description of Artificial Sequence: Synthetic coding sequence
  source 1..3453: mol_type = other DNA
atgcaccccccagagaccaccaccaagatggcctctgtgcgcttcatggtgacccccaccaagattgatgacatccctggcctgagtgacaccagcccagacctgagcagccgcagcagcagccgggtgcgcttcagcagccgggagagcgtgcctgagaccagccgctctgagcccatgtctgagatgtctggggccaccaccagcctggccaccgtggccctggaccccccaagtgacaggaccagccacccccaggatgtgattgaggacctgagccagaacagcatcaccggggagcacagccagctgctggatgatggccacaagaaggccagaaatgcctacctgaacaacagcaactatgaggagggagatgagtactttgacaagaacctggccctgtttgaggaggagatggacacccggcccaaggtgagcagcctgctgaacaggatggccaactacaccaacctgacccagggcgccaaggagcacgaggaggccgagaacatcacagagggcaagaagaagcccaccaagaccccccagatgggcaccttcatgggcgtgtacctgccctgcctgcagaacatctttggagtcatcctcttcctgcggctgacctgggtggtgggcacagctggggtgctgcaggcctttgccatcgtgctgatctgctgctgctgcaccatgctgacagccatctccatgtctgccatcgccaccaacggggtggtgcctgctgggggcagctacttcatgatcagccgggccctgggccctgagtttggaggagctgtgggcctgtgcttctacctgggcaccacctttgctgctgccatgtacatcctgggcgccatcgagatcttcctggtgtacatcgtgcccagggctgccatcttccacagtgatgatgccctgaaggagagcgctgccatgctgaacaacatgagggtgtatggaacagccttcctggtgctgatggtgctggtggtgttcatcggcgtgcgctacgtgaacaagtttgccagcctcttcctggcctgcgtcatcgtgtccatcctggccatctatgctggggccatcaagagcagctttgccccaccccacttccctgtgtgcatgctgggcaacagaaccctgagcagccgccacattgatgtgtgcagcaagaccaaggagatcaacaacatgacagtgcccagcaagctgtggggcttcttctgcaacagcagccagttcttcaatgccacctgtgatgagtactttgtgcacaacaacgtgaccagcatccagggcatccctggcctggccagcggcatcatcacagagaacctgtggagcaactacctgcccaagggggagatcatcgagaagcccagcgccaagagcagtgatgtgctgggcagcctgaaccacgagtatgtgctggtggacatcaccaccagcttcaccctgctggtgggcatcttcttccccagcgtgacaggcatcatggccggcagcaacagaagtggggacctgaaggatgcccagaagagcatccccatcggcaccatcctggccatcctgaccaccagctttgtgtacctgagcaatgtggtgctgtttggagcctgcatcgagggcgtggtgctgcgggacaagtttggagatgctgtgaagggcaacctggtggtgggcaccctgtcctggcccagcccctgggtgattgtcatcggcagcttcttcagcacctgtggggccggcctgcagagcctgactggagccccccggctgctgcaggccatcgccaaggacaacatcatccccttcctgcgggtgtttggccacagcaaggccaacggggagcccacctgggccctgctgctgacagctgccatcgccgagctgggcatcctgattgccagcctggacctggtggcccccatcctgtccatgttcttcctgatgtgctacctgtttgtgaacctggcctgtgccctgcagaccctgctgcggacccccaactggaggccccgcttccgctactaccactgggccctgtccttcatgggcatgagcatctgcctggccctgatgttcatcagctcctggtactatgccatcgtggccatggtgattgctggcatgatctacaagtacatcgagtaccagggcgctgagaaggagtggggagatggcatccggggcctgagcctgtctgctgccaggtttgccctgctgcggctggaggagggccccccccacaccaagaactggaggccccagctgctggtgctgctgaagctggatgaggacctgcacgtgaagcacccccggctgctgacctttgccagccagctgaaggccggcaagggcctgaccatcgtgggcagcgtcatcgtgggcaacttcctggagaactacggggaggccctggccgctgagcagaccatcaagcacctgatggaggccgagaaggtgaagggcttctgccagctggtggtggccgccaagctgcgggagggcatcagccacctgatccagagctgtggcctgggcggcatgaagcacaacacagtggtgatgggctggcccaacggctggaggcagagtgaagatgcccgggcctggaagaccttcatcggcaccgtgcgggtgaccacagctgcccacctggccctgctggtggccaagaacatctccttcttccccagcaatgtggagcagttcagcgagggcaacattgatgtgtggtggatcgtgcatgatggcggcatgctgatgctgctgcccttcctgctgaagcagcacaaggtgtggaggaagtgcagcatccgcatcttcaccgtggcccagctggaggacaacagcatccagatgaagaaggacctggccaccttcctgtaccacctgagaattgaagctgaggtggaggtggtggagatgcatgacagcgacatcagcgcctacacctatgaaagaaccctgatgatggagcagaggagccagatgctgcggcacatgaggctgagcaagacagagcgggaccgggaggcccagctggtgaaggacagaaattccatgctgcggctgaccagcatcggcagtgatgaagatgaggagacagagacctaccaggagaaggtgcacatgacctggaccaaggacaagtacatggccagccggggccagaaggccaagtccatggagggcttccaggacctgctgaacatgaggccagaccagagcaatgtgcggaggatgcacacagctgtgaagctgaatgaagtcatcgtgaacaagagccatgaggccaagctggtgctgctgaacatgcctggccccccaagaaatccagaaggagatgagaactacatggagttcctggaggtgctgacagagggcctggagcgggtgctgctggtgcggggcggcggcagcgaggtgatcaccatctacagctag

SEQ ID NO: 170173 - DNA, 3276 bp, synthetic construct
  misc_feature 1..3276: note = Description of Artificial Sequence: Synthetic coding sequence
  source 1..3276: mol_type = other DNA
atgtctgagatgtctggggccaccaccagcctggccaccgtggccctggacccccccagcgacaggaccagccacccccaggatgtgattgaggacctgagccagaacagcatcactggagagcacagccagctgctggatgatggccacaagaaggccagaaatgcctacctgaacaacagcaactatgaggagggagatgagtactttgacaagaacctggccctgtttgaggaggagatggacacccggcccaaggtgagcagcctgctgaacaggatggccaactacaccaacctgacccagggcgccaaggagcacgaggaggccgagaacatcacagagggcaagaagaagcccaccaagaccccccagatgggcaccttcatgggcgtgtacctgccctgcctgcagaacatctttggagtcatcctcttcctgcggctgacctgggtggtgggcacagctggggtgctgcaggcctttgccatcgtgctgatctgctgctgctgcaccatgctgacagccatctccatgtctgccatcgccaccaatggagtggtgcctgctgggggcagctacttcatgatcagccgggccctgggccctgagtttggaggagctgtgggcctgtgcttctacctgggcaccacctttgctgctgccatgtacatcctgggcgccatcgagatcttcctggtgtacatcgtgccccgggccgccatcttccacagtgatgatgccctgaaggagagcgctgccatgctgaacaacatgagggtgtatggaacagccttcctggtgctgatggtgctggtggtgttcatcggcgtgcgctacgtgaacaagtttgccagcctcttcctggcctgtgtgattgtgtccatcctggccatctatgctggggccatcaagagcagctttgccccaccccacttccctgtgtgcatgctgggcaacagaaccctgagcagccgccacattgatgtgtgcagcaagaccaaggagatcaacaacatgacagtgcccagcaagctgtggggcttcttctgcaacagcagccagttcttcaatgccacctgtgatgagtactttgtgcacaacaacgtgaccagcatccagggcatccctggcctggccagcggcatcatcacagagaacctgtggagcaactacctgcccaagggggagatcatcgagaagcccagcgccaagagcagtgatgtgctgggcagcctgaaccatgaatatgtgctggtggacatcaccaccagcttcaccctgctggtgggcatcttcttccccagcgtgacaggcatcatggccggcagcaacagaagtggggacctgaaggatgcccagaagagcatccccatcggcaccatcctggccatcctgaccaccagctttgtgtacctgagcaatgtggtgctgtttggagcctgcattgaaggagtggtgctgcgggacaagtttggagatgctgtgaagggcaacctggtggtgggcaccctgtcctggcccagcccctgggtgattgtgattggcagcttcttcagcacctgtggggccggcctgcagagcctgaccggggccccccggctgctgcaggccatcgccaaggacaacatcatccccttcctgcgggtgtttggccacagcaaggccaatggagagcccacctgggccctgctgctgacagctgccatcgccgagctgggcatcctgattgccagcctggacctggtggcccccatcctgtccatgttcttcctgatgtgctacctgtttgtgaacctggcctgtgccctgcagaccctgctgcggacccccaactggaggccccgcttccgctactaccactgggccctgtccttcatgggcatgagcatctgcctggccctgatgttcatcagctcctggtactatgccatcgtggccatggtgattgctggcatgatctacaagtacatcgagtaccagggcgctgagaaggagtggggagatggcatccggggcctgagcctgtctgctgccaggtttgccctgctgcggctggaggagggccccccccacaccaagaactggaggccccagctgctggtgctgctgaagctggatgaggacctgcacgtgaagcacccccggctgctgacctttgccagccagctgaaggccggcaagggcctgaccatcgtgggctctgtgattgtgggcaacttcctggagaactatggagaggccctggccgctgagcagaccatcaagcacctgatggaggccgagaaggtgaagggcttctgccagctggtggtggccgccaagctgcgggagggcatcagccacctgatccagagctgtggcctgggcggcatgaagcacaacacagtggtgatgggctggcccaacggctggaggcagagtgaagatgcccgggcctggaagaccttcatcggcaccgtgcgggtgaccacagctgcccacctggccctgctggtggccaagaacatctccttcttccccagcaatgtggagcagttcagcgagggcaacattgatgtgtggtggatcgtgcatgatggcggcatgctgatgctgctgcccttcctgctgaagcagcacaaggtgtggaggaaatgttccatccgcatcttcaccgtggcccagctggaggacaacagcatccagatgaagaaggacctggccaccttcctgtaccacctgcgcatcgaggccgaggtggaggtggtggagatgcatgacagcgacatcagcgcctacacctatgaaagaaccctgatgatggagcagaggagccagatgctgcggcacatgaggctgagcaagacagagcgggaccgggaggcccagctggtgaaggacaggaacagcatgctgcggctgaccagcattggaagtgatgaagatgaggagacagagacctaccaggagaaggtgcacatgacctggaccaaggacaagtacatggccagccggggccagaaggccaagtccatggagggcttccaggacctgctgaacatgaggccagaccagagcaatgtgcggaggatgcacacagctgtgaagctgaatgaggtgattgtgaacaagagccatgaggccaagctggtgctgctgaacatgcctggcccccccaggaacccagaaggagatgagaactacatggagttcctggaggtgctgacagagggcctggagcgggtgctgctggtgcggggcggcggcagcgaggtgatcaccatctacagctag

SEQ ID NO: 170174 - DNA, 3408 bp, synthetic construct
  misc_feature 1..3408: note = Description of Artificial Sequence: Synthetic coding sequence
  source 1..3408: mol_type = other DNA
atgcaccccccagagaccaccaccaagatggcctctgtgcgcttcatggtgacccccaccaagattgatgacatccctggcctgagtgacaccagcccagacctgagcagccgcagcagcagccgggtgcgcttcagcagccgggagagcgtgcctgagaccagccgctctgagcccatgtctgagatgtctggggccaccaccagcctggccaccgtggccctggaccccccaagtgacaggaccagccacccccaggatgtgattgaagatgatggccacaagaaggccagaaatgcctacctgaacaacagcaactatgaggagggagatgagtactttgacaagaacctggccctgtttgaggaggagatggacacccggcccaaggtgagcagcctgctgaacaggatggccaactacaccaacctgacccagggcgccaaggagcacgaggaggccgagaacatcacagagggcaagaagaagcccaccaagaccccccagatgggcaccttcatgggcgtgtacctgccctgcctgcagaacatctttggagtcatcctcttcctgcggctgacctgggtggtgggcacagctggggtgctgcaggcctttgccatcgtgctgatctgctgctgctgcaccatgctgacagccatctccatgtctgccatcgccaccaatggagtggtgcctgctgggggcagctacttcatgatcagccgggccctgggccctgagtttggaggagctgtgggcctgtgcttctacctgggcaccacctttgctgctgccatgtacatcctgggcgccatcgagatcttcctggtgtacatcgtgccccgggccgccatcttccacagtgatgatgccctgaaggagagcgctgccatgctgaacaacatgagggtgtatggaacagccttcctggtgctgatggtgctggtggtgttcatcggcgtgcgctacgtgaacaagtttgccagcctcttcctggcctgtgtgattgtgtccatcctggccatctatgctggggccatcaagagcagctttgccccaccccacttccctgtgtgcatgctgggcaacagaaccctgagcagccgccacattgatgtgtgcagcaagaccaaggagatcaacaacatgacagtgcccagcaagctgtggggcttcttctgcaacagcagccagttcttcaatgccacctgtgatgagtactttgtgcacaacaacgtgaccagcatccagggcatccctggcctggccagcggcatcatcacagagaacctgtggagcaactacctgcccaagggggagatcatcgagaagcccagcgccaagagcagtgatgtgctgggcagcctgaaccatgaatatgtgctggtggacatcaccaccagcttcaccctgctggtgggcatcttcttccccagcgtgacaggcatcatggccggcagcaacagaagtggggacctgaaggatgcccagaagagcatccccatcggcaccatcctggccatcctgaccaccagctttgtgtacctgagcaatgtggtgctgtttggagcctgcattgaaggagtggtgctgcgggacaagtttggagatgctgtgaagggcaacctggtggtgggcaccctgtcctggcccagcccctgggtgattgtgattggcagcttcttcagcacctgtggggccggcctgcagagcctgaccggggccccccggctgctgcaggccatcgccaaggacaacatcatccccttcctgcgggtgtttggccacagcaaggccaatggagagcccacctgggccctgctgctgacagctgccatcgccgagctgggcatcctgattgccagcctggacctggtggcccccatcctgtccatgttcttcctgatgtgctacctgtttgtgaacctggcctgtgccctgcagaccctgctgcggacccccaactggaggccccgcttccgctactaccactgggccctgtccttcatgggcatgagcatctgcctggccctgatgttcatcagctcctggtactatgccatcgtggccatggtgattgctggcatgatctacaagtacatcgagtaccagggcgctgagaaggagtggggagatggcatccggggcctgagcctgtctgctgccaggtttgccctgctgcggctggaggagggccccccccacaccaagaactggaggccccagctgctggtgctgctgaagctggatgaggacctgcacgtgaagcacccccggctgctgacctttgccagccagctgaaggccggcaagggcctgaccatcgtgggctctgtgattgtgggcaacttcctggagaactatggagaggccctggccgctgagcagaccatcaagcacctgatggaggccgagaaggtgaagggcttctgccagctggtggtggccgccaagctgcgggagggcatcagccacctgatccagagctgtggcctgggcggcatgaagcacaacacagtggtgatgggctggcccaacggctggaggcagagtgaagatgcccgggcctggaagaccttcatcggcaccgtgcgggtgaccacagctgcccacctggccctgctggtggccaagaacatctccttcttccccagcaatgtggagcagttcagcgagggcaacattgatgtgtggtggatcgtgcatgatggcggcatgctgatgctgctgcccttcctgctgaagcagcacaaggtgtggaggaaatgttccatccgcatcttcaccgtggcccagctggaggacaacagcatccagatgaagaaggacctggccaccttcctgtaccacctgcgcatcgaggccgaggtggaggtggtggagatgcatgacagcgacatcagcgcctacacctatgaaagaaccctgatgatggagcagaggagccagatgctgcggcacatgaggctgagcaagacagagcgggaccgggaggcccagctggtgaaggacaggaacagcatgctgcggctgaccagcattggaagtgatgaagatgaggagacagagacctaccaggagaaggtgcacatgacctggaccaaggacaagtacatggccagccggggccagaaggccaagtccatggagggcttccaggacctgctgaacatgaggccagaccagagcaatgtgcggaggatgcacacagctgtgaagctgaatgaggtgattgtgaacaagagccatgaggccaagctggtgctgctgaacatgcctggcccccccaggaacccagaaggagatgagaactacatggagttcctggaggtgctgacagagggcctggagcgggtgctgctggtgcggggcggcggcagcgaggtgatcaccatctacagctag

SEQ ID NO: 170175 - DNA, 2889 bp, synthetic construct
  misc_feature 1..2889: note = Description of Artificial Sequence: Synthetic coding sequence
  source 1..2889: mol_type = other DNA
atggacacccggcccaaggtgagcagcctgctgaacaggatggccaactacaccaacctgacccagggcgccaaggagcacgaggaggccgagaacatcacagagggcaagaagaagcccaccaagaccatgctgacagccatctccatgtctgccatcgccaccaacggggtggtgcctgctgggggcagctacttcatgatcagccgggccctgggccctgagtttggaggagctgtgggcctgtgcttctacctgggcaccacctttgctgctgccatgtacatcctgggcgccatcgagatcttcctggtgtacatcgtgcccagggctgccatcttccacagtgatgatgccctgaaggagagcgctgccatgctgaacaacatgagggtgtatggaacagccttcctggtgctgatggtgctggtggtgttcatcggcgtgcgctacgtgaacaagtttgccagcctcttcctggcctgcgtcatcgtgtccatcctggccatctatgctggggccatcaagagcagctttgccccaccccacttccctgtgtgcatgctgggcaacagaaccctgagcagccgccacattgatgtgtgcagcaagaccaaggagatcaacaacatgacagtgcccagcaagctgtggggcttcttctgcaacagcagccagttcttcaatgccacctgtgatgagtactttgtgcacaacaacgtgaccagcatccagggcatccctggcctggccagcggcatcatcacagagaacctgtggagcaactacctgcccaagggggagatcatcgagaagcccagcgccaagagcagtgatgtgctgggcagcctgaaccacgagtatgtgctggtggacatcaccaccagcttcaccctgctggtgggcatcttcttccccagcgtgacaggcatcatggccggcagcaacagaagtggggacctgaaggatgcccagaagagcatccccatcggcaccatcctggccatcctgaccaccagctttgtgtacctgagcaatgtggtgctgtttggagcctgcatcgagggcgtggtgctgcgggacaagtttggagatgctgtgaagggcaacctggtggtgggcaccctgtcctggcccagcccctgggtgattgtcatcggcagcttcttcagcacctgtggggccggcctgcagagcctgactggagccccccggctgctgcaggccatcgccaaggacaacatcatccccttcctgcgggtgtttggccacagcaaggccaacggggagcccacctgggccctgctgctgacagctgccatcgccgagctgggcatcctgattgccagcctggacctggtggcccccatcctgtccatgttcttcctgatgtgctacctgtttgtgaacctggcctgtgccctgcagaccctgctgcggacccccaactggaggccccgcttccgctactaccactgggccctgtccttcatgggcatgagcatctgcctggccctgatgttcatcagctcctggtactatgccatcgtggccatggtgattgctggcatgatctacaagtacatcgagtaccagggcgctgagaaggagtggggagatggcatccggggcctgagcctgtctgctgccaggtttgccctgctgcggctggaggagggccccccccacaccaagaactggaggccccagctgctggtgctgctgaagctggatgaggacctgcacgtgaagcacccccggctgctgacctttgccagccagctgaaggccggcaagggcctgaccatcgtgggcagcgtcatcgtgggcaacttcctggagaactacggggaggccctggccgctgagcagaccatcaagcacctgatggaggccgagaaggtgaagggcttctgccagctggtggtggccgccaagctgcgggagggcatcagccacctgatccagagctgtggcctgggcggcatgaagcacaacacagtggtgatgggctggcccaacggctggaggcagagtgaagatgcccgggcctggaagaccttcatcggcaccgtgcgggtgaccacagctgcccacctggccctgctggtggccaagaacatctccttcttccccagcaatgtggagcagttcagcgagggcaacattgatgtgtggtggatcgtgcatgatggcggcatgctgatgctgctgcccttcctgctgaagcagcacaaggtgtggaggaagtgcagcatccgcatcttcaccgtggcccagctggaggacaacagcatccagatgaagaaggacctggccaccttcctgtaccacctgagaattgaagctgaggtggaggtggtggagatgcatgacagcgacatcagcgcctacacctatgaaagaaccctgatgatggagcagaggagccagatgctgcggcacatgaggctgagcaagacagagcgggaccgggaggcccagctggtgaaggacagaaattccatgctgcggctgaccagcatcggcagtgatgaagatgaggagacagagacctaccaggagaaggtgcacatgacctggaccaaggacaagtacatggccagccggggccagaaggccaagtccatggagggcttccaggacctgctgaacatgaggccagaccagagcaatgtgcggaggatgcacacagctgtgaagctgaatgaagtcatcgtgaacaagagccatgaggccaagctggtgctgctgaacatgcctggccccccaagaaatccagaaggagatgagaactacatggagttcctggaggtgctgacagagggcctggagcgggtgctgctggtgcggggcggcggcagcgaggtgatcaccatctacagctag

SEQ ID NO: 170176 - DNA, 3276 bp, synthetic construct; identical to SEQ ID NO: 170173
  misc_feature 1..3276: note = Description of Artificial Sequence: Synthetic coding sequence
  source 1..3276: mol_type = other DNA

SEQ ID NO: 170177 - DNA, 3426 bp, synthetic construct
  misc_feature 1..3426: note = Description of Artificial Sequence: Synthetic coding sequence
  source 1..3426: mol_type = other DNA
atggcctctgtgcgcttcatggtgacccccaccaagattgatgacatccctggcctgagtgacaccagcccagacctgagcagccgcagcagcagccgggtgcgcttcagcagccgggagagcgtgcctgagaccagccgctctgagcccatgtctgagatgtctggggccaccaccagcctggccaccgtggccctggacccccccagcgacaggaccagccacccccaggatgtgattgaggacctgagccagaacagcatcactggagagcacagccagctgctggatgatggccacaagaaggccagaaatgcctacctgaacaacagcaactatgaggagggagatgagtactttgacaagaacctggccctgtttgaggaggagatggacacccggcccaaggtgagcagcctgctgaacaggatggccaactacaccaacctgacccagggcgccaaggagcacgaggaggccgagaacatcacagagggcaagaagaagcccaccaagaccccccagatgggcaccttcatgggcgtgtacctgccctgcctgcagaacatctttggagtcatcctcttcctgcggctgacctgggtggtgggcacagctggggtgctgcaggcctttgccatcgtgctgatctgctgctgctgcaccatgctgacagccatctccatgtctgccatcgccaccaatggagtggtgcctgctgggggcagctacttcatgatcagccgggccctgggccctgagtttggaggagctgtgggcctgtgcttctacctgggcaccacctttgctgctgccatgtacatcctgggcgccatcgagatcttcctggtgtacatcgtgccccgggccgccatcttccacagtgatgatgccctgaaggagagcgctgccatgctgaacaacatgagggtgtatggaacagccttcctggtgctgatggtgctggtggtgttcatcggcgtgcgctacgtgaacaagtttgccagcctcttcctggcctgtgtgattgtgtccatcctggccatctatgctggggccatcaagagcagctttgccccaccccacttccctgtgtgcatgctgggcaacagaaccctgagcagccgccacattgatgtgtgcagcaagaccaaggagatcaacaacatgacagtgcccagcaagctgtggggcttcttctgcaacagcagccagttcttcaatgccacctgtgatgagtactttgtgcacaacaacgtgaccagcatccagggcatccctggcctggccagcggcatcatcacagagaacctgtggagcaactacctgcccaagggggagatcatcgagaagcccagcgccaagagcagtgatgtgctgggcagcctgaaccatgaatatgtgctggtggacatcaccaccagcttcaccctgctggtgggcatcttcttccccagcgtgacaggcatcatggccggcagcaacagaagtggggacctgaaggatgcccagaagagcatccccatcggcaccatcctggccatcctgaccaccagctttgtgtacctgagcaatgtggtgctgtttggagcctgcattgaaggagtggtgctgcgggacaagtttggagatgctgtgaagggcaacctggtggtgggcaccctgtcctggcccagcccctgggtgattgtgattggcagcttcttcagcacctgtggggccggcctgcagagcctgaccggggccccccggctgctgcaggccatcgccaaggacaacatcatccccttcctgcgggtgtttggccacagcaaggccaatggagagcccacctgggccctgctgctgacagctgccatcgccgagctgggcatcctgattgccagcctggacctggtggcccccatcctgtccatgttcttcctgatgtgctacctgtttgtgaacctggcctgtgccctgcagaccctgctgcggacccccaactggaggccccgcttccgctactaccactgggccctgtccttcatgggcatgagcatctgcctggccctgatgttcatcagctcctggtactatgccatcgtggccatggtgattgctggcatgatctacaagtacatcgagtaccagggcgctgagaaggagtggggagatggcatccggggcctgagcctgtctgctgccaggtttgccctgctgcggctggaggagggccccccccacaccaagaactggaggccccagctgctggtgctgctgaagctggatgaggacctgcacgtgaagcacccccggctgctgacctttgccagccagctgaaggccggcaagggcctgaccatcgtgggctctgtgattgtgggcaacttcctggagaactatggagaggccctggccgctgagcagaccatcaagcacctgatggaggccgagaaggtgaagggcttctgccagctggtggtggccgccaagctgcgggagggcatcagccacctgatccagagctgtggcctgggcggcatgaagcacaacacagtggtgatgggctggcccaacggctggaggcagagtgaagatgcccgggcctggaagaccttcatcggcaccgtgcgggtgaccacagctgcccacctggccctgctggtggccaagaacatctccttcttccccagcaatgtggagcagttcagcgagggcaacattgatgtgtggtggatcgtgcatgatggcggcatgctgatgctgctgcccttcctgctgaagcagcacaaggtgtggaggaaatgttccatccgcatcttcaccgtggcccagctggaggacaacagcatccagatgaagaaggacctggccaccttcctgtaccacctgcgcatcgaggccgaggtggaggtggtggagatgcatgacagcgacatcagcgcctacacctatgaaagaaccctgatgatggagcagaggagccagatgctgcggcacatgaggctgagcaagacagagcgggaccgggaggcccagctggtgaaggacaggaacagcatgctgcggctgaccagcattggaagtgatgaagatgaggagacagagacctaccaggagaaggtgcacatgacctggaccaaggacaagtacatggccagccggggccagaaggccaagtccatggagggcttccaggacctgctgaacatgaggccagaccagagcaatgtgcggaggatgcacacagctgtgaagctgaatgaggtgattgtgaacaagagccatgaggccaagctggtgctgctgaacatgcctggcccccccaggaacccagaaggagatgagaactacatggagttcctggaggtgctgacagagggcctggagcgggtgctgctggtgcggggcggcggcagcgaggtgatcaccatctacagctag

SEQ ID NO: 170178 - DNA, 3453 bp, synthetic construct; identical to SEQ ID NO: 170172
  misc_feature 1..3453: note = Description of Artificial Sequence: Synthetic coding sequence
  source 1..3453: mol_type = other DNA

SEQ ID NO: 170179 - DNA, 186 bp, synthetic construct
  misc_feature 1..186: note = Description of Artificial Sequence: Synthetic coding sequence
  source 1..186: mol_type = other DNA
atgtctgagatgtctggggccaccaccagcctggccaccgtggccctggacccccccagcgacaggaccagccacccccaggatgtgattgaggacctgagccagaacagcatcactggagagcacagccagctgctggatgatggccacaagaaggccagaaatgcctacctgaacaacagctag

SEQ ID NO: 170180 - DNA, 2889 bp, synthetic construct; identical to SEQ ID NO: 170175
  misc_feature 1..2889: note = Description of Artificial Sequence: Synthetic coding sequence
  source 1..2889: mol_type = other DNA

SEQ ID NO: 170181 - DNA, 3453 bp, synthetic construct; identical to SEQ ID NO: 170172
  misc_feature 1..3453: note = Description of Artificial Sequence: Synthetic coding sequence
  source 1..3453: mol_type = other DNA

SEQ ID NO: 170182 - DNA, 459 bp, synthetic construct
  misc_feature 1..459: note = Description of Artificial Sequence: Synthetic coding sequence
  source 1..459: mol_type = other DNA
atggcctctgtgcgcttcatggtgacccccaccaagattgatgacatccctggcctgagtgacaccagcccagacctgagcagccgcagcagcagccgggtgcgcttcagcagccgggagagcgtgcctgagaccagccgctctgagcccatgtctgagatgtctggggccaccaccagcctggccaccgtggccctggacccccccagcgacaggaccagccacccccaggatgtgattgaggacctgagccagaacagcatcactggagagcacagccagctgctggatgatggccacaagaaggccagaaatgcctacctgaacaacagcaactatgaggagggagatgagtactttgacaagaacctggccctgtttgaggaggagatggacacccggcccaaggtgagcagcctgctgaacaggatggccaactacaccaacctgacccagtag

SEQ ID NO: 170183 - DNA, 3252 bp, synthetic construct
  misc_feature 1..3252: note = Description of Artificial Sequence: Synthetic coding sequence
  source 1..3252: mol_type = other DNA
atgcccaccaacttcaccgtggtgcctgtggaggcccacgcagatggcggcggagatgaaacagctgagaggacagaggcccctggcaccccagagggccctgagcctgagcggcccagccctggagatggcaacccccgggagaacagccccttcctgaacaacgtggaggtggagcaggagagcttctttgagggcaagaacatggccctgtttgaggaggagatggacagcaaccccatggtgagcagcctgctgaacaagctggccaactacaccaacctgagccagggcgtggtggagcacgaggaggatgaggagagcagaagaagagaggccaaggcccccaggatgggcaccttcatcggcgtgtacctgccctgcctgcagaacatcctgggcgtcatcctcttcctgcggctgacctggatcgtgggcgtggccggcgtgctggagagcttcctgattgtggccatgtgctgcacctgcaccatgctgacagccatctccatgtctgccatcgccaccaatggagtggtgcctgctgggggcagctactacatgatcagccgcagcctgggccctgagtttggaggagctgtgggcctgtgcttctacctgggcaccacctttgctggggccatgtacatcctgggcaccatcgagatcttcctgacctacatcagccctggggccgccatcttccaggccgaggccgccggcggggaggccgccgccatgctgcacaacatgagggtgtatggcacctgcaccctggtgctgatggccctggtggtgtttgtgggcgtgaagtatgtgaacaagctggccctggtgttcctggcctgtgtggtgctgagcatcctggccatctatgctggggtcatcaagagcgcctttgaccccccagacatccctgtgtgcctgctgggcaacagaaccctgagcagaagaagctttgatgcctgtgtgaaggcctacggcatccacaacaacagcgccaccagcgccctgtggggcctcttctgcaatggcagccagcccagcgctgcctgtgatgagtacttcatccagaacaacgtgacagagatccagggcatccctggggccgccagcggggtcttcctggagaacctgtggagcacctacgcccacgccggggcctttgtggagaagaagggcgtgcccagcgtgcctgtggccgaggagagccgggccagcgccctgccctacgtgctgacagacattgctgccagcttcaccctgctggtgggcatctacttccccagcgtgacaggcatcatggccggcagcaacagaagtggggacctgaaggatgcccagaagagcatccccaccggcaccatcctggccatcgtgaccaccagcttcatctacctgagctgcatcgtgctgtttggagcctgcattgaaggagtggtgctgcgggacaagtttggagaggccctgcagggcaacctggtgattggcatgctggcctggcccagcccctgggtgattgtgattggcagcttcttcagcacctgtggggccggcctgcagagcctgaccggggccccccggctgctgcaggccatcgccagagatggcatcgtgcccttcctgcaggtgtttggacatggcaaggccaatggagagcccacctgggccctgctgctgactgtgctgatctgtgaaacaggcatcctgattgccagcctggacagcgtggcccccatcctgtccatgttcttcctgatgtgctacctgtttgtgaacctggcctgtgctgtgcagaccctgctgcggacccccaactggaggccccgcttcaagttctaccactggaccctgtccttcctgggcatgagcctgtgcctggccctgatgttcatctgctcctggtactatgccctgagcgccatgctgattgctggctgcatctacaagtacatcgagtacagaggagctgagaaggagtggggagatggcatccggggcctgagcctgaatgctgcccgctatgccctgctgcgggtggagcacggccccccccacaccaagaactggaggccccaggtgctggtgatgctgaacctggatgctgagcaggccgtgaagcacccccggctgctgtccttcaccagccagctgaaggccggcaagggcctgaccatcgtgggctctgtgctggagggcacctacctggacaagcacatggaggcccagagagctgaggagaacatccgcagcctgatgagcacagagaagaccaagggcttctgccagctggtggtgagcagcagcctgagagatggcatgagccacctgatccagagcgctggcctgggcggcctgaagcacaacacagtgctgatggcctggccagcctcctggaagcaggaggacaaccccttctcctggaagaactttgtggacacagtgcgggacaccacagctgcccaccaggccctgctggtggccaagaatgtggacagcttcccccagaaccaggagagatttggaggcggccacattgatgtgtggtggatcgtgcatgatggcggcatgctgatgctgctgcccttcctgctgcggcagcacaaggtgtggaggaaatgtaggatgaggatcttcaccgtggcccaggtggatgacaacagcatccagatgaagaaggacctgcagatgttcctgtaccacctgcgcatctctgctgaggtggaggtggtggagatggtggagaatgacatcagcgccttcacctatgaaagaaccctgatgatggagcagaggagccagatgctgaagcagatgcagctgagcaagaatgagcaggagcgggaggcccagctgattcatgacaggaacacagccagccacacagctgctgctgcccggacccaggccccacccaccccagacaaggtgcagatgacctggacccgggagaagctgattgctgagaagtaccgcagccgggacaccagcctgagcggcttcaaggacctcttctccatgaagccagaccagagcaatgtgcggaggatgcacacagctgtgaagctgaatggagtggtgctgaacaagagccaggatgcccagctggtgctgctgaacatgcctggcccccccaagaaccggcagggagatgagaactacatggagttcctggaggtgctgacagagggcctgaacagagtgctgctggtgcggggcggcggccgggaggtgatcaccatctacagctag

SEQ ID NO: 170184 - DNA, 801 bp, synthetic construct
  misc_feature 1..801: note = Description of Artificial Sequence: Synthetic coding sequence
  source 1..801: mol_type = other DNA
atgcccaccaacttcaccgtggtgcctgtggaggcccacgcagatggcggcggagatgaaacagctgagaggacagaggcccctggcaccccagagggccctgagcctgagcggcccagccctggagatggcaacccccgggagaacagccccttcctgaacaacgtggaggtggagcaggagagcttctttgagggcaagaacatggccctgtttgaggaggagatggacagcaaccccatggtgagcagcctgctgaacaagctggccaactacaccaacctgagccagggcgtggtggagcacgaggaggatgaggagagcagaagaagagaggccaaggcccccaggatgggcaccttcatcggcgtgtacctgccctgcctgcagaacatcctgggcgtcatcctcttcctgcggctgacctggatcgtgggcgtggccggcgtgctggagagcttcctgattgtggccatgtgctgcacctgcaccatgctgacagccatctccatgtctgccatcgccaccaatggagtggtgcctgctgggggcagctactacatgatcagccgcagcctgggccctgagtttggaggagctgtgggcctgtgcttctacctgggcaccacctttgctggggccatgtacatcctgggcaccatcgagatcttcctgaccggcacagaagatggagtgggcagcctgggcctgggcctggcccagggcaacagacggcagacccacctgagccccagtgatgctgcccaggccgcccatggagccagctatggcagcttctag

SEQ ID NO: 170185 - DNA, 3066 bp, synthetic construct
  misc_feature 1..3066: note = Description of Artificial Sequence: Synthetic coding sequence
  source 1..3066: mol_type = other DNA
atggccgagctgcccaccacagagaccccaggagatgccaccctgtgcagcggccgcttcaccatcagcaccctgctgagcagtgatgagcccagccccccagctgcctatgacagcagccaccccagccacctgacccacagcagcaccttctgcatgaggaccttcggctacaacaccattgatgtggtgcccacctatgagcactacgccaacagcacccagcccggggagcccaggaaggtgcggcccaccctggccgacctgcacagcttcctgaagcaggagggccgccacctgcacgccctggcctttgacagccggcccagccatgagatgacagatggcctggtggagggggaggccggcaccagcagcgagaagaaccctgaggagcctgtgcgcttcggctgggtgaagggcgtgatgatccgctgcatgctgaacatctggggcgtcatcctgtacctgcggctgccctggatcacagcccaggccggcatcgtgctgacctggatcatcatcctgctgtctgtgacagtgaccagcatcaccggcctgagcatcagcgccatcagcaccaacgggaaggtgaagagcggcggcacctacttcctgatcagccgcagcctgggccctgagctgggcggcagcatcggcctcatctttgcctttgccaatgctgtgggcgtggccatgcacacagtgggctttgctgagaccgtgcgggacctgctgcaggagtatggagcccccatcgtggaccccatcaatgacatccgcatcatcgctgtggtgtctgtgacagtgctgctggccatcagcctggccggcatggagtgggagagcaaggcccaggtgctcttcttcctggtgatcatggtgtcctttgccaactacctggtgggcaccctcatccccccatctgaggacaaggccagcaagggcttcttctcctacagagctgacatctttgtgcagaacctggtgcctgactggaggggcccagatggcaccttcttcggcatgttcagcatcttcttccccagcgccaccggcatcctggccggggccaacatcagcggggacctgaaggaccctgccatcgccatccccaagggcaccctgatggccatcttctggaccaccatctcctacctggccatcagcgccaccatcggcagctgtgtggtgagagatgccagcggcgtgctgaatgacacagtgaccccaggctggggcgcctgtgagggcctggcctgcagctatggctggaacttcacagaatgtacccagcagcacagctgccactacggcctcatcaactactaccagaccatgtccatggtgtctggctttgcccccctcatcacagctggcatctttggagccaccctgagcagcgccctggcctgcctggtgtctgctgccaaggtgttccagtgcctgtgtgaggaccagctgtaccccctcatcggcttcttcggcaagggctacggcaagaacaaggagcctgtgcggggctacctgctggcctatgccatcgctgtggccttcatcatcatcgccgagctgaacaccatcgcccccatcatcagcaacttcttcctgtgcagctatgccctgatcaacttcagctgcttccacgccagcatcaccaacagccctggctggaggcccagcttccagtactacaacaagtgggccgccctgtttggagccatcatctctgtggtgatcatgttcctgctgacctggtgggccgccctgattgccatcggcgtggtgctcttcctgctgctgtatgtgatctacaagaagccagaggtgaactggggcagctctgtgcaggccggcagctacaacctggccctgagctacagcgtgggcctgaatgaggtggaggaccacatcaagaactaccggccccagtgcctggtgctgactggaccacccaacttccggcctgccctggtggactttgtgggcaccttcaccaggaacctgagcctgatgatctgtggccacgtgctgattggcccccacaagcagaggatgcctgagctgcagctgattgccaacggccacaccaagtggctgaacaagaggaagatcaaggccttctacagtgatgtgattgctgaggacctgcggcggggcgtgcagatcctgatgcaggccgccggcctgggccgcatgaagcccaacatcctggtggtgggcttcaagaagaactggcagagcgcccacccagccaccgtggaggactacatcggcatcctgcatgatgcctttgacttcaactatggagtgtgtgtgatgaggatgagggagggcctgaatgtgtccaagatgatgcaggcccacatcaaccctgtgtttgatcctgcagaagatggcaaggaggccagcgcccgggtggaccccaaggccctggtgaaggaggagcaggccaccaccatcttccagagcgagcagggcaagaagaccatcgacatctactggctgtttgatgatggcggcctgaccctgctgatcccctacctgctgggcaggaagaggcgctggagcaagtgcaagatccgggtgtttgtgggcggccagatcaacaggatggaccaggagaggaaggccatcatcagcctgctgagcaagttccggctgggcttccacgaggtgcacatcctgcctgacatcaaccagaaccccagggctgagcacaccaagagatttgaggacatgattgcccccttccggctgaatgatggcttcaaggatgaggccaccgtgaatgagatgaggcgggactgcccctggaagatcagtgatgaggagatcaccaagaacagagtgaagagcctgcggcaggtgcggctgaatgagatcgtgctggactacagcagagatgctgccctgattgtcatcaccctgcccatcggcaggaagggcaagtgccccagcagcctgtacatggcctggctggagaccctgagccaggacctgcggccccctgtgatcctgatccggggcaaccaggagaatgtgctgaccttctactgccagtag

SEQ ID NO: 170186 - DNA, 3090 bp, synthetic construct
  misc_feature 1..3090: note = Description of Artificial Sequence: Synthetic coding sequence
  source 1..3090: mol_type = other DNA
atggccgagctgcccaccacagagaccccaggagatgccaccctgtgcagcggccgcttcaccatcagcaccctgctgagcagtgatgagcccagccccccagctgcctatgacagcagccaccccagccacctgacccacagcagcaccttctgcatgaggaccttcggctacaacaccattgatgtggtgcccacctatgagcactacgccaacagcacccagcccggggagcccaggaaggtgcggcccaccctggccgacctgcacagcttcctgaaggagggccgccacctgcacgccctggcctttgacagccggcccagccatgagatgacagatggcctggtggagggggaggccggcaccagcagcgagaagaaccctgaggagcctgtgcgcttcggctgggtgaagggcgtgatgatccgctgcatgctgaacatctggggcgtcatcctgtacctgcggctgccctggatcacagcccaggccggcatcgtgctgacctggatcatcatcctgctgtctgtgacagtgaccagcatcaccggcctgagcatcagcgccatcagcaccaacgggaaggtgaagagcggcggcacctacttcctgatcagccgcagcctgggccctgagctgggcggcagcatcggcctcatctttgcctttgccaatgctgtgggcgtggccatgcacacagtgggctttgctgagaccgtgcgggacctgctgcaggagtatggagcccccatcgtggaccccatcaatgacatccgcatcatcgctgtggtgtctgtgacagtgctgctggccatcagcctggccggcatggagtgggagagcaaggcccaggtgctcttcttcctggtgatcatggtgtcctttgccaactacctggtgggcaccctcatccccccatctgaggacaaggccagcaagggcttcttctcctacagagctgacatctttgtgcagaacctggtgcctgactggaggggcccagatggcaccttcttcggcatgttcagcatcttcttccccagcgccaccggcatcctggccggggccaacatcagcggggacctgaaggaccctgccatcgccatccccaagggcaccctgatggccatcttctggaccaccatctcctacctggccatcagcgccaccatcggcagctgtgtggtgagagatgccagcggcgtgctgaatgacacagtgaccccaggctggggcgcctgtgagggcctggcctgcagctatggctggaacttcacagagtgcacccagcagcacagctgccactacggcctcatcaactactaccagaccatgtccatggtgtctggctttgcccccctcatcacagctggcatctttggagccaccctgagcagcgccctggcctgcctggtgtctgctgccaaggtgttccagtgcctgtgtgaggaccagctgtaccccctgattggcttcttcggcaagggctacggcaagaacaaggagcctgtgcggggctacctgctggcctatgccatcgctgtggccttcatcatcatcgccgagctgaacaccatcgcccccatcatcagcaacttcttcctgtgcagctatgccctgatcaacttcagctgcttccacgccagcatcaccaacagccctggctggaggcccagcttccagtactacaacaagtgggccgccctgtttggagccatcatctctgtggtgatcatgttcctgctgacctggtgggccgccctgattgccatcggcgtggtgctcttcctgctgctgtatgtgatctacaagaagccagaggtgaactggggcagctctgtgcaggccggcagctacaacctggccctgagctacagcgtgggcctgaatgaggtggaggaccacatcaagaactaccggccccagtgcctggtgctgaccggcccccccaacttccggcctgccctggtggactttgtgggcaccttcaccaggaacctgagcctgatgatctgtggccacgtgctgattggcccccacaagcagaggatgcctgagctgcagctgattgccaacggccacaccaagtggctgaacaagaggaagatcaaggccttctacagtgatgtgattgctgaggacctgcggcggggcgtgcagatcctgatgcaggccgccggcctgggccgcatgaagcccaacatcctggtggtgggcttcaagaagaactggcagagcgcccacccagccaccgtggaggactacatcggcatcctgcatgatgcctttgacttcaactacggcgtgtgtgtgatgaggatgagggagggcctgaatgtgtccaagatgatgcaggcccacatcaaccctgtgtttgatcctgcagaagatggcaaggaggccagcgcccggggggcccggcccagcgtgtctggggccctggaccccaaggccctggtgaaggaggagcaggccaccaccatcttccagagcgagcagggcaagaagaccatcgacatctactggctgtttgatgatggcggcctgaccctgctgatcccctacctgctgggcaggaagaggcgctggagcaagtgcaagatccgggtgtttgtgggcggccagatcaacaggatggaccaggagaggaaggccatcatcagcctgctgagcaagttccggctgggcttccacgaggtgcacatcctgcctgacatcaaccagaaccccagggctgagcacaccaagagatttgaggacatgattgcccccttccggctgaatgatggcttcaaggatgaggccaccgtgaatgagatgaggcgggactgcccctggaagatcagtgatgaggagatcaccaagaacagagtgaagagcctgcggcaggtgcggctgaatgagatcgtgctggactacagcagagatgctgccctgattgtcatcaccctgcccatcggcaggaagggcaagtgccccagcagcctgtacatggcctggctggagaccctgagccaggacctgcggccccctgtgatcctgatccggggcaaccaggagaatgtgctgaccttctactgccagtag

SEQ ID NO: 170187 - DNA, 3093 bp, synthetic construct
  misc_feature 1..3093: note = Description of Artificial Sequence: Synthetic coding sequence
  source 1..3093: mol_type = other DNA
atggccgagctgcccaccacagagaccccaggagatgccaccctgtgcagcggccgcttcaccatcagcaccctgctgagcagtgatgagcccagccccccagctgcctatgacagcagccaccccagccacctgacccacagcagcaccttctgcatgaggaccttcggctacaacaccattgatgtggtgcccacctatgagcactacgccaacagcacccagcccggggagcccaggaaggtgcggcccaccctggccgacctgcacagcttcctgaagcaggagggccgccacctgcacgccctggcctttgacagccggcccagccatgagatgacagatggcctggtggagggggaggccggcaccagcagcgagaagaaccctgaggagcctgtgcgcttcggctgggtgaagggcgtgatgatccgctgcatgctgaacatctggggcgtcatcctgtacctgcggctgccctggatcacagcccaggccggcatcgtgctgacctggatcatcatcctgctgtctgtgacagtgaccagcatcaccggcctgagcatcagcgccatcagcaccaacgggaaggtgaagagcggcggcacctacttcctgatcagccgcagcctgggccctgagctgggcggcagcatcggcctcatctttgcctttgccaatgctgtgggcgtggccatgcacacagtgggctttgctgagaccgtgcgggacctgctgcaggagtatggagcccccatcgtggaccccatcaatgacatccgcatcatcgctgtggtgtctgtgacagtgctgctggccatcagcctggccggcatggagtgggagagcaaggcccaggtgctcttcttcctggtgatcatggtgtcctttgccaactacctggtgggcaccctcatccccccatctgaggacaaggccagcaagggcttcttctcctacagagctgacatctttgtgcagaacctggtgcctgactggaggggcccagatggcaccttcttcggcatgttcagcatcttcttccccagcgccaccggcatcctggccggggccaacatcagcggggacctgaaggaccctgccatcgccatccccaagggcaccctgatggccatcttctggaccaccatctcctacctggccatcagcgccaccatcggcagctgtgtggtgagagatgccagcggcgtgctgaatgacacagtgaccccaggctggggcgcctgtgagggcctggcctgcagctatggctggaacttcacagaatgtacccagcagcacagctgccactacggcctcatcaactactaccagaccatgtccatggtgtctggctttgcccccctcatcacagctggcatctttggagccaccctgagcagcgccctggcctgcctggtgtctgctgccaaggtgttccagtgcctgtgtgaggaccagctgtaccccctcatcggcttcttcggcaagggctacggcaagaacaaggagcctgtgcggggctacctgctggcctatgccatcgctgtggccttcatcatcatcgccgagctgaacaccatcgcccccatcatcagcaacttcttcctgtgcagctatgccctgatcaacttcagctgcttccacgccagcatcaccaacagccctggctggaggcccagcttccagtactacaacaagtgggccgccctgtttggagccatcatctctgtggtgatcatgttcctgctgacctggtgggccgccctgattgccatcggcgtggtgctcttcctgctgctgtatgtgatctacaagaagccagaggtgaactggggcagctctgtgcaggccggcagctacaacctggccctgagctacagcgtgggcctgaatgaggtggaggaccacatcaagaactaccggccccagtgcctggtgctgactggaccacccaacttccggcctgccctggtggactttgtgggcaccttcaccaggaacctgagcctgatgatctgtggccacgtgctgattggcccccacaagcagaggatgcctgagctgcagctgattgccaacggccacaccaagtggctgaacaagaggaagatcaaggccttctacagtgatgtgattgctgaggacctgcggcggggcgtgcagatcctgatgcaggccgccggcctgggccgcatgaagcccaacatcctggtggtgggcttcaagaagaactggcagagcgcccacccagccaccgtggaggactacatcggcatcctgcatgatgcctttgacttcaactatggagtgtgtgtgatgaggatgagggagggcctgaatgtgtccaagatgatgcaggcccacatcaaccctgtgtttgatcctgcagaagatggcaaggaggccagcgcccggggggcccggcccagcgtgtctggggccctggaccccaaggccctggtgaaggaggagcaggccaccaccatcttccagagcgagcagggcaagaagaccatcgacatctactggctgtttgatgatggcggcctgaccctgctgatcccctacctgctgggcaggaagaggcgctggagcaagtgcaagatccgggtgtttgtgggcggccagatcaacaggatggaccaggagaggaaggccatcatcagcctgctgagcaagttccggctgggcttccacgaggtgcacatcctgcctgacatcaaccagaaccccagggctgagcacaccaagagatttgaggacatgattgcccccttccggctgaatgatggcttcaaggatgaggccaccgtgaatgagatgagaagagactgcccctggaagatcagtgatgaggagatcaccaagaacagagtgaagagcctgcggcaggtgcggctgaatgaaattgtgctggactacagcagagatgctgccctgattgtcatcaccctgcccatcggcaggaaaggaaaatgtcccagcagcctgtacatggcctggctggagaccctgagccaggacctgcggccccctgtgatcctgatccggggcaaccaggagaatgtgctgaccttctactgccagtag

SEQ ID NO: 170188 - DNA, 3090 bp, synthetic construct; identical to SEQ ID NO: 170186
  misc_feature 1..3090: note = Description of Artificial Sequence: Synthetic coding sequence
  source 1..3090: mol_type = other DNA

SEQ ID NO: 170189 - DNA, 1293 bp, synthetic construct
  misc_feature 1..1293: note = Description of Artificial Sequence: Synthetic coding sequence
  source 1..1293: mol_type = other DNA
atgagcctgaacaacagcagcaatgtgttcctggacagcgtgcccagcaacaccaaccgcttccaggtgtctgtcatcaatgaaaaccacgagagcagcgctgctgctgatgacaacacagaccccccccactatgaggagaccagctttggagatgaggcccagaagaggctgcgcatctccttccggcccggcaaccaggagtgctatgacaacttcctgcagagcggggagacagccaagacagatgccagcttccacgcctatgacagccacaccaacacctactacctgcagaccttcggccacaacaccatggatgctgtgcccaagattgagtactacagaaacacaggcagcatcagcggccccaaggtgaaccggcccagcctgctggagatccacgagcagctggccaagaatgtggccgtgacccccagcagcgctgacagagtggccaatggagatggcatccctggagatgagcaggccgagaacaaggaggatgaccaggccggcgtggtgaagtttggctgggtgaagggcgtgctggtgcgctgcatgctgaacatctggggcgtgatgctgttcatccggctgtcctggatcgtgggggaggccggcatcggcctgggcgtgctgatcatcctgctgagcaccatggtgaccagcatcaccggcctgagcaccagcgccatcgccaccaacggctttgtgcggggcggcggggcctactacctgatcagccgcagcctgggccctgagtttggaggcagcatcggcctcatctttgcctttgccaatgctgtggccgtggccatgtatgtggtgggctttgctgagaccgtggtggacctgctgaaggagagtgacagcatgatggtggaccccaccaatgacatccgcatcatcggcagcatcaccgtggtgatcctgctgggcatctctgtggccggcatggagtgggaggccaaggcccaggtgatcctgctggtgatcctgctgattgccatcgccaacttcttcatcggcaccgtcatccccagcaacaatgagaagaagagccggggcttcttcaactaccaggccagcatctttgctgagaactttggcccccgcttcaccaagggggagggcttcttctctgtgtttgccatcttcttccctgctgccaccggcatcctggccggggccaacatcagcggggacctggaggccctgaggaagcagggcgccagccccctgccccagggcgcccagagcagaagaagacggcagaccagcctcatctag

SEQ ID NO: 170190 - DNA, 3300 bp, synthetic construct
  misc_feature 1..3300: note = Description of Artificial Sequence: Synthetic coding sequence
  source 1..3300: mol_type = other DNA
atgagcctgaacaacagcagcaatgtgttcctggacagcgtgcccagcaacaccaaccgcttccaggtgtctgtcatcaatgaaaaccacgagagcagcgctgctgctgatgacaacacagaccccccccactatgaggagaccagctttggagatgaggcccagaagaggctgcgcatctccttccggcccggcaaccaggagtgctatgacaacttcctgcagagcggggagacagccaagacagatgccagcttccacgcctatgacagccacaccaacacctactacctgcagaccttcggccacaacaccatggatgctgtgcccaagattgagtactacagaaacacaggcagcatcagcggccccaaggtgaaccggcccagcctgctggagatccacgagcagctggccaagaatgtggccgtgacccccagcagcgctgacagagtggccaatggagatggcatccctggagatgagcaggccgagaacaaggaggatgaccaggccggcgtggtgaagtttggctgggtgaagggcgtgctggtgcgctgcatgctgaacatctggggcgtgatgctgttcatccggctgtcctggatcgtgggggaggccggcatcggcctgggcgtgctgatcatcctgctgagcaccatggtgaccagcatcaccggcctgagcaccagcgccatcgccaccaacggctttgtgcggggcggcggggcctactacctgatcagccgcagcctgggccctgagtttggaggcagcatcggcctcatctttgcctttgccaatgctgtggccgtggccatgtatgtggtgggctttgctgagaccgtggtggacctgctgaaggagagtgacagcatgatggtggaccccaccaatgacatccgcatcatcggcagcatcaccgtggtgatcctgctgggcatctctgtggccggcatggagtgggaggccaaggcccaggtgatcctgctggtgatcctgctgattgccatcgccaacttcttcatcggcaccgtcatccccagcaacaatgagaagaagagccggggcttcttcaactaccaggccagcatctttgctgagaactttggcccccgcttcaccaagggggagggcttcttctctgtgtttgccatcttcttccctgctgccaccggcatcctggccggggccaacatcagcggggacctggaggacccccaggatgccatcccccggggcaccatgctggccatcttcatcaccaccgtggcctacctgggcgtggccatctgtgtgggcgcctgtgtggtgagagatgccaccggcaacatgaatgacaccatcatcagcggcatgaactgcaatggcagcgctgcctgtggcctgggctatgacttcagccgctgcagacatgagccctgccagtatggcctgatgaacaacttccaggtgatgtccatggtgtctggcttcggccccctcatcacagctggcatcttcagcgccaccctgagcagcgccctggccagcctggtgtctgcccccaaggtgttccaggccctgtgcaaggacaacatctacaaggccctgcagttctttgccaagggctacggcaagaacaatgagcccctgcggggctacatcctgaccttcctgattgccatggccttcatcctgattgctgagctgaacaccatcgcccccatcatcagcaacttcttcctggccagctatgccctgatcaacttcagctgcttccacgccagctatgccaagagccctggctggaggcctgcctacggcatctacaacatgtgggtgtccctgtttggagctgtgctgtgctgtgctgtgatgtttgtgatcaactggtgggccgccgtcatcacctacgtgattgagttcttcctgtatgtgtatgtgacctgcaagaagccagatgtgaactggggcagcagcacccaggccctgtcctatgtgtctgccctggacaatgccctggagctgaccaccgtggaggaccacgtgaagaacttccggccccagtgcatcgtgctgaccggcggccccatgaccaggcctgccctgctggacatcacccacgccttcaccaagaacagcggcctgtgcatctgctgtgaggtgtttgtgggccccaggaagctgtgtgtgaaggagatgaacagcggcatggccaagaagcaggcctggctgatcaagaacaagatcaaggccttctatgctgctgtggccgctgactgcttcagagatggagtgcgcagcctgctgcaggccagcggcctgggccgcatgaagcccaacaccctggtgattggctacaagaagaactggaggaaggcccccctgacagaaattgagaactacgtgggcatcatccatgatgcctttgattttgaaattggagtggtgattgtgcgcatcagccagggctttgacatcagccaggtgctgcaggtgcaggaggagctggagcggctggagcaggagcggctggccctggaggccaccatcaaggacaatgaatgtgaggaggagagcggcggcatccggggcctcttcaagaaggccggcaagctgaacatcaccaagaccacccccaagaaggatggcagcatcaacaccagccagagcatgcacgtgggggagttcaaccagaagctggtggaggccagcacccagttcaagaagaagcaggagaagggcaccattgatgtgtggtggctgtttgatgatggcggcctgaccctgctgatcccctacatcctgaccctgaggaagaagtggaaggactgcaagctgcgcatctacgtgggcggcaagatcaaccgcatcgaggaggagaagatcgtgatggccagcctgctgagcaagttccgcatcaagtttgctgacatccacatcatcggggacatcaacatccggcccaacaaggagagctggaaggtgtttgaggagatgattgagccctaccgcctgcacgagagctgcaaggacctgaccacagctgagaagctgaagcgggagaccccctggaagatcacagatgctgagctggaggccgtgaaggagaagagctaccggcaggtgcggctgaatgagctgctgcaggagcacagcagagctgccaacctgattgtgctgagcctgcctgtggccaggaagggcagcatcagtgacctgctgtacatggcctggctggagatcctgaccaagaacctgccccctgtgctgctggtgcggggcaaccacaagaatgtgctgaccttctacagctag

SEQ ID NO: 170191 - DNA, 3300 bp, synthetic construct
  misc_feature 1..3300: note = Description of Artificial Sequence: Synthetic coding sequence
  source 1..3300: mol_type = other DNA
atgagcctgaacaacagcagcaatgtgttcctggacagcgtgcccagcaacaccaaccgcttccaggtgtctgtcatcaatgaaaaccacgagagcagcgctgctgctgatgacaacacagaccccccccactatgaggagaccagctttggagatgaggcccagaagaggctgcgcatctccttccggcccggcaaccaggagtgctatgacaacttcctgcagagcggggagacagccaagacagatgccagcttccacgcctatgacagccacaccaacacctactacctgcagaccttcggccacaacaccatggatgctgtgcccaagattgagtactacagaaacacaggcagcatcagcggccccaaggtgaaccggcccagcctgctggagatccacgagcagctggccaagaatgtggccgtgacccccagcagcgctgacagagtggccaatggagatggcatccctggagatgagcaggccgagaacaaggaggatgaccaggccggcgtggtgaagtttggctgggtgaagggcgtgctggtgcgctgcatgctgaacatctggggcgtgatgctgttcatccggctgtcctggatcgtgggggaggccggcatcggcctgggcgtcatcatcatcggcctgtctgtggtggtgaccaccctgaccggcatctccatgtctgccatctgcaccaacggggtggtgcggggcggcggggcctactacctgatcagccgcagcctgggccctgagtttggaggcagcatcggcctcatctttgcctttgccaatgctgtggccgtggccatgtatgtggtgggctttgctgagaccgtggtggacctgctgaaggagagtgacagcatgatggtggaccccaccaatgacatccgcatcatcggcagcatcaccgtggtgatcctgctgggcatctctgtggccggcatggagtgggaggccaaggcccaggtgatcctgctggtgatcctgctgattgccatcgccaacttcttcatcggcaccgtcatccccagcaacaatgagaagaagagccggggcttcttcaactaccaggccagcatctttgctgagaactttggcccccgcttcaccaagggggagggcttcttctctgtgtttgccatcttcttccctgctgccaccggcatcctggccggggccaacatcagcggggacctggaggacccccaggatgccatcccccggggcaccatgctggccatcttcatcaccaccgtggcctacctgggcgtggccatctgtgtgggcgcctgtgtggtgagagatgccaccggcaacatgaatgacaccatcatcagcggcatgaactgcaatggcagcgctgcctgtggcctgggctatgacttcagccgctgcagacatgagccctgccagtatggcctgatgaacaacttccaggtgatgtccatggtgtctggcttcggccccctcatcacagctggcatcttcagcgccaccctgagcagcgccctggccagcctggtgtctgcccccaaggtgttccaggccctgtgcaaggacaacatctacaaggccctgcagttctttgccaagggctacggcaagaacaatgagcccctgcggggctacatcctgaccttcctgattgccatggccttcatcctgattgctgagctgaacaccatcgcccccatcatcagcaacttcttcctggccagctatgccctgatcaacttcagctgcttccacgccagctatgccaagagccctggctggaggcctgcctacggcatctacaacatgtgggtgtccctgtttggagctgtgctgtgctgtgctgtgatgtttgtgatcaactggtgggccgccgtcatcacctacgtgattgagttcttcctgtatgtgtatgtgacctgcaagaagccagatgtgaactggggcagcagcacccaggccctgtcctatgtgtctgccctggacaatgccctggagctgaccaccgtggaggaccacgtgaagaacttccggccccagtgcatcgtgctgaccggcggccccatgaccaggcctgccctgctggacatcacccacgccttcaccaagaacagcggcctgtgcatctgctgtgaggtgtttgtgggccccaggaagctgtgtgtgaaggagatgaacagcggcatggccaagaagcaggcctggctgatcaagaacaagatcaaggccttctatgctgctgtggccgctgactgcttcagagatggagtgcgcagcctgctgcaggccagcggcctgggccgcatgaagcccaacaccctggtgattggctacaagaagaactggaggaaggcccccctgacagaaattgagaactacgtgggcatcatccatgatgcctttgattttgaaattggagtggtgattgtgcgcatcagccagggctttgacatcagccaggtgctgcaggtgcaggaggagctggagcggctggagcaggagcggctggccctggaggccaccatcaaggacaatgaatgtgaggaggagagcggcggcatccggggcctcttcaagaaggccggcaagctgaacatcaccaagaccacccccaagaaggatggcagcatcaacaccagccagagcatgcacgtgggggagttcaaccagaagctggtggaggccagcacccagttcaagaagaagcaggagaagggcaccattgatgtgtggtggctgtttgatgatggcggcctgaccctgctgatcccctacatcctgaccctgaggaagaagtggaaggactgcaagctgcgcatctacgtgggcggcaagatcaaccgcatcgaggaggagaagatcgtgatggccagcctgctgagcaagttccgcatcaagtttgctgacatccacatcatcggggacatcaacatccggcccaacaaggagagctggaaggtgtttgaggagatgattgagccctaccgcctgcacgagagctgcaaggacctgaccacagctgagaagctgaagcgggagaccccctggaagatcacagatgctgagctggaggccgtgaaggagaagagctaccggcaggtgcggctgaatgagctgctgcaggagcacagcagagctgccaacctgattgtgctgagcctgcctgtggccaggaagggcagcatcagtgacctgctgtacatggcctggctggagatcctgaccaagaacctgccccctgtgctgctggtgcggggcaaccacaagaatgtgctgaccttctacagctag

SEQ ID NO: 170192 - DNA, 1782 bp, synthetic construct
  misc_feature 1..1782: note = Description of Artificial Sequence: Synthetic coding sequence
  source 1..1782: mol_type = other DNA
atgctgaacatctggggcgtgatgctgttcatccggctgtcctggatcgtgggggaggccggcatcggcctgggcgtgctgatcatcctgctgagcaccatggtgaccagcatcaccggcctgagcaccagcgccatcgccaccaatggatttgtgcggggcggcggggcctactacctgatcagccgcagcctgggccctgagtttggaggcagcatcggcctcatctttgcctttgccaatgctgtggccgtggccatgtatgtggtgggctttgctgagaccgtggtggacctgctgaaggagagtgacagcatgatggtggaccccaccaatgacatccgcatcatcggcagcatcaccgtggtgatcctgctgggcatctctgtggccggcatggagtgggaggccaaggcccaggtgatcctgctggtgatcctgctgattgccatcgccaacttcttcatcggcaccgtcatccccagcaacaatgagaagaagagccggggcttcttcaactaccaggccagcatctttgctgaaaattttggcccccgcttcaccaagggggagggcttcttctctgtgtttgccatcttcttccctgctgccaccggcatcctggccggggccaacatcagcggggacctggaggacccccaggatgccatcccccggggcaccatgctggccatcttcatcaccaccgtggcctacctgggcgtggccatctgtgtgggcgcctgtgtggtgagagatgccactggaaacatgaatgacaccatcatcagcggcatgaactgcaatggatctgctgcctgtggcctgggctatgacttcagccgctgcagacatgagccctgccagtatggcctgatgaacaacttccaggtgatgtccatggtgtctggcttcggccccctcatcacagctggcatcttcagcgccaccctgagcagcgccctggccagcctggtgtctgcccccaaggtgttccaggccctgtgcaaggacaacatctacaaggccctgcagttctttgccaagggctacggcaagaacaatgagcccctgcggggctacatcctgaccttcctgattgccatggccttcatcctgattgctgagctgaacaccatcgcccccatcatcagcaacttcttcctggccagctatgccctgatcaacttcagctgcttccacgccagctatgccaagagccctggctggaggcctgcctacggcatctacaacatgtgggtgtccctgtttggagctgtgctgtgctgtgctgtgatgtttgtgatcaactggtgggccgctgtgatcacctacgtgattgagttcttcctgtatgtgtatgtgacctgcaagaagccagatgtgaactggggcagcagcacccaggccctgtcctatgtgtctgccctggacaatgccctggagctgaccaccgtggaggaccacgtgaagaacttccggccccagtgcatcgtgctgactggaggccccatgaccaggcctgccctgctggacatcacccacgccttcaccaagaacagcggcctgtgcatctgctgtgaggtgtttgtgggccccaggaagctgtgtgtgaaggagatgaacagcggcatggccaagacaggcctggcctacaaggagcagaaccagggcttcctgtgctgcagcggcggccgcctcttccagggctggtgccccaagagcagcagcggcctgcggctgaggaagaatgagaccaagcacagcggggactggatctag

SEQ ID NO: 170193 - DNA, 540 bp, synthetic construct
  misc_feature 1..540: note = Description of Artificial Sequence: Synthetic coding sequence
  source 1..540: mol_type = other DNA
atgaggaccatgagagctgtgcagctgcagatgaccatcctgacccaccacatcatgaagaagcccctgctgggcatgaagctgaggaaggacagcgagagcgccctgggcctgggcatccgcagcgccatgaccatcagcagcaagcaggccctgtcctatgtgtctgccctggacaatgccctggagctgaccaccgtggaggaccacgtgaagaacttccggccccagtgcatcgtgctgaccggcggccccatgaccaggcctgccctgctggacatcacccacgccttcaccaagaacagcggcctgtgcatctgctgtgaggtgtttgtgggccccaggaagctgtgtgtgaaggagatgaacagcggcatggccaagaagcaggcctggctgatcaagaacaagatcaaggccttctatgctgctgtggccgctgactgcttcagagatggagtgcgcagcctgctgcaggccagcggcctgggccgcatgaagcccaacaccctggtgattggctacaagaagaactggtag

SEQ ID NO: 170194 - DNA, 3300 bp, synthetic construct; identical to SEQ ID NO: 170190
  misc_feature 1..3300: note = Description of Artificial Sequence: Synthetic coding sequence
  source 1..3300: mol_type = other DNA

SEQ ID NO: 170195 - DNA, 1947 bp, synthetic construct
  misc_feature 1..1947: note = Description of Artificial Sequence: Synthetic coding sequence
  source 1..1947: mol_type = other DNA
atgctgaacatctggggcgtgatgctgttcatccggctgtcctggatcgtgggggaggccggcatcggcctgggcgtgctgatcatcctgctgagcaccatggtgaccagcatcaccggcctgagcaccagcgccatcgccaccaatggatttgtgcggggcggcggggcctactacctgatcagccgcagcctgggccctgagtttggaggcagcatcggcctcatctttgcctttgccaatgctgtggccgtggccatgtatgtggtgggctttgctgagaccgtggtggacctgctgaaggagagtgacagcatgatggtggaccccaccaatgacatccgcatcatcggcagcatcaccgtggtgatcctgctgggcatctctgtggccggcatggagtgggaggccaaggcccaggtgatcctgctggtgatcctgctgattgccatcgccaacttcttcatcggcaccgtcatccccagcaacaatgagaagaagagccggggcttcttcaactaccaggccagcatctttgctgaaaattttggcccccgcttcaccaagggggagggcttcttctctgtgtttgccatcttcttccctgctgccaccggcatcctggccggggccaacatcagcggggacctggaggacccccaggatgccatcccccggggcaccatgctggccatcttcatcaccaccgtggcctacctgggcgtggccatctgtgtgggcgcctgtgtggtgagagatgccactggaaacatgaatgacaccatcatcagcggcatgaactgcaatggatctgctgcctgtggcctgggctatgacttcagccgctgcagacatgagccctgccagtatggcctgatgaacaacttccaggtgatgtccatggtgtctggcttcggccccctcatcacagctggcatcttcagcgccaccctgagcagcgccctggccagcctggtgtctgcccccaaggtgttccaggccctgtgcaaggacaacatctacaaggccctgcagttctttgccaagggctacggcaagaacaatgagcccctgcggggctacatcctgaccttcctgattgccatggccttcatcctgattgctgagctgaacaccatcgcccccatcatcagcaacttcttcctggccagctatgccctgatcaacttcagctgcttccacgccagctatgccaagagccctggctggaggcctgcctacggcatctacaacatgtgggtgtccctgtttggagctgtgctgtgctgtgctgtgatgtttgtgatcaactggtgggccgctgtgatcacctacgtgattgagttcttcctgtatgtgtatgtgacctgcaagaagccagatgtgaactggggcagcagcacccaggccctgtcctatgtgtctgccctggacaatgccctggagctgaccaccgtggaggaccacgtgaagaacttccggccccagtgcatcgtgctgactggaggccccatgaccaggcctgccctgctggacatcacccacgccttcaccaagaacagcggcctgtgcatctgctgtgaggtgtttgtgggccccaggaagctgtgtgtgaaggagatgaacagcggcatggccaagaagcaggcctggctgatcaagaacaagatcaaggccttctacgccgctgtggccgctgactgcttcagagatggagtgcgcagcctgctgcaggccagcggcctgggccgcatgaagcccaacaccctggtgattggctacaagaagaactggaggaaggcccccctgacagaaattgaaaattatgtgggcatcatccatgatgcctttgattttgaaattggagtggtgattgtgcgcatcagccagggctttgacatcagccaggtgctgcaggtgcaggaggagctggagcggctggagtag

SEQ ID NO: 170196 - DNA, 3639 bp, synthetic construct
  misc_feature 1..3639: note = Description of Artificial Sequence: Synthetic coding sequence
  source 1..3639: mol_type = other DNA
atggagccccggcccacagcccccagcagcggggcccctggcctggccggcgtgggggagaccccatctgctgctgccctggccgccgcccgggtggagctgcctggaacagctgtgcccagcgtgcctgaagatgctgccccagccagcagagatggcggcggcgtgagagatgagggccctgctgctgctggagatggcctgggccggcccctgggccccacccccagccagagccgcttccaggtggacctggtgtctgaaaatgccggccgggctgctgctgctgctgctgctgctgctgctgctgctgctgctgctggagctggagctggggccaagcagaccccagcagatggagaggccagcggggagagcgagcccgccaagggcagcgaggaggccaagggccgcttccgggtgaactttgtggaccctgctgccagcagcagcgctgaggacagcctgagtgatgctgctggggtgggcgtggatggccccaacgtgtccttccagaatggaggagacacagtgctgtctgagggcagcagcctgcacagcggcggcggcggcggcagcggccaccaccagcactactactatgacacccacaccaacacctactacctgcggaccttcggccacaacaccatggatgctgtgcccagaattgaccactaccgccacacagctgcccagctgggggagaagctgctgcggcccagcctggccgagctgcatgatgagctggagaaggagccctttgaagatggctttgccaatggagaggagagcacccccaccagagatgctgtggtgacctacacagctgagagcaagggcgtggtgaagtttggctggatcaagggcgtgctggtgcgctgcatgctgaacatctggggcgtgatgctgttcatccggctgtcctggatcgtgggccaggccggcatcggcctgtctgtgctggtgatcatgatggccaccgtggtgaccaccatcaccggcctgagcaccagcgccatcgccaccaacggctttgtgcggggcggcggggcctactacctgatcagccgcagcctgggccctgagtttggaggagccatcggcctcatctttgcctttgccaatgctgtggccgtggccatgtatgtggtgggctttgctgagaccgtggtggagctgctgaaggagcacagcatcctgatgattgatgagatcaatgacatccgcatcatcggggccatcaccgtggtgatcctgctgggcatctctgtggccggcatggagtgggaggccaaggcccagatcgtgctgctggtgatcctgctgctggccatcggggactttgtgattggcaccttcatccccctggagagcaagaagcccaagggcttcttcggctacaagtctgagatcttcaatgaaaattttggaccagacttccgggaggaggagaccttcttctctgtgtttgccatcttcttccctgctgccaccggcatcctggccggggccaacatcagcggggacctggccgacccccagagcgccatccccaagggcaccctgctggccatcctgatcaccaccctggtgtatgtgggcattgctgtgtctgtgggcagctgtgtggtgagagatgccactggaaatgtgaatgacaccatcgtgacagagctgaccaactgcaccagcgctgcctgcaagctgaactttgacttcagcagctgtgagagcagcccctgcagctatggcctgatgaacaacttccaggtgatgtccatggtgtctggcttcacccccctcatctctgctggcatcttcagcgccaccctgagcagcgccctggccagcctggtgtctgcccccaagatcttccaggccctgtgcaaggacaacatctacccagccttccagatgtttgccaagggctacggcaagaacaatgagcccctgcggggctacatcctgaccttcctgattgccctgggcttcatcctgattgctgagctgaatgtcatcgcccccatcatcagcaacttcttcctggccagctatgccctgatcaacttcagcgtcttccacgccagcctggccaagagccctggctggaggcctgccttcaagtactacaacatgtggatcagcctgctgggcgccatcctgtgctgcatcgtgatgtttgtgatcaactggtgggccgccctgctgacctacgtgattgtgctgggcctgtacatctacgtgacctacaagaagccagatgtgaactggggcagcagcacccaggccctgacctacctgaatgccctgcagcacagcatccggctgagcggcgtggaggaccacgtgaagaacttccggccccagtgcctggtgatgactggagcccccaacagcaggcctgccctgctgcacctggtgcatgacttcaccaagaatgtgggcctgatgatctgtggccacgtgcacatgggcccccggcggcaggccatgaaggagatgagcattgaccaggccaagtaccagcgctggctgatcaagaacaagatgaaggccttctacgcccctgtgcatgctgatgacctgcgggagggcgcccagtacctgatgcaggccgccggcctgggccgcatgaagcccaacaccctggtgctgggcttcaagaaggactggctgcaggccgacatgagagatgtggacatgtacatcaacctcttccatgatgcctttgacatccagtatggagtggtggtgatccggctgaaggagggcctggacatcagccacctgcagggccaggaggagctgctgagcagccaggagaagagccctggcaccaaggatgtggtggtgtctgtggagtacagcaagaagagtgacctggacaccagcaagcccctgtctgagaagcccatcacccacaaggtggaggaggaggatggcaagacagccacccagcccctgctgaagaaggagagcaagggccccatcgtgcccctgaatgtggccgaccagaagctgctggaggccagcacccagttccagaagaagcagggcaagaacaccattgatgtgtggtggctgtttgatgatggcggcctgaccctgctgatcccctacctgctgaccaccaagaagaagtggaaggactgcaagatccgggtcttcatcggcggcaagatcaacagaattgaccatgacagaagagccatggccaccctgctgagcaagttcagaattgacttcagtgacatcatggtgctgggggacatcaacaccaagcccaagaaggagaacatcatcgcctttgaggagatcatcgagccctaccgcctgcatgaagatgacaaggagcaggacattgctgacaagatgaaggaggatgagccctggaggatcacagacaatgagctggagctgtacaagaccaagacctaccggcagatccggctgaatgagctgctgaaggagcacagcagcacagccaacatcatcgtgatgagcctgcctgtggccaggaaaggagctgtgagcagcgccctgtacatggcctggctggaggccctgagcaaggacctgccccccatcctgctggtgcggggcaaccaccagagcgtgctgaccttctacagctag

SEQ ID NO: 170197 - DNA, 3591 bp, synthetic construct
  misc_feature 1..3591: note = Description of Artificial Sequence: Synthetic coding sequence
  source 1..3591: mol_type = other DNA
atggagccccggcccacagcccccagcagcggggcccctggcctggccggcgtgggggagaccccatctgctgctgccctggccgccgcccgggtggagctgcctggaacagctgtgcccagcgtgcctgaagatgctgccccagccagcagagatggcggcggcgtgagagatgagggccctgctgctgctggagatggcctgggccggcccctgggccccacccccagccagagccgcttccaggtggacctggtgtctgaaaatgccggccgggctgctgctgctgctgctgctgctgctgctgctgctgctgctgctggagctggagctggggccaagcagaccccagcagatggagaggccagcggggagagcgagcccgccaagggcagcgaggaggccaagggccgcttccgggtgaactttgtggaccctgctgccagcagcagcgctgaggacagcctgagtgatgctgctggggtgggcgtggatggccccaacgtgtccttccagaatggaggagacacagtgctgtctgagggcagcagcctgcacagcggcggcggcggcggcagcggccaccaccagcactactactatgacacccacaccaacacctactacctgcggaccttcggccacaacaccatggatgctgtgcccagaattgaccactaccgccacacagctgcccagctgggggagaagctgctgcggcccagcctggccgagctgcatgatgagctggagaaggagccctttgaagatggctttgccaatggagaggagagcacccccaccagagatgctgtggtgacctacacagctgagagcaagggcgtggtgaagtttggctggatcaagggcgtgctggtgcgctgcatgctgaacatctggggcgtgatgctgttcatccggctgtcctggatcgtgggccaggccggcatcggcctgtctgtgctggtgatcatgatggccaccgtggtgaccaccatcaccggcctgagcaccagcgccatcgccaccaacggctttgtgcggggcggcggggcctactacctgatcagccgcagcctgggccctgagtttggaggagccatcggcctcatctttgcctttgccaatgctgtggccgtggccatgtatgtggtgggctttgctgagaccgtggtggagctgctgaaggagcacagcatcctgatgattgatgagatcaatgacatccgcatcatcggggccatcaccgtggtgatcctgctgggcatctctgtggccggcatggagtgggaggccaaggcccagatcgtgctgctggtgatcctgctgctggccatcggggactttgtgattggcaccttcatccccctggagagcaagaagcccaagggcttcttcggctacaagtctgagatcttcaatgaaaattttggaccagacttccgggaggaggagaccttcttctctgtgtttgccatcttcttccctgctgccaccggcatcctggccggggccaacatcagcggggacctggccgacccccagagcgccatccccaagggcaccctgctggccatcctgatcaccaccctggtgtatgtgggcattgctgtgtctgtgggcagctgtgtggtgagagatgccactggaaatgtgaatgacaccatcgtgacagagctgaccaactgcaccagcgctgcctgcaagctgaactttgacttcagcagctgtgagagcagcccctgcagctatggcctgatgaacaacttccaggtgatgtccatggtgtctggcttcacccccctcatctctgctggcatcttcagcgccaccctgagcagcgccctggccagcctggtgtctgcccccaagatcttccaggccctgtgcaaggacaacatctacccagccttccagatgtttgccaagggctacggcaagaacaatgagcccctgcggggctacatcctgaccttcctgattgccctgggcttcatcctgattgctgagctgaatgtcatcgcccccatcatcagcaacttcttcctggccagctatgccctgatcaacttcagcgtcttccacgccagcctggccaagagccctggctggaggcctgccttcaagtactacaacatgtggatcagcctgctgggcgccatcctgtgctgcatcgtgatgtttgtgatcaactggtgggccgccctgctgacctacgtgattgtgctgggcctgtacatctacgtgacctacaagaagccagatgtgaactggggcagcagcacccaggccctgacctacctgaatgccctgcagcacagcatccggctgagcggcgtggaggaccacgtgaagaacttccggccccagtgcctggtgatgactggagcccccaacagcaggcctgccctgctgcacctggtgcatgacttcaccaagaatgtgggcctgatgatctgtggccacgtgcacatgggcccccggcggcaggccatgaaggagatgagcattgaccaggccaagtaccagcgctggctgatcaagaacaagatgaaggccttctacgcccctgtgcatgctgatgacctgcgggagggcgcccagtacctgatgcaggccgccggcctgggccgcatgaagcccaacaccctggtgctgggcttcaagaaggactggctgcaggccgacatgagagatgtggacatgtacatcaacctcttccatgatgcctttgacatccagtatggagtggtggtgatccggctgaaggagggcctggacatcagccacctgcagggccaggaggagctgctgagcagccaggagaagagccctggcaccaaggatgtggtggtgtctgtggagtacagcaagaagagtgacctggacaccagcaagcccctgtctgagaagcccatcacccacaaggagagcaagggccccatcgtgcccctgaatgtggccgaccagaagctgctggaggccagcacccagttccagaagaagcagggcaagaacaccattgatgtgtggtggctgtttgatgatggcggcctgaccctgctgatcccctacctgctgaccaccaagaagaagtggaaggactgcaagatccgggtcttcatcggcggcaagatcaacagaattgaccatgacagaagagccatggccaccctgctgagcaagttcagaattgacttcagtgacatcatggtgctgggggacatcaacaccaagcccaagaaggagaacatcatcgcctttgaggagatcatcgagccctaccgcctgcatgaagatgacaaggagcaggacattgctgacaagatgaaggaggatgagccctggaggatcacagacaatgagctggagctgtacaagaccaagacctaccggcagatccggctgaatgagctgctgaaggagcacagcagcacagccaacatcatcgtgatgagcctgcctgtggccaggaaaggagctgtgagcagcgccctgtacatggcctggctggaggccctgagcaaggacctgccccccatcctgctggtgcggggcaaccaccagagcgtgctgaccttctacagctag

SEQ ID NO: 170198 - DNA, 1788 bp, synthetic construct
  misc_feature 1..1788: note = Description of Artificial Sequence: Synthetic coding sequence
  source 1..1788: mol_type = other DNA
atgaagttcttctcctacatcctggtgtaccgccgcttcctgtttgtggtgttcaccgtgctggtgctgctgcccctgcccatcgtgctgcacaccaaggaggccgagtgtgcctacaccctgtttgtggtggccaccttctggctgacagaggccctgcccctgtctgtgacagccctgctgcccagcctgatgctgcccatgtttggcatcatgcccagcaagaaggtggccagcgcctacttcaaggacttccacctgctgctgattggagtcatctgcctggccaccagcattgagaagtggaacctgcacaagagaattgccctgaagatggtgatgatggtgggcgtgaacccagcctggctgaccctgggcttcatgagcagcacagccttcctgtccatgtggctgagcaacaccagcacagctgccatggtgatgcccatcgccgaggccgtggtgcagcagatcatcaatgctgaggccgaggtggaggccacccagatgacctacttcaacggcagcaccaaccacggcctggagattgatgagagcgtgaatggccacgagatcaatgaaaggaaggagaagaccaagcctgtgcccggctacaacaatgacaccgggaagatcagcagcaaggtggagctggagaagaacagcggcatgaggaccaagtaccgcaccaagaagggccacgtgaccaggaagctgacctgcctgtgcatcgcctacagcagcaccatcggcggcctgaccaccatcaccggcaccagcaccaacctgatctttgctgagtacttcaacacccgctacccagactgccgctgcctgaactttggctcctggttcaccttctccttccctgctgccctgatcatcctgctgctgtcctggatctggctgcagtggctgttcctgggcttcaacttcaaggagatgtttaaatgtgggaagaccaagacagtgcagcagaaggcctgtgccgaggtgatcaagcaggagtaccagaagctgggccccatccgctaccaggagatcgtgaccctggtgctcttcatcatcatggccctgctgtggttcagccgggaccccggctttgtgcccggctggagcgccctcttcagcgagtacccaggctttgccacagacagcacagtggccctgctgattggcctgctcttcttcctgatcccagccaagaccctgaccaagaccacccccaccggggagatcgtggcctttgactacagccccctcatcacctggaaggagttccagagcttcatgccctgggacatcgccatcctggtgggcggcggctttgccctggctgatggctgtgaggagagcggcctgagcaagtggattggcaacaagctgagccccctgggcagcctgcctgcctggctgatcatcctgatcagcagcctgatggtgaccagcctgacagaggtggccagcaacccagccaccatcaccctcttcctgcccatcctgagccccctggccgaggccatccacgtgaaccccctgtacatcctgatccccagcaccctgtgcaccagctttgccttcctgctgcctgtggccaaccccccaaatgccatcgtgttctcctatggccacctgaaggtgattgacatggtgaaggccggcctgggcgtgaacatcgtgggcgtggccgtggtgatgctgggcatctgcacctggatcgtgcccatgtttgacctgtacacctaccccagctgggccccagccatgagcaatgagaccatgccctag

SEQ ID NO: 170199 - DNA, 486 bp, synthetic construct
  misc_feature 1..486: note = Description of Artificial Sequence: Synthetic coding sequence
  source 1..486: mol_type = other DNA
atgctgcccatgtttggcatcatgcccagcaagaaggtggccagcgcctacttcaaggacttccacctgctgctgattggagtcatctgcctggccaccagcattgagaagtggaacctgcacaagagaattgccctgaagatggtgatgatggtgggcgtgaacccagcctggctgaccctgggcttcatgagcagcacagccttcctgtccatgtggctgagcaacaccagcacagctgccatggtgatgcccatcgccgaggccgtggtgcagcagatcatcaatgctgaggccgaggtggaggccacccagatgacctacttcaacggcagcaccaaccacggcctggagattgatgagagcgtgaatggccacgagatcaatgaaaggaaggagaagaccaagcctgtgcccggctacaacaatgacaccgggaagatcagcagcaaggtggagctggagaagtacctgcaggtgaggtag

SEQ ID NO: 170200 - DNA, 1881 bp, synthetic construct
  misc_feature 1..1881: note = Description of Artificial Sequence: Synthetic coding sequence
  source 1..1881: mol_type = other DNA
atgggcctgctgcagggcctgctgcgggtgaggaagctgctgctggtggtgtgtgtgcccctgctgctgctgcccctgcctgtgctgcaccccagcagcgaggccagctgtgcctacgtgctgattgtgacagctgtgtactgggtgtctgaggccgtgcccctgggcgccgccgccctggtgcctgccttcctgtaccccttctttggagtgctgcggagcaatgaggtggccgctgagtacttcaagaacaccaccctgctgctggtgggcgtcatctgtgtggccgctgctgtggagaagtggaacctgcacaagagaattgccctgaggatggtgctgatggccggggccaagccaggcatgctgctgctgtgcttcatgtgctgcaccaccctgctgtccatgtggctgagcaacaccagcaccacagccatggtgatgcccatcgtggaggccgtgctgcaggagctggtgtctgcagaagatgagcagctggtggccggcaacagcaacacagaggaggccgagcccatcagcctggatgtgaagaacagccagcccagcctggagctgatctttgtgaatgaggagagcaatgctgacctgaccaccctgatgcacaatgaaaacctgaatggagtgcccagcatcaccaaccccatcaagacagccaaccagcaccagggcaagaagcagcaccccagccaggagaagccccaggtgctgacccccagccccaggaagcagaagctgaacaggaagtaccgcagccaccacgaccagatgatctgcaagtgcctgagcctgagcatctcctacagcgccaccatcggcggcctgaccaccatcatcggcaccagcaccagcctcatcttcctggagcacttcaacaaccagtacccagctgctgaggtggtgaactttggcacctggttcctgttctccttccccatcagcctcatcatgctggtggtgtcctggttctggatgcactggctgttcctgggctgcaacttcaaggagacctgcagcctgagcaagaagaagaagaccaagcgggagcagctgtctgagaagaggatccaggaggagtatgagaagctgggggacatctcctacccagagatggtgacaggcttcttcttcatcctgatgacagtgctgtggttcacccgggagcccggctttgtgcccggctgggacagcttctttgagaagaagggctacagaacagatgccaccgtgtctgtgttcctgggcttcctgctcttcctgatcccagccaagaagccctgcttcggcaagaagaatgatggagagaaccaggagcacagcctgggcacagagcccatcatcacctggaaggacttccagaagaccatgccctgggagatcgtcatcctggtgggcggcggctacgccctggccagcggcagcaagagcagcggcctgagcacctggattggcaaccagatgctgagcctgagcagcctgcccccctgggccgtgaccctgctggcctgcatcctggtgtccatcgtgacagaatttgtgagcaacccagccaccatcaccatcttcctgcccatcctgtgcagcctgtctgagaccctgcacatcaaccccctgtacaccctcatccctgtgaccatgtgcatcagctttgctgtgatgctgcctgtgggcaaccccccaaatgccatcgtgttctcctatggccactgccagatcaaggacatggtgaaggccggcctgggcgtgaatgtgattggcctggtgattgtgatggtggccatcaacacctggggcgtgtccctcttccacctggacacctacccagcctgggcccgggtgagcaacatcacagaccaggcctag

SEQ ID NO: 170201 - DNA, 1569 bp, synthetic construct
  misc_feature 1..1569: note = Description of Artificial Sequence: Synthetic coding sequence
  source 1..1569: mol_type = other DNA
atggccagcgccctgtcctatgtgtccaagttcaagagctttgtgatcctgtttgtgacccccctgctgctgctgcccctggtgatcctgatgcctgccaagtttgtgcgctgtgcctacgtgatcatcctgatggccatctactggtgcacagaggtgatccccctggccgtgaccagcctgatgcctgtgctgctcttccccctcttccagatcctggacagccggcaggtgtgtgtgcagtacatgaaggacaccaacatgctgttcctgggcggcctgattgtggccgtggccgtggagcgctggaacctgcacaagagaattgccctgcggaccctgctgtgggtgggcgccaagccagcccggctgatgctgggcttcatgggcgtgacagccctgctgtccatgtggatcagcaacacagccaccacagccatgatggtgcccatcgtggaggccatcctgcagcagatggaggccaccagcgctgccacagaggccggcctggagctggtggacaagggcaaggccaaggagctgcccggcagccaggtgatctttgagggccccaccctgggccagcaggaggaccaggagaggaagaggctgtgcaaggccatgaccctgtgcatctgctatgctgccagcatcggcggcacagccaccctgactggaacaggccccaacgtggtgctgctgggccagatgaatgagctgttcccagacagcaaggacctggtgaactttgcctcctggtttgcctttgccttccccaacatgctggtgatgctgctgtttgcctggctgtggctgcagtttgtgtacatgaggttcaacttcaagaagtcctggggctgcggcctggagagcaagaagaatgagaaggccgccctgaaggtgctgcaggaggagtacaggaagctgggccccctgagctttgctgagatcaacgtgctgatctgcttcttcctgctggtgatcctgtggttcagccgggaccccggcttcatgcctggctggctgactgtggcctgggtggagggggagaccaagtatgtgtctgatgccaccgtggccatctttgtggccaccctgctcttcatcgtgcccagccagaagcccaagttcaacttccgcagccagacagaggaggagaggaagacccccttctaccccccacccctgctggactggaaggtgacccaggagaaggtgccctggggcatcgtgctgctgctgggcggcggctttgccctggccaagggcagcgaggccagcggcctgtctgtgtggatgggcaagcagatggagcccctgcatgctgtgcccccagctgccatcaccctcatcctgagcctgctggtggccgtgttcacagaatgtaccagcaatgtggccaccaccaccctcttcctgcccatctttgcctccatggtgaagacaggagtcatcatgaacatcattggagtcttctgtgtgttcctggccgtgaacacctggggccgggccatctttgacctggaccacttcccagactgggccaacgtgacccacatcgagacctag

SEQ ID NO: 170202 - DNA, 1707 bp, synthetic construct
  misc_feature 1..1707: note = Description of Artificial Sequence: Synthetic coding sequence
  source 1..1707: mol_type = other DNA
atggccagcgccctgtcctatgtgtccaagttcaagagctttgtgatcctgtttgtgacccccctgctgctgctgcccctggtgatcctgatgcctgccaagtttgtgcgctgtgcctacgtgatcatcctgatggccatctactggtgcacagaggtgatccccctggccgtgaccagcctgatgcctgtgctgctcttccccctcttccagatcctggacagccggcaggtgtgtgtgcagtacatgaaggacaccaacatgctgttcctgggcggcctgattgtggccgtggccgtggagcgctggaacctgcacaagagaattgccctgcggaccctgctgtgggtgggcgccaagccagcccggctgatgctgggcttcatgggcgtgacagccctgctgtccatgtggatcagcaacacagccaccacagccatgatggtgcccatcgtggaggccatcctgcagcagatggaggccaccagcgctgccacagaggccggcctggagctggtggacaagggcaaggccaaggagctgcccggcagccaggtgatctttgagggccccaccctgggccagcaggaggaccaggagaggaagaggctgtgcaaggccatgaccctgtgcatctgctatgctgccagcatcggcggcacagccaccctgactggaacaggccccaacgtggtgctgctgggccagatgaatgagctgttcccagacagcaaggacctggtgaactttgcctcctggtttgcctttgccttccccaacatgctggtgatgctgctgtttgcctggctgtggctgcagtttgtgtacatgaggttcaacttcaagaagtcctggggctgcggcctggagagcaagaagaatgagaaggccgccctgaaggtgctgcaggaggagtacaggaagctgggccccctgagctttgctgagatcaacgtgctgatctgcttcttcctgctggtgatcctgtggttcagccgggaccccggcttcatgcctggctggctgactgtggcctgggtggagggggagaccaagtatgtgtctgatgccaccgtggccatctttgtggccaccctgctcttcatcgtgcccagccagaagcccaagttcaacttccgcagccagacagaggaggagaggaagacccccttctaccccccacccctgctggactggaaggtgacccaggagaaggtgccctggggcatcgtgctgctgctgggcggcggctttgccctggccaagggcagcgaggccagcggcctgtctgtgtggatgggcaagcagatggagcccctgcatgctgtgcccccagctgccatcaccctcatcctgagcctgctggtggccgtgttcacagaatgtaccagcaatgtggccaccaccaccctcttcctgcccatctttgcctccatgagccgcagcatcggcctgaaccccctgtacatcatgctgccctgcaccctgagcgccagctttgccttcatgctgcctgtggccaccccaccaaatgccatcgtgttcacctacggccacctgaaggtggccgacatggtgaagacaggagtcatcatgaacatcattggagtcttctgtgtgttcctggccgtgaacacctggggccgggccatctttgacctggaccacttcccagactgggccaacgtgacccacatcgagacctag

SEQ ID NO: 170203 - DNA, 1578 bp, synthetic construct
  misc_feature 1..1578: note = Description of Artificial Sequence: Synthetic coding sequence
  source 1..1578: mol_type = other DNA
atggccagcgccctgtcctatgtgtccaagttcaagagctttgtgatcctgtttgtgacccccctgctgctgctgcccctggtgatcctgatgcctgccaaggtgtgtgtgcagtacatgaaggacaccaacatgctgttcctgggcggcctcatcgtggccgtggccgtggagcgctggaacctgcacaagagaattgccctgcggaccctgctgtgggtgggcgccaagccagcccggctgatgctgggcttcatgggcgtgacagccctgctgtccatgtggatcagcaacacagccaccacagccatgatggtgcccatcgtggaggccatcctgcagcagatggaggccaccagcgctgccacagaagctggcctggagctggtggacaagggcaaggccaaggagctgcccggcagccaggtgatctttgagggccccaccctgggccagcaggaggaccaggagaggaagaggctgtgcaaggccatgaccctgtgcatctgctacgccgccagcattggaggaacagccaccctgaccggcaccggccccaacgtggtgctgctgggccagatgaatgaactcttcccagacagcaaggacctggtgaactttgcctcctggtttgcctttgccttccccaacatgctggtgatgctgctgtttgcctggctgtggctgcagtttgtgtacatgaggttcaacttcaagaagtcctggggctgcggcctggagagcaagaagaatgagaaggccgccctgaaggtgctgcaggaggagtacaggaagctgggccccctgagctttgctgagatcaacgtgctgatctgcttcttcctgctggtgatcctgtggttcagccgggaccccggcttcatgcctggctggctgactgtggcctgggtggagggggagaccaagtatgtgtctgatgccaccgtggccatctttgtggccaccctgctcttcatcgtgcccagccagaagcccaagttcaacttccgcagccagacagaggaggagaggaagacccccttctaccccccacccctgctggactggaaggtgacccaggagaaggtgccctggggcatcgtgctgctgctgggcggcggctttgccctggccaagggcagcgaggccagcggcctgtctgtgtggatgggcaagcagatggagcccctgcatgctgtgcccccagctgccatcaccctcatcctgagcctgctggtggccgtgttcacagagtgcaccagcaatgtggccaccaccaccctcttcctgcccatctttgcctccatgagccgcagcatcggcctgaaccccctgtacatcatgctgccctgcaccctgagcgccagctttgccttcatgctgcctgtggccaccccaccaaatgccatcgtgttcacctacggccacctgaaggtggccgacatggtgaagacaggagtcatcatgaacatcatcggggtcttctgtgtgttcctggccgtgaacacctggggccgggccatctttgacctggaccacttcccagactgggccaacgtgacccacatcgagacctag

SEQ ID NO: 170204 - DNA, 1569 bp, synthetic construct; identical to SEQ ID NO: 170201
  misc_feature 1..1569: note = Description of Artificial Sequence: Synthetic coding sequence
  source 1..1569: mol_type = other DNA

SEQ ID NO: 170205 - DNA, 1779 bp, synthetic construct
  misc_feature 1..1779: note = Description of Artificial Sequence: Synthetic coding sequence
  source 1..1779: mol_type = other DNA
atggccacctgctggcaggccctgtgggcctaccgcagctacctgattgtgttctttgtgcccatcctgctgctgcccctgcccatcctggtgcccagcaaggaggcctactgtgcctatgccatcatcctgatggccctcttctggtgcacagaggccctgcccctggccgtgacagccctcttccccctcatcctcttccccatgatgggcatcgtggatgccagcgaggtggccgtggagtacctgaaggacagcaacctgctcttctttggaggcctgctggtggccatcgctgtggagcactggaacctgcacaagagaattgccctgcgggtgctgctgattgtgggcgtgcggcctgcccccctcatcctgggcttcatgctggtgacagccttcctgtccatgtggatcagcaacacagccaccagcgccatgatggtgcccatcgcccatgctgtgctggaccagctgcacagcagccaggccagcagcaatgtggaggagggcagcaacaaccccacctttgagctgcaggagcccagcccccagaaggaggtgaccaagctggacaatggccaggccctgcctgtgaccagcgccagcagcgagggccgggcccacctgagccagaagcacctgcacctgacccagtgcatgagcctgtgtgtgtgctacagcgccagcattggaggcatcgccaccctgaccggcacagcccccaacctggtgctgcagggccagatcaacagcctcttcccccagaatggaaatgtggtgaactttgcctcctggttctcctttgccttccccaccatggtgatcctgctgctgctggcctggctgtggctgcagatcctcttcctgggcttcaacttcaggaagaactttggcatcggggagaagatgcaggagcagcagcaggccgcctactgtgtgatccagacagagcaccggctgctgggccccatgacctttgctgagaaggccatcagcatcctcttcgtcatcctggtgctgctgtggttcacccgggagcccggcttcttcctgggctggggcaacctggccttccccaatgccaagggggagagcatggtgtctgatggcaccgtggccatcttcatcggcatcatcatgttcatcatccccagcaagtttcctggcctgacccaggaccctgagaaccctgggaagctgaaggcccccctgggcctgctggactggaagacagtgaaccagaagatgccctggaacatcgtgctgctgctgggcggcggctacgccctggccaagggcagcgagaggagcggcctgtctgagtggctgggcaacaagctgacccccctgcagagcgtgcctgccccagccatcgccatcatcctgagcctgctggtggccaccttcacagagtgcaccagcaatgtggccaccaccaccatcttcctgcccatcctggcctccatggcccaggccatctgcctgcaccccctgtatgtgatgctgccctgcaccctggccaccagcctggccttcatgctgcctgtggccaccccaccaaatgccatcgtgttctcctttggagacctgaaggtgctggacatggcccgggccggcttcctgctgaacatcatcggcgtgctgatcatcgccctggccatcaacagctggggcatccccctcttcagcctgcacagcttccccagctgggcccagagcaacaccacagcccagtgcctgcccagcctggccaacaccaccacccccagcccctag

SEQ ID NO: 170206 - DNA, 1926 bp, synthetic construct
  misc_feature 1..1926: note = Description of Artificial Sequence: Synthetic coding sequence
  source 1..1926: mol_type = other DNA
atggccacctgctggcaggccctgtgggcctaccgcagctacctgattgtgttctttgtgcccatcctgctgctgcccctgcccatcctggtgcccagcaaggaggcctactgtgcctatgccatcatcctgatggccctcttctggtgcacagaggccctgcccctggccgtgacagccctcttccccctcatcctcttccccatgatgggcatcgtggatgccagcgagatcatccagaggcccttccccagcagctttgagagccctggagagtgccagagcgtgggcatgtctgtgacagccagccacaacctgggcggcaccgtgggggacagcagggtcttcccccccctgagccacgtgtccacctgccaggtggccgtggagtacctgaaggacagcaacctgctcttcttcggcggcctgctggtggccatcgctgtggagcactggaacctgcacaagagaattgccctgcgggtgctgctgattgtgggcgtgcggcctgcccccctcatcctgggcttcatgctggtgacagccttcctgtccatgtggatcagcaacacagccaccagcgccatgatggtgcccatcgcccatgctgtgctggaccagctgcacagcagccaggccagcagcaatgtggaggagggcagcaacaaccccacctttgagctgcaggagcccagcccccagaaggaggtgaccaagctggacaatggccaggccctgcctgtgaccagcgccagcagcgagggccgggcccacctgagccagaagcacctgcacctgacccagtgcatgagcctgtgtgtgtgctacagcgccagcatcggcggcatcgccaccctgactggaacagcccccaacctggtgctgcagggccagatcaacagcctcttcccccagaatggaaatgtggtgaactttgcctcctggttctcctttgccttccccaccatggtgatcctgctgctgctggcctggctgtggctgcagatcctcttcctgggcttcaacttcaggaagaactttggaattggagagaagatgcaggagcagcagcaggccgcctactgcgtcatccagacagagcaccggctgctgggccccatgacctttgctgagaaggccatcagcatcctgtttgtgatcctggtgctgctgtggttcacccgggagcccggcttcttcctgggctggggcaacctggccttccccaatgccaagggggagagcatggtgtctgatggcaccgtggccatcttcatcggcatcatcatgttcatcatccccagcaagtttcctggcctgacccaggaccctgaaaatcctgggaagctgaaggcccccctgggcctgctggactggaagacagtgaaccagaagatgccctggaacatcgtgctgctgctgggcggcggctacgccctggccaagggcagcgagaggagcggcctgtctgagtggctgggcaacaagctgacccccctgcagagcgtgcctgccccagccatcgccatcatcctgagcctgctggtggccaccttcacagaatgtaccagcaatgtggccaccaccaccatcttcctgcccatcctggcctccatggcccaggccatctgcctgcaccccctgtatgtgatgctgccctgcaccctggccaccagcctggccttcatgctgcctgtggccaccccaccaaatgccatcgtgttctcctttggagacctgaaggtgctggacatggcccgggccggcttcctgctgaacatcattggagtgctgatcatcgccctggccatcaacagctggggcatccccctcttcagcctgcacagcttccccagctgggcccagagcaacaccacagcccagtgcctgcccagcctggccaacaccaccacccccagcccctag

SEQ ID NO: 170207 - DNA, 1566 bp, synthetic construct
  misc_feature 1..1566: note = Description of Artificial Sequence: Synthetic coding sequence
  source 1..1566: mol_type = other DNA
atgcctgtgtgtggaaatgtggccgtggagtacctgaaggacagcaacctgctcttcttcggcggcctgctggtggccatcgctgtggagcactggaacctgcacaagagaattgccctgcgggtgctgctgattgtgggcgtgcggcctgcccccctcatcctgggcttcatgctggtgacagccttcctgtccatgtggatcagcaacacagccaccagcgccatgatggtgcccatcgcccatgctgtgctggaccagctgcacagcagccaggccagcagcaatgtggaggagggcagcaacaaccccacctttgagctgcaggagcccagcccccagaaggaggtgaccaagctggacaatggccaggccctgcctgtgaccagcgccagcagcgagggccgggcccacctgagccagaagcacctgcacctgacccagtgcatgagcctgtgtgtgtgctacagcgccagcatcggcggcatcgccaccctgactggaacagcccccaacctggtgctgcagggccagatcaacagcctcttcccccagaatggaaatgtggtgaactttgcctcctggttctcctttgccttccccaccatggtgatcctgctgctgctggcctggctgtggctgcagatcctcttcctgggcttcaacttcaggaagaactttggaattggagagaagatgcaggagcagcagcaggccgcctactgcgtcatccagacagagcaccggctgctgggccccatgacctttgctgagaaggccatcagcatcctgtttgtgatcctggtgctgctgtggttcacccgggagcccggcttcttcctgggctggggcaacctggccttccccaatgccaagggggagagcatggtgtctgatggcaccgtggccatcttcatcggcatcatcatgttcatcatccccagcaagtttcctggcctgacccaggaccctgaaaatcctgggaagctgaaggcccccctgggcctgctggactggaagacagtgaaccagaagatgccctggaacatcgtgctgctgctgggcggcggctacgccctggccaagggcagcgagaggagcggcctgtctgagtggctgggcaacaagctgacccccctgcagagcgtgcctgccccagccatcgccatcatcctgagcctgctggtggccaccttcacagaatgtaccagcaatgtggccaccaccaccatcttcctgcccatcctggcctccatggcccaggccatctgcctgcaccccctgtatgtgatgctgccctgcaccctggccaccagcctggccttcatgctgcctgtggccaccccaccaaatgccatcgtgttctcctttggagacctgaaggtgctggacatggcccgggccggcttcctgctgaacatcattggagtgctgatcatcgccctggccatcaacagctggggcatccccctcttcagcctgcacagcttccccagctgggcccagagcaacaccacagcccagtgcctgcccagcctggccaacaccaccacccccagcccctag

SEQ ID NO: 170208 - DNA, 1035 bp, synthetic construct
  misc_feature 1..1035: note = Description of Artificial Sequence: Synthetic coding sequence
  source 1..1035: mol_type = other DNA
atggccctcttctggtgcacagaggccctgcccctggccgtgacagccctcttccccctcatcctcttccccatgatgggcatcgtggatgccagcgaggtggccgtggagtacctgaaggacagcaacctgctcttctttggaggcctgctggtggccatcgctgtggagcactggaacctgcacaagagaattgccctgcgggtgctgctgattgtgggcgtgcggcctgcccccctcatcctgggcttcatgctggtgacagccttcctgtccatgtggatcagcaacacagccaccagcgccatgatggtgcccatcgcccatgctgtgctggaccagctgcacagcagccaggccagcagcaatgtggaggagggcagcaacaaccccacctttgagctgcaggagcccagcccccagaaggaggtgaccaagctggacaatggccaggccctgcctgtgaccagcgccagcagcgagggccgggcccacctgagccagaagcacctgcacctgacccagtgcatgagcctgtgtgtgtgctacagcgccagcattggaggcatcgccaccctgaccggcacagcccccaacctggtgctgcagggccagatcaacagcctcttcccccagaatggaaatgtggtgaactttgcctcctggttctcctttgccttccccaccatggtgatcctgctgctgctggcctggctgtggctgcagatcctcttcctgggcttcaacttcaggaagaactttggcatcggggagaagatgcaggagcagcagcaggccgcctactgtgtgatccagacagagcaccggctgctgggccccatgacctttgctgagaaggccatcagcatcctcttcgtcatcctggtgctgctgtggttcacccgggagcccggcttcttctggctgggccagtttggcttcagccagtgccagggcggggaggtgcgggtggccggcgtgggccgccgcacccacctgggcctgacctgcagcggccggcgggagggctactag

SEQ ID NO: 170209 - DNA, 1650 bp, synthetic construct
  misc_feature 1..1650: note = Description of Artificial Sequence: Synthetic coding sequence
  source 1..1650: mol_type = other DNA
atggccacctgctggcaggccctgtgggcctaccgcagctacctgattgtgttctttgtgcccatcctgctgctgcccctgcccatcctggtgcccagcaaggtggccgtggagtacctgaaggacagcaacctgctcttcttcggcggcctgctggtggccatcgctgtggagcactggaacctgcacaagagaattgccctgcgggtgctgctgattgtgggcgtgcggcctgcccccctcatcctgggcttcatgctggtgacagccttcctgtccatgtggatcagcaacacagccaccagcgccatgatggtgcccatcgcccatgctgtgctggaccagctgcacagcagccaggccagcagcaatgtggaggagggcagcaacaaccccacctttgagctgcaggagcccagcccccagaaggaggtgaccaagctggacaatggccaggccctgcctgtgaccagcgccagcagcgagggccgggcccacctgagccagaagcacctgcacctgacccagtgcatgagcctgtgtgtgtgctacagcgccagcatcggcggcatcgccaccctgactggaacagcccccaacctggtgctgcagggccagatcaacagcctcttcccccagaatggaaatgtggtgaactttgcctcctggttctcctttgccttccccaccatggtgatcctgctgctgctggcctggctgtggctgcagatcctcttcctgggcttcaacttcaggaagaactttggaattggagagaagatgcaggagcagcagcaggccgcctactgcgtcatccagacagagcaccggctgctgggccccatgacctttgctgagaaggccatcagcatcctgtttgtgatcctggtgctgctgtggttcacccgggagcccggcttcttcctgggctggggcaacctggccttccccaatgccaagggggagagcatggtgtctgatggcaccgtggccatcttcatcggcatcatcatgttcatcatccccagcaagtttcctggcctgacccaggaccctgaaaatcctgggaagctgaaggcccccctgggcctgctggactggaagacagtgaaccagaagatgccctggaacatcgtgctgctgctgggcggcggctacgccctggccaagggcagcgagaggagcggcctgtctgagtggctgggcaacaagctgacccccctgcagagcgtgcctgccccagccatcgccatcatcctgagcctgctggtggccaccttcacagaatgtaccagcaatgtggccaccaccaccatcttcctgcccatcctggcctccatggcccaggccatctgcctgcaccccctgtatgtgatgctgccctgcaccctggccaccagcctggccttcatgctgcctgtggccaccccaccaaatgccatcgtgttctcctttggagacctgaaggtgctggacatggcccgggccggcttcctgctgaacatcattggagtgctgatcatcgccctggccatcaacagctggggcatccccctcttcagcctgcacagcttccccagctgggcccagagcaacaccacagcccagtgcctgcccagcctggccaacaccaccacccccagcccctag

SEQ ID NO: 170210 - DNA, 1809 bp, synthetic construct
  misc_feature 1..1809: note = Description of Artificial Sequence: Synthetic coding sequence
  source 1..1809: mol_type = other DNA
atggccgccctggccgctgctgccaagaaggtgtggagcgcccggcggctgctggtgctgctcttcacccccctggccctgctgcctgtggtgtttgccctgccccccaaggagggccgctgcctgtttgtgatcctgctgatggctgtgtactggtgcacagaggccctgcccctgtctgtgacagccctgctgcccatcgtgctcttccccttcatgggcatcctgcccagcaacaaggtgtgcccccagtacttcctggacaccaacttcctgttcctgagcggcctcatcatggccagcgccatcgaggagtggaacctgcaccggcgcatcgccctgaagatcctgatgctggtgggcgtgcagcctgcccggctcatcctgggcatgatggtgaccaccagcttcctgtccatgtggctgagcaacacagccagcacagccatgatgctgcccatcgccaatgccatcctgaagagcctgtttggccagaaggaggtgaggaaggaccccagccaggagagcgaggagaacacagctgctgtgagaagaaatggcctgcacacagtgcccacagagatgcagttcctggccagcacagaggccaaggaccaccctggagaaacagaggtgcccctggacctgcctgctgacagcaggaaagaagatgagtacagaagaaacatctggaagggcttcctgatcagcatcccctacagcgccagcatcggcggcacagccaccctgactggaacagcccccaacctgatcctgctgggccagctgaagagcttcttcccccagtgtgatgtggtgaactttggctcctggttcatctttgccttccccctgatgctgctcttcctgctggccggctggctgtggatctccttcctgtatggaggcctgtccttccggggctggaggaagaacaagtctgagatccgcaccaatgcagaagatcgggcccgggccgtcatccgggaggagtaccagaacctgggccccatcaagtttgctgagcaggccgtgttcatcctcttctgcatgtttgccatcctgctcttcacccgggaccccaagttcatccctggctgggccagcctcttcaaccctggcttcctgagtgatgctgtgactggagtggccatcgtgaccatcctcttcttcttccccagccagaggcccagcctgaagtggtggtttgacttcaaggcccccaacacagaaacagagcccctgctgacctggaagaaggcccaggagaccgtgccctggaacatcatcctgctgctgggcggcggctttgccatggccaagggctgtgaggagagcggcctgtctgtgtggattggaggccagctgcaccccctggagaatgtgcccccagccctggccgtgctgctgatcaccgtggtgattgccttcttcacagaatttgccagcaacacagccaccatcatcatcttcctgcctgtgctggccgagctggccatccggctgcgggtgcaccccctgtacctgatgatccctggcaccgtgggctgcagctttgccttcatgctgcctgtgtccaccccacccaacagcatcgcctttgccagcggccacctgctggtgaaggacatggtgaggacaggcctgctgatgaacctgatgggcgtgctgctgctgagcctggccatgaacacctgggcccagaccatcttccagctgggcaccttcccagactgggccgacatgtacagcgtgaatgtgacagccctgccccccaccctggccaatgacaccttccgcaccctgtag

SEQ ID NO: 170211 - DNA, 1668 bp, synthetic construct
  misc_feature 1..1668: note = Description of Artificial Sequence: Synthetic coding sequence
  source 1..1668: mol_type = other DNA
atggctgtgtactggtgcacagaggccctgcccctgtctgtgacagccctgctgcccatcgtgctcttccccttcatgggcatcctgcccagcaacaaggtgtgcccccagtacttcctggacaccaacttcctgttcctgagcggcctcatcatggccagcgccatcgaggagtggaacctgcacagaagaattgccctgaagatcctgatgctggtgggcgtgcagcctgcccggctcatcctgggcatgatggtgaccaccagcttcctgtccatgtggctgagcaacacagccagcacagccatgatgctgcccatcgccaatgccatcctgaagagcctgtttggccagaaggaggtgaggaaggaccccagccaggagagtgaagaaaatacagctgctgtgagaagaaatggcctgcacacagtgcccacagagatgcagttcctggccagcacagaggccaaggaccaccctggagaaacagaggtgcccctggacctgcctgctgacagcaggaaggaggatgagtacagaagaaacatctggaagggcttcctgatcagcatcccctacagcgccagcattggaggaacagccaccctgaccggcacagcccccaacctgatcctgctgggccagctgaagagcttcttcccccagtgtgatgtggtgaactttggctcctggttcatctttgccttccccctgatgctgctcttcctgctggccggctggctgtggatctccttcctgtatggaggcctgtccttccggggctggaggaagaacaagtctgagatccgcaccaatgctgaggaccgggcccgggctgtgatccgggaggagtaccagaacctgggccccatcaagtttgctgagcaggccgtgttcatcctcttctgcatgtttgccatcctgctcttcacccgggaccccaagttcatccctggctgggccagcctcttcaaccctggcttcctgagtgatgctgtgactggagtggccatcgtgaccatcctcttcttcttccccagccagaggcccagcctgaagtggtggtttgacttcaaggcccccaacacagaaacagagcccctgctgacctggaagaaggcccaggagaccgtgccctggaacatcatcctgctgctgggcggcggctttgccatggccaagggctgtgaggagagcggcctgtctgtgtggattggaggccagctgcaccccctggagaatgtgcccccagccctggccgtgctgctgatcaccgtggtgattgccttcttcacagaatttgccagcaacacagccaccatcatcatcttcctgcctgtgctggccgagctggccatccggctgcgggtgcaccccctgtacctgatgatccctggcaccgtgggctgcagctttgccttcatgctgcctgtgtccaccccacccaacagcatcgcctttgccagcggccacctgctggtgaaggacatggtgaggacaggcctgctgatgaacctgatgggcgtgctgctgctgagcctggccatgaacacctgggcccagaccatcttccagctgggcaccttcccagactgggccgacatgtacagcgtgaatgtgacagccctgccccccaccctggccaatgacaccttccgcaccctgtag

SEQ ID NO: 170212 - DNA, 699 bp, synthetic construct
  misc_feature 1..699: note = Description of Artificial Sequence: Synthetic coding sequence
  source 1..699: mol_type = other DNA
atggccgccctggccgctgctgccaagaaggtgtggagcgcccggcggctgctggtgctgctcttcacccccctggccctgctgcctgtggtgtttgccctgccccccaaggagggccgctgcctgtttgtgatcctgctgatggctgtgtactggtgcacagaggccctgcccctgtctgtgacagccctgctgcccatcgtgctcttccccttcatgggcatcctgcccagcaacaaggtgtgcccccagtacttcctggacaccaacttcctgttcctgagcggcctcatcatggccagcgccatcgaggagtggaacctgcaccggcgcatcgccctgaagatcctgatgctggtgggcgtgcagcctgcccggctcatcctgggcatgatggtgaccaccagcttcctgtccatgtggctgagcaacacagccagcacagccatgatgctgcccatcgccaatgccatcctgaagagcctgtttggccagaaggaggtgaggaaggaccccagccaggagagcgaggagaacacaggcatcgagcccaacaccttcctgtctgaggagcggctgaagctgcaggcccccctggtgatccggctgggccagatcacagaaagtggccagtggaacatgtctggaaatgatgtgtgcaacttccgggtgctgtccttcctgcccggcggcatgtag

SEQ ID NO: 170213 - DNA, 1017 bp, synthetic construct
  misc_feature 1..1017: note = Description of Artificial Sequence: Synthetic coding sequence
  source 1..1017: mol_type = other DNA
atggccgccctggccgctgctgccaagaaggtgtggagcgcccggcggctgctggtgctgctcttcacccccctggccctgctgcctgtggtgtttgccctgccccccaaggagggccgctgcctgtttgtgatcctgctgatggctgtgtactggtgcacagaggccctgcccctgtctgtgacagccctgctgcccatcgtgctcttccccttcatgggcatcctgcccagcaacaaggtgtgcccccagtacttcctggacaccaacttcctgttcctgagcggcctcatcatggccagcgccatcgaggagtggaacctgcaccggcgcatcgccctgaagatcctgatgctggtgggcgtgcagcctgcccggctcatcctgggcatgatggtgaccaccagcttcctgtccatgtggctgagcaacacagccagcacagccatgatgctgcccatcgccaatgccatcctgaagagcctgtttggccagaaggaggtgaggaaggaccccagccaggagagcgaggagaacacagccaagaccaccctgggccggcagcgcttccactggatctgccgcctgaccccaggccgcaggatgaacatcgtgggcaccagcggccgggccagcagcagccccagccccacccagcctgtgctgggcgcccagccccacagccgggcccagcccctgaccagcagctgcctggccagcagccggggctggctgtggatctccttcctgtatggaggcctgtccttccggggctggaggaagaacaagtctgagatccgcaccaatgcagaagatcgggcccgggccgtcatccgggaggagtaccagaacctgggccccatcaagtttgctgagcaggccgtgttcatcctcttctgcatgtttgccatcctgctcttcacccgggaccccaagttcatccctggctgggccagcctcttcaaccctggctgcaagatgggcatcatcagcatcagcaccatccagaagatgtag

SEQ ID NO: 170214 - DNA, 1563 bp, synthetic construct
  misc_feature 1..1563: note = Description of Artificial Sequence: Synthetic coding sequence
  source 1..1563: mol_type = other DNA
atggctgtgtactggtgcacagaggccctgcccctgtctgtgacagccctgctgcccatcgtgctcttccccttcatgggcatcctgcccagcaacaaggtgtgcccccagtacttcctggacaccaacttcctgttcctgagcggcctcatcatggccagcgccatcgaggagtggaacctgcacagaagaattgccctgaagatcctgatgctggtgggcgtgcagcctgcccggctcatcctgggcatgatggtgaccaccagcttcctgtccatgtggctgagcaacacagccagcacagccatgatgctgcccatcgccaatgccatcctgaagagcctgtttggccagaaggaggtgaggaaggaccccagccaggagagtgaagaaaatacagctgctgtgagaagaaatggcctgcacacagtgcccacagagatgcagttcctggccagcacagaggccaaggaccaccctggagaaacagaggtgcccctggacctgcctgctgacagcaggaaggaggatgagtacagaagaaacatctggaagggcttcctgatcagcatcccctacagcgccagcattggaggaacagccaccctgaccggcacagcccccaacctgatcctgctgggccagctgaagagcttcttcccccagtgtgatgtggtgaactttggctcctggttcatctttgccttccccctgatgctgctcttcctgctggccggctggctgtggatctccttcctgtatggaggcctgtccttccggggctggaggaagaacaagtctgagatccgcaccaatgctgaggaccgggcccgggctgtgatccgggaggagtaccagaacctgggccccatcaagttcctgagtgatgctgtgactggagtggccatcgtgaccatcctcttcttcttccccagccagaggcccagcctgaagtggtggtttgacttcaaggcccccaacacagaaacagagcccctgctgacctggaagaaggcccaggagaccgtgccctggaacatcatcctgctgctgggcggcggctttgccatggccaagggctgtgaggagagcggcctgtctgtgtggattggaggccagctgcaccccctggagaatgtgcccccagccctggccgtgctgctgatcaccgtggtgattgccttcttcacagaatttgccagcaacacagccaccatcatcatcttcctgcctgtgctggccgagctggccatccggctgcgggtgcaccccctgtacctgatgatccctggcaccgtgggctgcagctttgccttcatgctgcctgtgtccaccccacccaacagcatcgcctttgccagcggccacctgctggtgaaggacatggtgaggacaggcctgctgatgaacctgatgggcgtgctgctgctgagcctggccatgaacacctgggcccagaccatcttccagctgggcaccttcccagactgggccgacatgtacagcgtgaatgtgacagccctgccccccaccctggccaatgacaccttccgcaccctgtag

SEQ ID NO: 170215 - DNA, 1659 bp, synthetic construct
  misc_feature 1..1659: note = Description of Artificial Sequence: Synthetic coding sequence
  source 1..1659: mol_type = other DNA
atggccgccctggccgctgctgccaagaaggtgtggagcgcccggcggctgctggtgctgctcttcacccccctggccctgctgcctgtggtgtttgccctgccccccaaggagggccgctgcctgtttgtgatcctgctgatggctgtgtactggtgcacagaggccctgcccctgtctgtgacagccctgctgcccatcgtgctcttccccttcatgggcatcctgcccagcaacaaggtgtgcccccagtacttcctggacaccaacttcctgttcctgagcggcctcatcatggccagcgccatcgaggagtggaacctgcaccggcgcatcgccctgaagatcctgatgctggtgggcgtgcagcctgcccggctcatcctgggcatgatggtgaccaccagcttcctgtccatgtggctgagcaacacagccagcacagccatgatgctgcccatcgccaatgccatcctgaagagcctgtttggccagaaggaggtgaggaaggaccccagccaggagagcgaggagaacacagccaagaccaccctgggccggcagcgcttccactggatctgccgcctgaccccaggccgcaggatgaacatcgtgggcaccagcggccgggccagcagcagccccagccccacccagcctgtgctgggcgcccagccccacagccgggcccagcccctgaccagcagctgcctggccagcagccggggctggctgtggatctccttcctgtatggaggcctgtccttccggggctggaggaagaacaagtctgagatccgcaccaatgcagaagatcgggcccgggccgtcatccgggaggagtaccagaacctgggccccatcaagtttgctgagcaggccgtgttcatcctcttctgcatgtttgccatcctgctcttcacccgggaccccaagttcatccctggctgggccagcctcttcaaccctggcttcctgagtgatgctgtgactggagtggccatcgtgaccatcctcttcttcttccccagccagaggcccagcctgaagtggtggtttgacttcaaggcccccaacacagaaacagagcccctgctgacctggaagaaggcccaggagaccgtgccctggaacatcatcctgctgctgggcggcggctttgccatggccaagggctgtgaggagagcggcctgtctgtgtggattggaggccagctgcaccccctggagaatgtgcccccagccctggccgtgctgctgatcaccgtggtgattgccttcttcacagaatttgccagcaacacagccaccatcatcatcttcctgcctgtgctggccgagctggccatccggctgcgggtgcaccccctgtacctgatgatccctggcaccgtgggctgcagctttgccttcatgctgcctgtgtccaccccacccaacagcatcgcctttgccagcggccacctgctggtgaaggacatggtgaggacaggcctgctgatgaacctgatgggcgtgctgctgctgagcctggccatgaacacctgggcccagaccatcttccagctgggcaccttcccagactgggccgacatgtacagcgtgaatgtgacagccctgccccccaccctggccaatgacaccttccgcaccctgtag

SEQ ID NO: 170216 - DNA, 558 bp, synthetic construct
  misc_feature 1..558: note = Description of Artificial Sequence: Synthetic coding sequence
  source 1..558: mol_type = other DNA
atggctgtgtactggtgcacagaggccctgcccctgtctgtgacagccctgctgcccatcgtgctcttccccttcatgggcatcctgcccagcaacaaggtgtgcccccagtacttcctggacaccaacttcctgttcctgagcggcctcatcatggccagcgccatcgaggagtggaacctgcacagaagaattgccctgaagatcctgatgctggtgggcgtgcagcctgcccggctcatcctgggcatgatggtgaccaccagcttcctgtccatgtggctgagcaacacagccagcacagccatgatgctgcccatcgccaatgccatcctgaagagcctgtttggccagaaggaggtgaggaaggaccccagccaggagagtgaagaaaatactggaattgagcccaacaccttcctgtctgaggagcggctgaagctgcaggcccccctggtgatccggctgggccagatcacagagagcggccagtggaacatgtctggaaatgatgtgtgcaacttccgggtgctgtccttcctgcccggcggcatgtag

SEQ ID NO: 170217 - DNA, 564 bp, synthetic construct
  misc_feature 1..564: note = Description of Artificial Sequence: Synthetic coding sequence
  source 1..564: mol_type = other DNA
atgctgagccctgcctggctgctgagccccagctgcagcagcagccggcccaagggccccctgagcagcggcggcctgaccagcaaggagagcggcctgtctgtgtggattggaggccagctgcaccccctggagaatgtgcccccagccctggccgtgctgctgatcaccgtggtgattgccttcttcacagaatttgccagcaacacagccaccatcatcatcttcctgcctgtgctggccgagctggccatccggctgcgggtgcaccccctgtacctgatgatccctggcaccgtgggctgcagctttgccttcatgctgcctgtgtccaccccacccaacagcatcgcctttgccagcggccacctgctggtgaaggacatggtgaggacaggcctgctgatgaacctgatgggcgtgctgctgctgagcctggccatgaacacctgggcccagaccatcttccagctgggcaccttcccagactgggccgacatgtacagcgtgaatgtgacagccctgccccccaccctggccaatgacaccttccgcaccctgtag

SEQ ID NO: 170218 - DNA, 1230 bp, synthetic construct
  misc_feature 1..1230: note = Description of Artificial Sequence: Synthetic coding sequence
  source 1..1230: mol_type = other DNA
atggctgtgtactggtgcacagaggccctgcccctgtctgtgacagccctgctgcccatcgtgctcttccccttcatgggcatcctgcccagcaacaaggtgtgcccccagtacttcctggacaccaacttcctgttcctgagcggcctcatcatggccagcgccatcgaggagtggaacctgcacagaagaattgccctgaagatcctgatgctggtgggcgtgcagcctgcccggctcatcctgggcatgatggtgaccaccagcttcctgtccatgtggctgagcaacacagccagcacagccatgatgctgcccatcgccaatgccatcctgaagagcctgtttggccagaaggaggtgaggaaggaccccagccaggagagtgaagaaaatacagctgctgtgagaagaaatggcctgcacacagtgcccacagagatgcagttcctggccagcacagaggccaaggaccaccctggagaaacagaggtgcccctggacctgcctgctgacagcaggaaggaggatgagtacagaagaaacatctggaagggcttcctgatcagcatcccctacagcgccagcattggaggaacagccaccctgaccggcacagcccccaacctgatcctgctgggccagctgaagagcttcttcccccagtgtgatgtggtgaactttggctcctggttcatctttgccttccccctgatgctgctcttcctgctggccggctggctgtggatctccttcctgtatggaggcctgtccttccggggctggaggaagaacaagtctgagatccgcaccaatgctgaggaccgggcccgggctgtgatccgggaggagtaccagaacctgggccccatcaagtttgctgagcaggccgtgttcatcctcttctgcatgtttgccatcctgctcttcacccgggaccccaagttcatccctggctgggccagcctcttcaaccctggcttcctgagtgatgctgtgactggagtggccatcgtgaccatcctcttcttcttccccagccagaggcccagcctgaagtggtggtttgacttcaaggcccccaacacagaaacagagcccctgctgacctggaagaaggcccaggagaccgtgccctggaacatcatcctgctgctgggcggcggctttgccatggccaagggctgtgaggagagcggcctgtctgtgtggattggaggccagctgtag

SEQ ID NO: 170219 - DNA, 1668 bp, synthetic construct; identical to SEQ ID NO: 170211
  misc_feature 1..1668: note = Description of Artificial Sequence: Synthetic coding sequence
  source 1..1668: mol_type = other DNA

SEQ ID NO: 170220 - DNA, 2763 bp, synthetic construct
  misc_feature 1..2763: note = Description of Artificial Sequence: Synthetic coding sequence
  source 1..2763: mol_type = other DNA
atgtctgacccccacagcagccccctgctgcctgagcccctgagcagccgctacaagctgtatgaagctgagttcaccagccccagctggcccagcaccagcccagacacccacccagccctgcccctgctggagatgcctgaggagaaggacctgcggagcagcaatgaagacagccacatcgtgaagattgagaagctgaatgaaagaagcaagaggaaggatgatggagtggcccaccgggacagcgctggccagcgctgcatctgcctgagcaaggctgtgggctacctgactggagacatgaaggagtaccgcatctggctgaaggacaagcacctggccctgcagttcatcgactgggtgctgcggggcacagcccaggtgatgttcatcaacaaccccctgagcggcctcatcatcttcatcggcctgctgatccagaacccctggtggaccatcactggaggcctgggcaccgtggtgtccaccctgacagccctggccctgggccaggacagaagtgccatcgccagcggcctgcacggctacaacggcatgctggtgggcctgctgatggctgtgttttctgagaagctggactactactggtggctgctcttccctgtgaccttcaccgccatgagctgccctgtgctgagcagcgccctgaacagcatcttcagcaagtgggacctgcccgtcttcaccctgcccttcaacattgctgtgaccctgtacctggccgccaccggccactacaacctcttcttccccaccaccctggtggagcctgtgtcctctgtgcccaacatcacctggacagagatggagatgcccctgctgctgcaggccatccctgtgggcgtgggccaggtgtatggctgtgacaacccctggacaggaggagtcttcctggtggccctcttcatcagcagccccctcatctgcctgcacgccgccatcggcagcatcgtgggcctgctggccgccctgtctgtggccaccccatttgagaccatctacacaggcctgtggagctacaactgtgtgctgagctgcatcgccatcggcggcatgttctacgccctgacctggcagacccacctgctggccctgatctgtgccctcttctgtgcctacatggaggccgccatcagcaacatcatgtctgtggtgggcgtgcccccaggcacctgggccttctgcctggccaccatcatcttcctgctgctgaccaccaacaacccagccatcttccggctgcccctgagcaaggtgacctacccagaggccaaccgcatctactacctgactgtgaagagcggggaggaggagaaggcccccagcggcggcggcggggagcaccccccaacagctggccccaaggtggaggagggcagcgaggccgtgctgagcaagcacaggtctgtgttccacatcgagtggagcagcatcagaagaagaagcaaggtgtttggaaaaggagagcaccaggagcggcagaacaaggaccccttcccctaccgctacaggaagcccaccgtggagctgctggacctggacaccatggaggagagcagcgagatcaaggtggagaccaacatcagcaagacctcctggatccgcagctccatggccgccagcggcaagagggtgtccaaggccctgagctacatcactggagagatgaaggaatgtggggagggcctgaaggacaagagccctgtgttccagttctttgactgggtgctgcggggcaccagccaggtgatgtttgtgaacaaccccctgagcggcatcctgatcatcctgggcctcttcatccagaacccctggtgggccatcagcggctgcctgggcaccatcatgagcaccctgacagccctgatcctgagccaggacaagagcgccatcgctgctggcttccacggctacaatggagtgctggtgggcctgctgatggctgtgttcagtgacaagggggactactactggtggctgctgctgcctgtgatcatcatgtccatgagctgccccatcctgagcagcgccctgggcaccatcttcagcaagtgggacctgcccgtcttcaccctgcccttcaacatcaccgtgaccctgtacctggccgccaccggccactacaacctcttcttccccaccaccctgctgcagcctgccagcgccatgcccaacatcacctggagcgaggtgcaggtgcccctgctgctgcgggccatccctgtgggcatcggccaggtgtatggctgtgacaacccctggacaggaggcatcttcctgattgccctcttcatcagcagccccctcatctgcctgcacgccgccatcggcagcaccatgggcatgctggccgccctgaccatcgccaccccatttgacagcatctacttcggcctgtgtggcttcaacagcaccctggcctgcatcgccatcggcggcatgttctacgtgatcacctggcagacccacctgctggccatcgcctgtgccctgtttgctgcctacctgggcgccgccctggccaacatgctgtctgtgtttggcctgcccccctgcacctggcccttctgcctgagcgccctgaccttcctgctgctgaccaccaacaacccagccatctacaagctgcccctgagcaaggtgacctacccagaggccaaccgcatctactacctgagccaggagaggaacagaagagccagcatcatcaccaagtaccaggcctatgatgtgtcctag

SEQ ID NO: 170221 - DNA, 1170 bp, synthetic construct
  misc_feature 1..1170: note = Description of Artificial Sequence: Synthetic coding sequence
  source 1..1170: mol_type = other DNA
atggaggacagccccaccatggtgcgggtggacagccccaccatggtgagaggagagaaccaggtgagcccctgccagggccgccgctgcttccccaaggccctgggctacgtgactggagacatgaaggagctggccaaccagctgaaggacaagcctgtggtgctgcagttcatcgactggatcctgcggggcatcagccaggtggtgtttgtgaacaaccctgtgtctggcatcctgatcctggtgggcctgctggtgcagaacccctggtgggccctgaccggctggctgggcaccgtggtgtccaccctgatggccctgctgctgagccaggacaggagcctgattgccagcggcctgtatggctacaatgccaccctggtgggcgtgctgatggctgtgttcagtgacaagggggactacttctggtggctgctgctgcctgtgtgtgccatgtccatgacctgccccatcttcagcagcgccctgaacagcatgctgagcaagtgggacctgcccgtcttcaccctgcccttcaacatggccctgtccatgtacctgagcgccaccggccactacaaccccttcttccctgccaagctggtgatccccatcaccacagcccccaacatctcctggagcgacctgagcgccctggagctgctgaagagcatccctgtgggcgtgggccagatctacggctgtgacaacccctggacaggaggcatcttcctgggcgccatcctgctgagcagccccctgatgtgcctgcacgccgccatcggcagcctgctgggcattgctgctggcctgagcctgagcgccccctttgaggacatctacttcggcctgtggggcttcaacagcagcctggcctgcatcgccatgggcggcatgttcatggccctgacctggcagacccacctgctggccctgggctgtgccctcttcaccgcctacctgggcgtgggcatggccaacttcatggccgaggtgggcctgcctgcctgcacctggcccttctgcctggccaccctgctcttcctgatcatgaccaccaagaacagcaacatctacaagatgcccctgagcaaggtgacctacccagaggagaaccgcatcttctacctgcaggccaagaagaggatggtggagagccccctgtag

SEQ ID NO: 170222 - DNA, 855 bp, synthetic construct
  misc_feature 1..855: note = Description of Artificial Sequence: Synthetic coding sequence
  source 1..855: mol_type = other DNA
atggccctgctgctgagccaggacaggagcctcatcgccagcggcctgtatggctacaatgccaccctggtgggcgtgctgatggctgtgttcagtgacaagggggactacttctggtggctgctgctgcctgtgtgtgccatgtccatgacctgccccatcttcagcagcgccctgaacagcatgctgagcaagtgggacctgcctgtgttcaccctgcccttcaacatggccctgtccatgtacctgagcgccaccggccactacaaccccttcttccctgccaagctggtgatccccatcaccacagcccccaacatctcctggagcgacctgagcgccctggagctgctgaagagcatccctgtgggcgtgggccagatctacggctgtgacaacccctggacaggaggcatcttcctgggcgccatcctgctgagcagccccctgatgtgcctgcatgctgccatcggcagcctgctgggcattgctgctggcctgagcctgagcgccccctttgaggacatctacttcggcctgtggggcttcaacagcagcctggcctgcatcgccatgggcggcatgttcatggccctgacctggcagacccacctgctggccctgggctgtgccctcttcaccgcctacctgggcgtgggcatggccaacttcatggccgaggtgggcctgcctgcctgcacctggcccttctgcctggccaccctgctcttcctgatcatgaccaccaagaacagcaacatctacaagatgcccctgagcaaggtgacctacccagaagaaaatcgcatcttctacctgcaggccaagaagaggatggtggagagccccctgtag

SEQ ID NO: 170223 - DNA, 1338 bp, synthetic construct
  misc_feature 1..1338: note = Description of Artificial Sequence: Synthetic coding sequence
  source 1..1338: mol_type = other DNA
atgaatggccgcagcctgattggaggagctggagatgcccggcacggccctgtgtggaaggaccccttcggcaccaaggctggagatgctgcccggcggggcatcgcccggctgagcctggccctggctgatggcagccaggagcaggagcctgaggaggagatcgccatggaggacagccccaccatggtgcgggtggacagccccaccatggtgagaggagagaaccaggtgagcccctgccagggccgccgctgcttccccaaggccctgggctacgtgactggagacatgaaggagctggccaaccagctgaaggacaagcctgtggtgctgcagttcatcgactggatcctgcggggcatcagccaggtggtgtttgtgaacaaccctgtgtctggcatcctgatcctggtgggcctgctggtgcagaacccctggtgggccctgaccggctggctgggcaccgtggtgtccaccctgatggccctgctgctgagccaggacaggagcctgattgccagcggcctgtatggctacaatgccaccctggtgggcgtgctgatggctgtgttcagtgacaagggggactacttctggtggctgctgctgcctgtgtgtgccatgtccatgacctgccccatcttcagcagcgccctgaacagcatgctgagcaagtgggacctgcccgtcttcaccctgcccttcaacatggccctgtccatgtacctgagcgccaccggccactacaaccccttcttccctgccaagctggtgatccccatcaccacagcccccaacatctcctggagcgacctgagcgccctggagctgctgaagagcatccctgtgggcgtgggccagatctacggctgtgacaacccctggacaggaggcatcttcctgggcgccatcctgctgagcagccccctgatgtgcctgcacgccgccatcggcagcctgctgggcattgctgctggcctgagcctgagcgccccctttgaggacatctacttcggcctgtggggcttcaacagcagcctggcctgcatcgccatgggcggcatgttcatggccctgacctggcagacccacctgctggccctgggctgtgccctcttcaccgcctacctgggcgtgggcatggccaacttcatggccgaggtgggcctgcctgcctgcacctggcccttctgcctggccaccctgctcttcctgatcatgaccaccaagaacagcaacatctacaagatgcccctgagcaaggtgacctacccagaggagaaccgcatcttctacctgcaggccaagaagaggatggtggagagccccctgtag

SEQ ID NO: 170224 - DNA, 1338 bp, synthetic construct; identical to SEQ ID NO: 170223
  misc_feature 1..1338: note = Description of Artificial Sequence: Synthetic coding sequence
  source 1..1338: mol_type = other DNA

SEQ ID NO: 170225 - DNA, 645 bp, synthetic construct
  misc_feature 1..645: note = Description of Artificial Sequence: Synthetic coding sequence
  source 1..645: mol_type = other DNA
atgaatggccgcagcctgattggaggagctggagatgcccggcacggccctgtgtggaaggaccccttcggcaccaaggctggagatgctgcccggcggggcatcgcccggctgagcctggccctggctgatggcagccaggagcaggagcctgaggaggagatcgccatggaggacagccccaccatggtgcgggtggacagccccaccatggtgagaggagagaaccaggtgagcccctgccagggccgccgctgcttccccaaggccctgggctacgtgactggagacatgaaggagctggccaaccagctgaaggacaagcctgtggtgctgcagttcatcgactggatcctgcggggcatcagccaggtggtgtttgtgaacaaccctgtgtctggcatcctgatcctggtgggcctgctggtgcagaacccctggtgggccctgaccggctggctgggcaccgtggtgtccaccctgatggccctgctgctgagccaggacaggagcctgattgccagcggcctgtatggctacaatgccaccctggtgggcgtgctgatggctgtgttcagtgacaagggggactacttctggtggctgctgctgcctgtgtgtgccatgtccatgacctgctgctag

SEQ ID NO: 170226 - DNA, 846 bp, synthetic construct
  misc_feature 1..846: note = Description of Artificial Sequence: Synthetic coding sequence
  source 1..846: mol_type = other DNA
atgggcagaagaaacagaagcctgattgccagcggcctgtatggctacaatgccaccctggtgggcgtgctgatggctgtgttcagtgacaagggggactacttctggtggctgctgctgcctgtgtgtgccatgtccatgacctgccccatcttcagcagcgccctgaacagcatgctgagcaagtgggacctgcccgtcttcaccctgcccttcaacatggccctgtccatgtacctgagcgccaccggccactacaaccccttcttccctgccaagctggtgatccccatcaccacagcccccaacatctcctggagcgacctgagcgccctggagctgctgaagagcatccctgtgggcgtgggccagatctacggctgtgacaacccctggacaggaggcatcttcctgggcgccatcctgctgagcagccccctgatgtgcctgcacgccgccatcggcagcctgctgggcattgctgctggcctgagcctgagcgccccctttgaggacatctacttcggcctgtggggcttcaacagcagcctggcctgcatcgccatgggcggcatgttcatggccctgacctggcagacccacctgctggccctgggctgtgccctcttcaccgcctacctgggcgtgggcatggccaacttcatggccgaggtgggcctgcctgcctgcacctggcccttctgcctggccaccctgctcttcctgatcatgaccaccaagaacagcaacatctacaagatgcccctgagcaaggtgacctacccagaggagaaccgcatcttctacctgcaggccaagaagaggatggtggagagccccctgtag

SEQ ID NO: 170227 - DNA, 774 bp, synthetic construct
  misc_feature 1..774: note = Description of Artificial Sequence: Synthetic coding sequence
  source 1..774: mol_type = other DNA
atggctgtgttcagtgacaagggggactacttctggtggctgctgctgcctgtgtgtgccatgtccatgacctgccccatcttcagcagcgccctgaacagcatgctgagcaagtgggacctgcccgtcttcaccctgcccttcaacatggccctgtccatgtacctgagcgccaccggccactacaaccccttcttccctgccaagctggtgatccccatcaccacagcccccaacatctcctggagcgacctgagcgccctggagctgctgaagagcatccctgtgggcgtgggccagatctacggctgtgacaacccctggacaggaggcatcttcctgggcgccatcctgctgagcagccccctgatgtgcctgcacgccgccatcggcagcctgctgggcattgctgctggcctgagcctgagcgccccctttgaggacatctacttcggcctgtggggcttcaacagcagcctggcctgcatcgccatgggcggcatgttcatggccctgacctggcagacccacctgctggccctgggctgtgccctcttcaccgcctacctgggcgtgggcatggccaacttcatggccgaggtgggcctgcctgcctgcacctggcccttctgcctggccaccctgctcttcctgatcatgaccaccaagaacagcaacatctacaagatgcccctgagcaaggtgacctacccagaggagaaccgcatcttctacctgcaggccaagaagaggatggtggagagccccctgtag

SEQ ID NO: 170228 - DNA, 2763 bp, synthetic construct; identical to SEQ ID NO: 170220
  misc_feature 1..2763: note = Description of Artificial Sequence: Synthetic coding sequence
  source 1..2763: mol_type = other DNA

SEQ ID NO: 170229 - DNA, 708 bp, synthetic construct
  misc_feature 1..708: note = Description of Artificial Sequence: Synthetic coding sequence
  source 1..708: mol_type = other DNA
atgtctgacccccacagcagccccctgctgcctgagcccctgagcagccgctacaagctgtatgaagctgagttcaccagccccagctggcccagcaccagcccagacacccacccagccctgcccctgctggagatgcctgaggagaaggacctgcggagcagcaatgaagacagccacatcgtgaagattgagaagctgaatgaaagaagcaagaggaaggatgatggagtggcccaccgggacagcgctggccagcgctgcatctgcctgagcaaggctgtgggctacctgactggagacatgaaggagtaccgcatctggctgaaggacaagcacctggccctgcagttcatcgactgggtgctgcggggcacagcccaggtgatgttcatcaacaaccccctgagcggcctcatcatcttcatcggcctgctgatccagaacccctggtggaccatcactggaggcctgggcaccgtggtgtccaccctgacagccctggccctgggccaggacagaagtgccatcgccagcggcctgcacggctacaacggcatgctggtgggcctgctgatggctgtgttttctgagaagctggactactactggtggctgctcttccctgtgaccttcaccgccatgtcctggatggagacagacttcaactggagcaagagcggctgctggaagcacctgctgcagtag

SEQ ID NO: 170230 - DNA, 627 bp, synthetic construct
  misc_feature 1..627: note = Description of Artificial Sequence: Synthetic coding sequence
  source 1..627: mol_type = other DNA
atggaccagtggggcgtgtacttcaaccctgtgctggtgtccttctgccagagcttcttcggctaccccctgagcatcttcttcatcgtggtgaatgagttctgtgagcgcttctcctactacggcatgagggccatcctgatcctgtacttcaccaacttcatctcctgggatgacaacctgagcacagccatctaccacacctttgtggccctgtgctacctgacccccatcctgggcgccctgattgctgacagctggctgggcaagttcaagaccatcgtgtccctgagcatcgtgtacaccatcggccaggccgtgacctctgtgagcagcatcaatgacctgacagaccacaaccatgatggcaccccagacagcctgcctgtgcacgtggtgctgagcctgattggcctggccctgattgccctgggcaccggcggcatcaagccctgtgtgtctgccttcggcggggaccagtttgaggagggccaggagaagcagaggaaccgcttcttcagcatcttctacctggccatcaatgccggcagcctgctgagcaccatcatcacccccatgctgcggggcaagcgctacctgaagggcacctctgtgggcctcttctag

SEQ ID NO: 170231 - DNA, 849 bp, synthetic construct
  misc_feature 1..849: note = Description of Artificial Sequence: Synthetic coding sequence
  source 1..849: mol_type = other DNA
atgagggccatcctgatcctgtacttcaccaacttcatctcctgggatgacaacctgagcacagccatctaccacacctttgtggccctgtgctacctgacccccatcctgggcgccctgattgctgacagctggctgggcaagttcaagaccatcgtgtccctgagcatcgtgtacaccatcggccaggccgtgacctctgtgagcagcatcaatgacctgacagaccacaaccatgatggcaccccagacagcctgcctgtgcacgtggtgctgagcctgattggcctggccctgattgccctgggcaccggcggcatcaagccctgtgtgtctgccttcggcggggaccagtttgaggagggccaggagaagcagaggaaccgcttcttcagcatcttctacctggccatcaatgccggcagcctgctgagcaccatcatcacccccatgctgcggggcaagcgctacctgaagggcacctctgtgggcctcttcctggtgcggcccagcccctgcctgctgcgctttgtgctcttcttccccagcgccctcttcagcagctgccagctgcatgctggcatgcacgtgggcatctggagcaagtgcttcctgccctgtgagttccacctgctgtttgtgctcttcaagagcctcatccctgtgaccaccggggagagcaagcccagcctggcctgggccagcatcttcctgaactgctacagctgcaaggtgatgctggtggtgcggggcaagaggcaggagcgctgcctgggcagccaggccggcggccgcagctgccacttcagcctgcaggccctgctgcccagcgacatctctgtgacctag

SEQ ID NO: 170232 - DNA, 2127 bp, synthetic construct
  misc_feature 1..2127: note = Description of Artificial Sequence: Synthetic coding sequence
  source 1..2127: mol_type = other DNA
atgggcatgagcaagagccacagcttcttcggctaccccctgagcatcttcttcatcgtggtgaatgagttctgtgagcgcttctcctactacggcatgagggccatcctgatcctgtacttcaccaacttcatctcctgggatgacaacctgagcacagccatctaccacacctttgtggccctgtgctacctgacccccatcctgggcgccctgattgctgacagctggctgggcaagttcaagaccatcgtgtccctgagcatcgtgtacaccatcggccaggccgtgacctctgtgagcagcatcaatgacctgacagaccacaaccatgatggcaccccagacagcctgcctgtgcacgtggtgctgagcctgattggcctggccctgattgccctgggcaccggcggcatcaagccctgtgtgtctgccttcggcggggaccagtttgaggagggccaggagaagcagaggaaccgcttcttcagcatcttctacctggccatcaatgccggcagcctgctgagcaccatcatcacccccatgctgcgggtgcagcagtgtggcatccacagcaagcaggcctgctaccccctggccttcggcgtgcctgctgccctgatggctgtggccctgattgtgtttgtgctgggcagcggcatgtacaagaagttcaagccccagggcaacatcatgggcaaggtggccaagtgcatcggctttgccatcaagaaccgcttccgccacaggagcaaggccttccccaagcgggagcactggctggactgggccaaggagaagtatgatgagcggctcatcagccagatcaagatggtgaccagggtgatgttcctgtacatccccctgcccatgttctgggccctgtttgaccagcagggcagccgctggaccctgcaggccaccaccatgtctgggaagattggagccctggagatccagcctgaccagatgcagacagtgaatgccatcctgattgtcatcatggtgcccatctttgatgctgtgctgtaccccctcatcgccaagtgtggcttcaacttcaccagcctgaagaagatggctgtgggcatggtgctggcctccatggcctttgtggtggccgccatcgtgcaggtggagattgacaagaccctgcctgtgttccccaagggaaatgaggtgcagatcaaggtgctgaacatcggcaacaacaccatgaacatcagcctgcccggggagatggtgaccctgggccccatgagccagaccaatgccttcatgacctttgatgtgaacaagctgacccgcatcaacatcagcagccctggcagccctgtgacagctgtgacagatgacttcaagcagggccagaggcacaccctgctggtgtgggcccccaaccactaccaggtggtgaaggatggcctgaaccagaagccagagaagggagaaaatggcatccgctttgtgaacaccttcaatgaactcatcaccatcaccatgtctgggaaggtgtatgccaacatcagcagctacaatgccagcacctaccagttcttccccagcggcatcaagggcttcaccatcagcagcacagagatccccccccagtgccagcccaacttcaacaccttctacctggagtttggcagcgcctacacctacatcgtgcagaggaagaatgacagctgcccagaggtgaaggtgtttgaggacatcagcgccaacacagtgaacatggccctgcagatcccccagtacttcctgctgacctgtggggaggtggtgttttctgtgacaggcctggagttctcctacagccaggcccccagcaacatgaagtctgtgctgcaggccggctggctgctgactgtggccgtgggcaacatcatcgtgctgattgtggccggggccggccagttcagcaagcagtgggccgagtacatcctgtttgctgccctgctgctggtggtgtgtgtgatctttgccatcatggcccgcttctacacctacatcaacccagctgagattgaggcccagtttgatgaagatgagaagaagaaccggctggagaagagcaacccctacttcatgtctggggccaacagccagaagcagatgtag

SEQ ID NO: 170233 - DNA, 1503 bp, synthetic construct
  misc_feature 1..1503: note = Description of Artificial Sequence: Synthetic coding sequence
  source 1..1503: mol_type = other DNA
atgcccccagctgtgggcggccctgtgggctacaccccaccagatggcggctggggctgggccgtggtgattggagccttcatcagcatcggcttctcctatgccttccccaagagcatcaccgtcttcttcaaggagattgagggcatcttccacgccaccaccagcgaggtgtcctggatcagcagcatcatgctggccgtgatgtatggaggcggccccatcagcagcatcctggtgaacaagtatggcagcagaattgtgatgattgtgggcggctgcctgagcggctgcggcctgattgctgccagcttctgcaacacagtgcagcagctgtatgtgtgcatcggcgtgattggaggcctgggcctggccttcaacctgaacccagccctgaccatgattggcaagtacttctacaagaggcggcccctggccaacggcctggccatggccggcagccctgtgttcctgtgcaccctggcccccctgaaccaggtgttcttcggcatcttcggctggaggggcagcttcctgatcctgggcggcctgctgctgaactgctgcgtggccggggccctgatgaggcccatcggccccaagcccaccaaggccggcaaggacaagagcaaggccagcctggagaaggccggcaagagcggcgtgaagaaggacctgcatgatgccaacacagacctgattggccgccaccccaagcaggagaagaggagcgtcttccagaccatcaaccagttcctggacctgaccctcttcacccaccggggcttcctgctgtacctgtctggaaatgtcatcatgttcttcggcctgtttgcccccctggtgttcctgagcagctatggcaagagccagcactacagcagcgagaagagcgccttcctgctgagcatcctggcctttgtggacatggtggcccggcccagcatgggcctggtggccaacaccaagcccatccggccccgcatccagtacttctttgctgcctctgtggtggccaacggggtgtgccacatgctggcccccctgagcaccacctacgtgggcttctgtgtgtatgccggcttctttggatttgccttcggctggctgagctctgtgctgtttgagaccctgatggacctggtgggcccccagcgcttcagcagcgctgtgggcctggtgaccatcgtggagtgctgccctgtgctgctgggcccccccctgctgggccgcctgaatgacatgtacggggactacaagtacacctactgggcctgtggggtggtgctgatcatcagcggcatctacctgttcatcggcatgggcatcaactaccgcctgctggccaaggagcagaaggccaatgagcagaagaaggagagcaaggaggaggagaccagcattgatgtggccggcaagcccaatgaggtgaccaaggctgctgagagcccagaccagaaggacacagatggcggccccaaggaggaggagagccctgtgtag

SEQ ID NO: 170234 - DNA, 648 bp, synthetic construct
  misc_feature 1..648: note = Description of Artificial Sequence: Synthetic coding sequence
  source 1..648: mol_type = other DNA
atgcccccagctgtgggcggccctgtgggctacaccccaccagatggcggctggggctgggccgtggtgattggagccttcatcagcatcggcttctcctatgccttccccaagagcatcaccgtcttcttcaaggagattgagggcatcttccacgccaccaccagcgaggtgtcctggatcagcagcatcatgctggccgtgatgtatggaggcggccccatcagcagcatcctggtgaacaagtatggcagcagaattgtgatgattgtgggcggctgcctgagcggctgcggcctgattgctgccagcttctgcaacacagtgcagcagctgtatgtgtgcatcggcgtgattggaggcctgggcctggccttcaacctgaacccagccctgaccatgattggcaagtacttctacaagaggcggcccctggccaacggcctggccatggccggcagccctgtgttcctgtgcaccctggcccccctgaaccaggtgttcttcggcatcttcggctggaggggcagcttcctgatcctgggcggcctgctgctgaactgctgcgtggccggggccctgatgaggcccatcggccccaagcccaccaaggccggcaaggacaagagcaaggccagcctggagtag

SEQ ID NO: 170235 - DNA, 1293 bp, synthetic construct
  misc_feature 1..1293: note = Description of Artificial Sequence: Synthetic coding sequence
  source 1..1293: mol_type = other DNA
atgcccccagctgtgggcggccctgtgggctacaccccaccagatggcggctggggctgggccgtggtgattggagccttcatcagcatcggcttctcctatgccttccccaagagcatcaccgtcttcttcaaggagattgagggcatcttccacgccaccaccagcgaggtgtcctggatcagcagcatcatgctggccgtgatgtatggaggcggccccatcagcagcatcctggtgaacaagtatggcagcagaattgtgatgattgtgggcggctgcctgagcggctgcggcctgattgctgccagcttctgcaacacagtgcagcagctgtatgtgtgcatcggcgtgattggaggcctgggcctggccttcaacctgaacccagccctgaccatgattggcaagtacttctacaagaggcggcccctggccaacggcctggccatggccggcagccctgtgttcctgtgcaccctggcccccctgaaccaggtgttcttcggcatcttcggctggaggggcagcttcctgatcctgggcggcctgctgctgaactgctgcgtggccggggccctgatgaggcccatcggccccaagcccaccaaggccggcaaggacaagagcaaggccagcctggagaaggccggcaagagcggcgtgaagaaggacctgcatgatgccaacacagacctgattggccgccaccccaagcaggagaagaggagcgtcttccagaccatcaaccagttcctggacctgaccctcttcacccaccggggcttcctgctgtacctgtctggaaatgtcatcatgttcttcggcctgtttgcccccctggtgttcctgagcagctatggcaagagccagcactacagcagcgagaagagcgccttcctgctgagcatcctggcctttgtggacatggtggcccggcccagcatgggcctggtggccaacaccaagcccatccggccccgcatccagtacttctttgctgcctctgtggtggccaacggggtgtgccacatgctggcccccctgagcaccacctacgtgggcttctgtgtgtatgccggcttctttggatttgccttcggctggctgagctctgtgctgtttgagaccctgatggacctggtgggcccccagcgcttcagcagcgctgtgggcctggtgaccatcgtggagtgctgccctgtgctgctgggcccccccctgctgggcatcgtgtacctgcccaccaacgtgggcctgctgcagaacaagcacgtgcgctgggagtgctag

SEQ ID NO: 170236 - DNA, 891 bp, synthetic construct
  misc_feature 1..891: note = Description of Artificial Sequence: Synthetic coding sequence
  source 1..891: mol_type = other DNA
atgcccccagctgtgggcggccctgtgggctacaccccaccagatggcggctggggctgggccgtggtgattggagccttcatcagcatcggcttctcctatgccttccccaagagcatcaccgtcttcttcaaggagattgagggcatcttccacgccaccaccagcgaggtgtcctggatcagcagcatcatgctggccgtgatgtatggaggcggccccatcagcagcatcctggtgaacaagtatggcagcagaattgtgatgattgtgggcggctgcctgagcggctgcggcctgattgctgccagcttctgcaacacagtgcagcagctgtatgtgtgcatcggcgtgattggaggcctgggcctggccttcaacctgaacccagccctgaccatgattggcaagtacttctacaagaggcggcccctggccaacggcctggccatggccggcagccctgtgttcctgtgcaccctggcccccctgaaccaggtgttcttcggcatcttcggctggaggggcagcttcctgatcctgggcggcctgctgctgaactgctgcgtggccggggccctgatgaggcccatcggccccaagcccaccaaggccggcaaggacaagagcaaggccagcctggagaaggccggcaagagcggcgtgaagaaggacctgcatgatgccaacacagacctgattggccgccaccccaagcaggagaagaggagcgtcttccagaccatcaaccagttcctggacctgaccctcttcacccaccggggcttcctgctgtacctgtctggaaatgtcatcatgttcttcggcctgtttgcccccctggtgttcctgagcagctatggcaagagccagcactacagcagcgagtag

SEQ ID NO: 170237 - DNA, 1371 bp, synthetic construct
  misc_feature 1..1371: note = Description of Artificial Sequence: Synthetic coding sequence
  source 1..1371: mol_type = other DNA
atgcccccagctgtgggcggccctgtgggctacaccccaccagatggcggctggggctgggccgtggtgattggagccttcatcagcatcggcttctcctatgccttccccaagagcatcaccgtcttcttcaaggagattgagggcatcttccacgccaccaccagcgaggtgtcctggatcagcagcatcatgctggccgtgatgtatggaggcggccccatcagcagcatcctggtgaacaagtatggcagcagaattgtgatgattgtgggcggctgcctgagcggctgcggcctgattgctgccagcttctgcaacacagtgcagcagctgtatgtgtgcatcggcgtgattggaggcctgggcctggccttcaacctgaacccagccctgaccatgattggcaagtacttctacaagaggcggcccctggccaacggcctggccatggccggcagccctgtgttcctgtgcaccctggcccccctgaaccaggtgttcttcggcatcttcggctggaggggcagcttcctgatcctgggcggcctgctgctgaactgctgcgtggccggggccctgatgaggcccatcggccccaagcccaccaaggccggcaaggacaagagcaaggccagcctggagaaggccggcaagagcggcgtgaagaaggacctgcatgatgccaacacagacctgattggccgccaccccaagcaggagaagaggagcgtcttccagaccatcaaccagttcctggacctgaccctcttcacccaccggggcttcctgctgtacctgtctggaaatgtcatcatgttcttcggcctgtttgcccccctggtgttcctgagcagctatggcaagagccagcactacagcagcgagaagagcgccttcctgctgagcatcctggcctttgtggacatggtggcccggcccagcatgggcctggtggccaacaccaagcccatccggccccgcatccagtacttctttgctgcctctgtggtggccaacggggtgtgccacatgctggcccccctgagcaccacctacgtgggcttctgtgtgtatgccggcttctttggatttgccttcggctggctgagctctgtgctgtttgagaccctgatggacctggtgggcccccagcgcttcagcagcgctgtgggcctggtgaccatcgtggagtgctgccctgtgctgctgggcccccccctgctgggccgcctgaatgacatgtacggggactacaagtacacctactgggcctgtggggtggtgctgatcatcagcggcatctacctgttcatcggcatgggcatcaactaccgcctgctggccaaggagcagaaggccaatgaatag

SEQ ID NO: 170238 - DNA, 1503 bp, synthetic construct; identical to SEQ ID NO: 170233
  misc_feature 1..1503: note = Description of Artificial Sequence: Synthetic coding sequence
  source 1..1503: mol_type = other DNA

SEQ ID NO: 170239 - DNA, 606 bp, synthetic construct
  misc_feature 1..606: note = Description of Artificial Sequence: Synthetic coding sequence
  source 1..606: mol_type = other DNA
atgaagcacgtgaatgaacgcttccaggatgagaagaacaaggaggtggtgctgatgtgcattggagtgaccagcggcgtgggccgcctgctgtttggaagaattgctgactatgtgcctggggtgaagaaggtgtacctgcaggtgctgtccttcttcttcatcggcctgatgtccatgatgatccccctgtgcagcatctttggagccctgattgctgtgtgcctgatcatgggcctgtttgatggctgcttcatcagcatcatggcccccatcgcctttgagctggtgggcgcccaggatgtgtcccaggccatcggcttcctgctgggcttcatgagcatccccatgacagtgggcccccccatcgccggcctgctgcgggacaagctgggcagctatgatgtggccttctacctggccggcgtgccccccctgattggaggagctgtgctgtgcttcatcccctggatccacagcaagaagcagcgggagatcagcaagaccaccgggaaggagaagatggagaagatgctggagaaccagaacagcctgctgagcagcagcagcggcatgttcaagaaggagagtgacagcatcatctag

SEQ ID NO: 170240 - DNA, 1548 bp, synthetic construct
  misc_feature 1..1548: note = Description of Artificial Sequence: Synthetic coding sequence
  source 1..1548: mol_type = other DNA
atggtgctgagccaggaggagccagacagcgcccggggcaccagcgaggcccagcccctgggccctgcccccactggagctgcccctcctcctggccctggccccagcgacagccctgaggccgctgtggagaaggtggaggtggagctggccggccctgccacagctgagccccatgagcccccagagcccccagagggcggctggggctggctggtgatgctggccgccatgtggtgcaatggatctgtgtttggcatccagaatgcctgtggggtgctgtttgtgtccatgctggagaccttcggcagcaaggatgatgacaagatggtgttcaagacagcctgggtgggcagcctgtccatgggcatgatcttcttctgctgccccatcgtgtctgtgttcacagacctgtttggctgcaggaagacagctgtggtgggcgctgctgtgggctttgtgggcctgatgagcagcagctttgtgagcagcattgagcccctgtacctgacctacggcatcatctttgcctgtggctgcagctttgcctaccagcccagcctggtgatcctgggccactacttcaagaagaggctgggcctggtgaatggaattgtgacagctggcagctctgtgttcaccatcctgctgcccctgctgctgcgggtgctgattgattctgtgggcctcttctacaccctgcgggtgctgtgcatcttcatgtttgtgctcttcctggccggcttcacctaccggcccctggccaccagcaccaaggacaaggagagcggcggcagcggcagcagcctcttcagcaggaagaagttcagcccccccaagaagatcttcaactttgccatcttcaaggtgacagcctatgctgtgtgggccgtgggcatccccctggccctgtttggctactttgtgccctacgtgcacctgatgaagcacgtgaatgaacgcttccaggatgagaagaacaaggaggtggtgctgatgtgcattggagtgaccagcggcgtgggccgcctgctgtttggaagaattgctgactatgtgcctggggtgaagaaggtgtacctgcaggtgctgtccttcttcttcatcggcctgatgtccatgatgatccccctgtgcagcatctttggagccctgattgctgtgtgcctgatcatgggcctgtttgatggctgcttcatcagcatcatggcccccatcgcctttgagctggtgggcgcccaggatgtgtcccaggccatcggcttcctgctgggcttcatgagcatccccatgacagtgggcccccccatcgccggcctgctgcgggacaagctgggcagctatgatgtggccttctacctggccggcgtgccccccctgattggaggagctgtgctgtgcttcatcccctggatccacagcaagaagcagcgggagatcagcaagaccaccgggaaggagaagatggagaagatgctggagaaccagaacagcctgctgagcagcagcagcggcatgttcaagaaggagagtgacagcatcatctag

SEQ ID NO: 170241 - DNA, 651 bp, synthetic construct
  misc_feature 1..651: note = Description of Artificial Sequence: Synthetic coding sequence
  source 1..651: mol_type = other DNA
atggtgttcaagacagcctgggtgggcagcctgtccatgggcatgatcttcttctgctgccccatcgtgtctgtgttcacagacctgtttggctgcaggaagacagctgtggtgggcgctgctgtgggctttgtgggcctgatgagcagcagctttgtgagcagcattgagcccctgtacctgacctacggcatcatctttgcctgtggctgcagctttgcctaccagcccagcctggtgatcctgggccactacttcaagaagaggctgggcctggtgaatggcatcgtgacagctggcagcagcgtcttcaccatcctgctgcccctgctgctgcgggtgctgattgacagcgtgggcctcttctacaccctgcgggtgctgtgcatcttcatgtttgtgctcttcctggccggcttcacctaccggcccctggccaccagcaccaaggacaaggagagcggcggcagcggcagcagcctcttcagcaggaagaagttcagcccccccaagaagatcttcaactttgccatcttcaaggtgacagcctatgctgtgtgggccgtgggcatccccctggccctgtttggctactttgtgccctacgtgcacctggccaagttctcctttgtgatcctgaagtatgaatag

SEQ ID NO: 170242 - DNA, 636 bp, synthetic construct
  misc_feature 1..636: note = Description of Artificial Sequence: Synthetic coding sequence
  source 1..636: mol_type = other DNA
tgatgggtgggcagcctgtccatgggcatgatcttcttctgctgccccatcgtgtctgtgttcacagacctgtttggctgcaggaagacagctgtggtgggcgctgctgtgggctttgtgggcctgatgagcagcagctttgtgagcagcattgagcccctgtacctgacctacggcatcatctttgcctgtggctgcagctttgcctaccagcccagcctggtgatcctgggccactacttcaagaagaggctgggcctggtgaatggaattgtgacagctggcagctctgtgttcaccatcctgctgcccctgctgctgcgggtgctgattgattctgtgggcctcttctacaccctgcgggtgctgtgcatcttcatgtttgtgctcttcctggccggcttcacctaccggcccctggccaccagcaccaaggacaaggagagcggcggcagcggcagcagcctcttcagcaggaagaagttcagcccccccaagaagatcttcaactttgccatcttcaaggtgacagcctatgctgtgtgggccgtgggcatccccctggccctgtttggctactttgtgccctacgtgcacctggccaagttctcctttgtgatcctgaagtatgaatag

SEQ ID NO: 170243 - DNA, 621 bp, synthetic construct
  misc_feature 1..621: note = Description of Artificial Sequence: Synthetic coding sequence
  source 1..621: mol_type = other DNA
tgatgggtgggcagcctgtccatgggcatgatcttcttctgctgccccatcgtgtctgtgttcacagacctgtttggctgcaggaagacagctgtggtgggcgctgctgtgggctttgtgggcctgatgagcagcagctttgtgagcagcattgagcccctgtacctgacctacggcatcatctttgcctgtggctgcagctttgcctaccagcccagcctggtgatcctgggccactacttcaagaagaggctgggcctggtgaatggaattgtgacagctggcagctctgtgttcaccatcctgctgcccctgctgctgcgggtgctgattgattctgtgggcctcttctacaccctgcgggtgctgtgcatcttcatgtttgtgctcttcctggccggcttcacctaccggcccctggccaccagcaccaaggacaaggagagcggcggcagcggcagcagcctcttcagcaggaagaagttcagcccccccaagaagatcttcaactttgccatcttcaaggtgacagcctatgctgtgtgggccgtgggcatccccctggccctgtttggctactttgtgccctacgtgcacctggtgtccatgctgctgcactag

SEQ ID NO: 170244 - DNA, 981 bp, synthetic construct
  misc_feature 1..981: note = Description of Artificial Sequence: Synthetic coding sequence
  source 1..981: mol_type = other DNA
atggtgctgagccaggaggagccagacagcgcccggggcaccagcgaggcccagcccctgggccctgcccccactggagctgcccctcctcctggccctggccccagcgacagccctgaggccgctgtggagaaggtggaggtggagctggccggccctgccacagctgagccccatgagcccccagagcccccagagggcggctggggctggctggtgatgctggccgccatgtggtgcaatggatctgtgtttggcatccagaatgcctgtggggtgctgtttgtgtccatgctggagaccttcggcagcaaggatgatgacaagatggtgttcaagacagcctgggtgggcagcctgtccatgggcatgatcttcttctgctgccccatcgtgtctgtgttcacagacctgtttggctgcaggaagacagctgtggtgggcgctgctgtgggctttgtgggcctgatgagcagcagctttgtgagcagcattgagcccctgtacctgacctacggcatcatctttgcctgtggctgcagctttgcctaccagcccagcctggtgatcctgggccactacttcaagaagaggctgggcctggtgaatggaattgtgacagctggcagctctgtgttcaccatcctgctgcccctgctgctgcgggtgctgattgattctgtgggcctcttctacaccctgcgggtgctgtgcatcttcatgtttgtgctcttcctggccggcttcacctaccggcccctggccaccagcaccaaggacaaggagagcggcggcagcggcagcagcctcttcagcaggaagaagttcagcccccccaagaacttccagttctgccacctgcagggcgacagcctgtgcagcgtgggctcctggaacaccacctgcaccttctggatcctgtgtgccctgtgcagcctgggggagtatgcccccagcctcatcatgaacatcaccatctag

SEQ ID NO: 170245 - DNA, 1461 bp, synthetic construct
  misc_feature 1..1461: note = Description of Artificial Sequence: Synthetic coding sequence
  source 1..1461: mol_type = other DNA
atggccaaggtgaacagagcccggagcaccagccccccagatggcggctggggctggatgattgtggccggctgcttcctggtgaccatctgcaccagggctgtgacccgctgcatcagcatcttctttgtggagttccagacctacttcacccaggactatgcccagacagcctggatccacagcatcgtggactgtgtgaccatgctgtgtgcccccctgggctctgtggtgagcaaccacctgagctgccaggtgggcatcatgctgggcggcctgctggccagcacaggcctcatcctgagcagctttgccaccagcctgaagcacctgtacctgaccctgggcgtgctgaccggcctgggctttgccctgtgctacagccctgccatcgccatggtgggcaagtacttcagcaggaggaaggccctggcctacggcatcgccatgagcggcagcggcatcggcaccttcatcctggcccctgtggtgcagctgctgattgagcagttctcctggaggggggccctgctgatcctgggcggctttgtgctgaacctgtgtgtgtgtggggccctgatgaggcccatcaccctgaaggaggaccacaccaccccagagcagaaccacgtgtgcaggacccagaaggaggacatcaagagggtgagcccctacagcagcctgaccaaggagtgggcccagacctgcctgtgctgctgcctgcagcaggagtacagcttcctgctgatgtctgactttgtggtgctggccgtgtctgtgctcttcatggcctacggctgcagccccctgtttgtgtacctggtgccctatgccctgtctgtgggcgtgagccaccagcaggccgccttcctgatgagcatcctgggcgtcatcgacatcatcggcaacatcaccttcggctggctgacagaccggcgctgcctgaagaactaccagtatgtgtgctacctgtttgctgtgggcatggatggcctgtgctacctgtgcctgcccatgctgcagagcctgcccctgctggtgcccttcagctgcaccttcggctactttgatggagcctacgtgaccctcatccctgtggtgaccacagaaattgtgggcaccaccagcctgagcagcgccctgggcgtggtgtacttcctgcatgctgtgccctacctggtgagcccccccatcgccggccgcctggtggacaccaccggcagctacacagctgccttcctgctgtgtggcttctccatgatcttcagctctgtgctgctgggctttgcccggctcatcaagaggatgaggaagacccagctgcagttcatcgccaaggagagtgaccccaagctgcagctgtggaccaatggatctgtggcctacagcgtggcccgggagctggaccagaagcacggggagcctgtggccacagctgtgcccggctacagcctgacctag

SEQ ID NO: 170246 - DNA, 1551 bp, synthetic construct
  misc_feature 1..1551: note = Description of Artificial Sequence: Synthetic coding sequence
  source 1..1551: mol_type = other DNA
atgcccagcggcagccactggacagccaacagcagcaagatcatcacctggctgctggagcagcccgggaaggaggagaagaggaagaccatggccaaggtgaacagagcccggagcaccagccccccagatggcggctggggctggatgattgtggccggctgcttcctggtgaccatctgcaccagggctgtgacccgctgcatcagcatcttctttgtggagttccagacctacttcacccaggactatgcccagacagcctggatccacagcatcgtggactgtgtgaccatgctgtgtgcccccctgggctctgtggtgagcaaccacctgagctgccaggtgggcatcatgctgggcggcctgctggccagcacaggcctcatcctgagcagctttgccaccagcctgaagcacctgtacctgaccctgggcgtgctgaccggcctgggctttgccctgtgctacagccctgccatcgccatggtgggcaagtacttcagcaggaggaaggccctggcctacggcatcgccatgagcggcagcggcatcggcaccttcatcctggcccctgtggtgcagctgctgattgagcagttctcctggaggggggccctgctgatcctgggcggctttgtgctgaacctgtgtgtgtgtggggccctgatgaggcccatcaccctgaaggaggaccacaccaccccagagcagaaccacgtgtgcaggacccagaaggaggacatcaagagggtgagcccctacagcagcctgaccaaggagtgggcccagacctgcctgtgctgctgcctgcagcaggagtacagcttcctgctgatgtctgactttgtggtgctggccgtgtctgtgctcttcatggcctacggctgcagccccctgtttgtgtacctggtgccctatgccctgtctgtgggcgtgagccaccagcaggccgccttcctgatgagcatcctgggcgtcatcgacatcatcggcaacatcaccttcggctggctgacagaccggcgctgcctgaagaactaccagtatgtgtgctacctgtttgctgtgggcatggatggcctgtgctacctgtgcctgcccatgctgcagagcctgcccctgctggtgcccttcagctgcaccttcggctactttgatggagcctacgtgaccctcatccctgtggtgaccacagaaattgtgggcaccaccagcctgagcagcgccctgggcgtggtgtacttcctgcatgctgtgccctacctggtgagcccccccatcgccggccgcctggtggacaccaccggcagctacacagctgccttcctgctgtgtggcttctccatgatcttcagctctgtgctgctgggctttgcccggctcatcaagaggatgaggaagacccagctgcagttcatcgccaaggagagtgaccccaagctgcagctgtggaccaatggatctgtggcctacagcgtggcccgggagctggaccagaagcacggggagcctgtggccacagctgtgcccggctacagcctgacctag

SEQ ID NO: 170247 - DNA, 78 bp, synthetic construct
  misc_feature 1..78: note = Description of Artificial Sequence: Synthetic coding sequence
  source 1..78: mol_type = other DNA
atgcccagcggcagccactggacagccaacagcagcaagatcatcacctggctgctggagcagcccgggaaggagtag

SEQ ID NO: 170248 - DNA, 453 bp, synthetic construct
  misc_feature 1..453: note = Description of Artificial Sequence: Synthetic coding sequence
  source 1..453: mol_type = other DNA
atgaggcccatcaccctgaaggaggaccacaccaccccagagcagaaccacgtgtgcaggacccagaaggaggacatcaagagggtgagcccctacagcagcctgaccaaggagtgggcccagacctgcctgtgctgctgcctgcagcaggagtacagcttcctgctgatgtctgactttgtggtgctggccgtgtctgtgctcttcatggcctacggctgcagccccctgtttgtgtacctggtgccctatgccctgtctgtgggcgtgagccaccagcaggccgccttcctgatgagcatcctgggcgtgattgacatcatcggcaacatcaccttcggctggctgacagaccggcgcttctgcatcaagaccttcggcatcttcaggaagtctgtgaggaagatgtacatcctgcggagcaccatcctgcacttctacacagagttctag

SEQ ID NO: 170249 - DNA, 1842 bp, synthetic construct
  misc_feature 1..1842: note = Description of Artificial Sequence: Synthetic coding sequence
  source 1..1842: mol_type = other DNA
atgggccggggcggcggcggcctggatgtgggcggcggcggggagggcagccgggaccggctgagcagagatggcctggcctcctggggcgctgagcccggcggcggcggcagcggcagcggcagcagcagcccccccagcagcagcagctgcagcagcaggaacaagtaccagccccagagcggcagcagcggccccagcagccacagccccccagctgccatggccctgcagagccaggccagcgaggaggccaagggcccctggcaggaggccgaccaggagcagcaggagcctgtgggcagccctgagcctgagagcgagcctgagcctgagcctgagcctgagcctgtgcctgtgcccccacctgagccccagcctgagccccagcccctgcctgaccctgcccccctgcctgagctggagtttgaaagtgagcgggtgcatgagcctgagcccacccccaccgtggagacccggggcacagcccggggcttccagcccccagagggcggcttcggctgggtggtggtgtttgctgccacctggtgcaatggcagcatcttcggcatccacaacagcgtgggcatcctgtacagcatgctgctggaggaggagaaggagaagaaccggcaggtggagttccaggccgcctgggtgggcgccctggccatgggcatgatcttcttctgcagccccatcgtgtccatcttcacagaccggctgggctgccgcatcacagccacagctggagctgctgtggccttcatcggcctgcacaccagcagcttcaccagcagcctgagcctgcgctacttcacctacggcatcctgtttggctgcggctgcagctttgccttccagcccagcctggtgatcctgggccactacttccagaggcggctgggcctggccaacggggtggtgtctgctggcagcagcatcttctccatgtccttccccttcctgatccgcatgctgggggacaagatcaagctggcccagaccttccaggtgctgagcaccttcatgtttgtgctgatgctgctgagcctgacctaccggcccctgctgcccagcagccaggacacccccagcaagaggggcgtgaggaccctgcaccagcgcttcctggcccagctgaggaagtacttcaacatgagggtcttccggcagaggacctaccgcatctgggccttcggcattgctgctgctgccctgggctactttgtgccctacgtgcacctgatgaagtatgtggaggaggagttcagcgagatcaaggagacctgggtgctgctggtgtgcattggagccaccagcggcctgggccgcctggtgtctggccacatcagtgacagcatccctggcctgaagaagatctacctgcaggtgctgtccttcctgctgctgggcctgatgtccatgatgatccccctgtgccgggactttggaggcctcatcgtggtgtgcctcttcctgggcctgtgtgatggcttcttcatcaccatcatggcccccatcgcctttgagctggtgggccccatgcaggccagccaggccatcggctacctgctgggcatgatggccctgcccatgattgctggcccccccatcgccggcctgctgaggaactgctttggagactaccacgtggccttctactttgctggggtgccccccatcattggagctgtgatcctcttctttgtgcccctgatgcaccagaggatgttcaagaaggagcagagggacagcagcaaggacaagatgctggccccagaccctgaccccaatggagagctgctgcccggcagccccaaccctgaggagcccatctag

SEQ ID NO: 170250 - DNA, 1437 bp, synthetic construct
  misc_feature 1..1437: note = Description of Artificial Sequence: Synthetic coding sequence
  source 1..1437: mol_type = other DNA
atgccacccatgcccagcgcccctcctgtgcaccccccaccagatggcggctggggctggatcgtggtgggcgccgccttcatcagcatcggcttctcctatgccttccccaaggctgtgacagtgttcttcaaggagatccagcagatcttccacaccacctacagcgagatcgcctggatcagcagcatcatgctggccgtgatgtatgccggcggccctgtgtcctctgtgctggtgaacaagtatggcagcaggcctgtggtgattgctgggggcctgctgtgctgcctgggcatggtgctggccagcttcagcagctctgtggtgcagctgtacctgaccatgggcttcatcaccggcctgggcctggccttcaacctgcagcctgccctgaccatcatcggcaagtacttctacaggaagaggcccatggccaacggcctggccatggccggcagccctgtgttcctgagcagcctggcccccttcaaccagtacctgttcaacaccttcggctggaagggcagcttcctgatcctgggcagcctgctgctgaatgcctgtgtggccggcagcctgatgaggcccctgggccccaaccagaccaccagcaagagcaagaacaagacaggcaagacagaagatgacagcagccccaagaagatcaagaccaagaagagcacctgggagaaggtgaacaagtacctggacttcagcctcttcaagcaccggggcttcctgatctacctgtctggaaatgtcatcatgttcctgggcttctttgcccccatcatcttcctggccccctatgccaaggaccagggcattgatgagtacagcgctgccttcctgctgtctgtgatggcctttgtggacatgtttgcccggcccagcgtgggcctgattgccaacagcaagtacatccggccccgcatccagtacttcttctcctttgccatcatgttcaacggggtgtgccacctgctgtgccccctggcccaggactacaccagcctggtgctgtatgctgtgttcttcggcctgggctttggatctgtgtcctctgtgctgtttgagaccctgatggacctggtgggcgccccccgcttcagcagcgctgtgggcctggtgaccatcgtggagtgtggccctgtgctgctgggcccccccctggccggcaagctggtggacctgaccggggagtacaagtacatgtacatgagctgtggggccatcgtggtggccgcctctgtgtggctgctgattggaaatgccatcaactaccgcctgctggccaaggagaggaaggaggagaatgcccggcagaagacccgggagagcgagcccctgagcaagagcaagcacagtgaagatgtgaatgtgaaggtgtccaatgcccagagcgtgaccagcgagcgggagaccaacatctag

SEQ ID NO: 170251 - DNA, 1140 bp, synthetic construct
  misc_feature 1..1140: note = Description of Artificial Sequence: Synthetic coding sequence
  source 1..1140: mol_type = other DNA
atggtgctggccagcttcagcagctctgtggtgcagctgtacctgaccatgggcttcatcaccggcctgggcctggccttcaacctgcagcctgccctgaccatcatcggcaagtacttctacaggaagaggcccatggccaacggcctggccatggccggcagccctgtgttcctgagcagcctggcccccttcaaccagtacctgttcaacaccttcggctggaagggcagcttcctgatcctgggcagcctgctgctgaatgcctgtgtggccggcagcctgatgaggcccctgggccccaaccagaccaccagcaagagcaagaacaagacaggcaagacagaagatgacagcagccccaagaagatcaagaccaagaagagcacctgggagaaggtgaacaagtacctggacttcagcctcttcaagcaccggggcttcctgatctacctgtctggaaatgtcatcatgttcctgggcttctttgcccccatcatcttcctggccccctatgccaaggaccagggcattgatgagtacagcgctgccttcctgctgtctgtgatggcctttgtggacatgtttgcccggcccagcgtgggcctcatcgccaacagcaagtacatccggccccgcatccagtacttcttctcctttgccatcatgtttaatggagtgtgccacctgctgtgccccctggcccaggactacaccagcctggtgctgtatgctgtgttcttcggcctgggcttcggctctgtgtcctctgtgctgtttgagaccctgatggacctggtgggcgccccccgcttcagcagcgctgtgggcctggtgaccatcgtggagtgtggccctgtgctgctgggcccccccctggccggcaagctggtggacctgactggagagtacaagtacatgtacatgagctgtggggccatcgtggtggccgcctctgtgtggctgctgattggaaatgccatcaactaccgcctgctggccaaggagaggaaggaggagaatgcccggcagaagacccgggagagcgagcccctgagcaagagcaagcacagtgaagatgtgaatgtgaaggtgtccaatgcccagagcgtgaccagcgagcgggagaccaacatctag

SEQ ID NO: 170252 - DNA, 1437 bp, synthetic construct; identical to SEQ ID NO: 170250
  misc_feature 1..1437: note = Description of Artificial Sequence: Synthetic coding sequence
  source 1..1437: mol_type = other DNA

SEQ ID NO: 170253 - DNA, 1437 bp, synthetic construct; identical to SEQ ID NO: 170250
  misc_feature 1..1437: note = Description of Artificial Sequence: Synthetic coding sequence
  source 1..1437: mol_type = other DNA

SEQ ID NO: 170254 - DNA, 1437 bp, synthetic construct; identical to SEQ ID NO: 170250
  misc_feature 1..1437: note = Description of Artificial Sequence: Synthetic coding sequence
  source 1..1437: mol_type = other DNA

SEQ ID NO: 170255 - DNA, 1530 bp, synthetic construct
  misc_feature 1..1530: note = Description of Artificial Sequence: Synthetic coding sequence
  source 1..1530: mol_type = other DNA
atggagctgaagaagagcccagatggcggctggggctgggtgattgtgtttgtgtccttcctgacccagttcctgtgctacggcagccccctggccgtgggcgtgctgtacatcgagtggctggatgccttcggggagggcaagggcaagacagcctgggtgggcagcctggccagcggcgtgggcctgctggccagccctgtgtgcagcctgtgtgtgtcctcctttggagcccggcctgtgaccatcttcagcggcttcatggtggccggcggcctgatgctgagcagctttgcccccaacatctacttcctgttcttctcctatggaattgtggtgggcctgggctgcggcctgctgtacacagccaccgtgaccatcacctgccagtactttgatgacagaagaggcctggccctgggcctcatcagcacaggcagctctgtgggcctcttcatctatgctgccctgcagaggatgctggtggagttctacggcctggatggctgcctgctgattgtgggcgccctggccctgaacatcctggcctgtggcagcctgatgaggcccctgcagagcagtgactgccccctgcccaagaagatcgcccctgaggacctgcctgacaagtacagcatctacaatgagaagggcaagaacctggaggagaacatcaacatcctggacaagagctacagcagcgaggagaagtgccgcatcaccctggccaacggggactggaagcaggacagcctgctgcacaagaaccccaccgtgacccacaccaaggagcctgagacctacaagaagaaggtggccgagcagacctacttctgcaagcagctggccaagaggaagtggcagctgtacaagaactactgtggggagaccgtggccctcttcaagaacaaggtgttttctgccctcttcatcgccatcctgctgtttgacatcggcggcttcccccccagcctgctgatggaggatgtggcccggagcagcaatgtgaaggaggaggagttcatcatgcccctcatcagcatcatcggcatcatgacagctgtgggcaagctgctgctgggcatcctggccgacttcaagtggatcaacaccctgtacctgtatgtggccaccctcatcatcatgggcctggccctgtgtgccatcccctttgccaagagctatgtgaccctggccctgctgagcggcatcctgggcttcctgactggaaactggagcatcttcccctacgtgaccaccaagacagtgggcatcgagaagctggcccacgcctacggcatcctgatgttctttgctggcctgggcaacagcctgggcccccccatcgtgggctggttctatgactggacccagacctatgacatcgccttctacttcagcggcttctgtgtgctgctgggcggcttcatcctgctgctggccgccctgcccagctgggacacctgcaacaagcagctgcccaagccagcccccaccaccttcctgtacaaggtggccagcaatgtgtag

SEQ ID NO: 170256 - DNA, 1530 bp, synthetic construct; identical to SEQ ID NO: 170255
  misc_feature 1..1530: note = Description of Artificial Sequence: Synthetic coding sequence
  source 1..1530: mol_type = other DNA

SEQ ID NO: 170257 - DNA, 198 bp, synthetic construct
  misc_feature 1..198: note = Description of Artificial Sequence: Synthetic coding sequence
  source 1..198: mol_type = other DNA
atggagctgaagaagagcccagatggcggctggggctgggtgattgtgtttgtgtccttcctgacccagttcctgtgctacggcagccccctggccgtgggcgtgctgtacatcgagtggctggatgccttcggggagggcaagggcaagacagcctgggtgggcagcctggccagcggcgtgggcctgctggcctag

SEQ ID NO: 170258 - DNA, 1488 bp, synthetic construct
  misc_feature 1..1488: note = Description of Artificial Sequence: Synthetic coding sequence
  source 1..1488: mol_type = other DNA
atgaggagccctgtgcgggacctggccagaaatgatggagaggagagcacagacaggacccccctgctgcccggggcccccagggctgaggccgcccctgtgtgctgcagcgcccgctacaacctggccatcctggccttcttcggcttcttcatcgtgtatgccctgcgggtgaacctgtctgtggccctggtggacatggtggacagcaacaccaccctggaggacaacagaaccagcaaggcctgcccagagcacagcgcccccatcaaggtgcaccacaaccagacaggcaagaagtaccagtgggatgctgagacccagggctggatcctgggcagcttcttctacggctacatcatcacccagatccctgggggctacgtggccagcaagattggaggcaagatgctgctgggcttcggcatcctgggcacagctgtgctgaccctcttcacccccatcgctgctgacctgggcgtgggccccctgattgtgctgcgggccctggagggcctgggggagggcgtgaccttccctgccatgcacgccatgtggagctcctgggccccacccctggagaggagcaagctgctgagcatctcctatgctggggcccagctgggcaccgtcatcagcctgcccctgagcggcatcatctgctactacatgaactggacctacgtgttctacttcttcggcaccatcggcatcttctggttcctgctgtggatctggctggtgtctgacaccccccagaagcacaagaggatcagccactatgagaaggagtacatcctgagcagcctgaggaaccagctgagcagccagaagtctgtgccctgggtgcccatcctgaagagcctgcccctgtgggccatcgtggtggcccacttctcctacaactggaccttctacaccctgctgaccctgctgcccacctacatgaaggagatcctgcgcttcaacgtgcaggagaatggcttcctgagcagcctgccctacctgggctcctggctgtgcatgatcctgagcggccaggccgctgacaacctgcgggccaagtggaacttcagcaccctgtgtgtgcggcgcatcttcagcctcatcggcatgattggccctgctgtgttcctggtggccgccggcttcatcggctgtgactacagcctggccgtggccttcctgaccatcagcaccaccctgggcggcttctgcagcagcggcttcagcatcaaccacctggacatcgcccccagctatgccggcatcctgctgggcatcaccaacacctttgccaccatccctggcatggtgggccctgtgattgccaagagcctgaccccagacaacacagtgggggagtggcagaccgtcttctacatcgccgccgccatcaacgtgtttggagccatcttcttcaccctgtttgccaagggggaggtgcagaactgggccctgaatgaccaccacggccaccgccactag

SEQ ID NO: 170259 - DNA, 546 bp, synthetic construct
  misc_feature 1..546: note = Description of Artificial Sequence: Synthetic coding sequence
  source 1..546: mol_type = other DNA
atgaggagccctgtgcgggacctggccagaaatgatggagaggagagcacagacaggacccccctgctgcccggggcccccagggctgaggccgcccctgtgtgctgcagcgcccgctacaacctggccatcctggccttcttcggcttcttcatcgtgtatgccctgcgggtgaacctgtctgtggccctggtggacatggtggacagcaacaccaccctggaggacaacagaaccagcaaggcctgcccagagcacagcgcccccatcaaggtgcaccacaaccagacaggcaagaagtaccagtgggatgctgagacccagggctggatcctgggcagcttcttctacggctacatcatcacccagatccctgggggctacgtggccagcaagattggaggcaagatgctgctgggcttcggcatcctgggcacagctgtgctgaccctcttcacccccatcgctgctgacctgggcgtgggccccctgattgtgctgcgggccctggagggcctgggggaggagcacagcctgggccagtag

SEQ ID NO: 170260 - DNA, 1404 bp, synthetic construct
  misc_feature 1..1404: note = Description of Artificial Sequence: Synthetic coding sequence
  source 1..1404: mol_type = other DNA
atgcagatggacaaccggctgccccccaagaaggtgcccggcttctgcagcttccgctatggcctgtccttcctggtgcactgctgcaacgtcatcatcacagcccagagggcctgcctgaacctgaccatggtggtgatggtgaacagcacagacccccacggcctgcccaacaccagcaccaagaagctgctggacaacatcaagaaccccatgtacaactggagcccagacatccagggcatcatcctgagcagcaccagctatggagtcatcatcatccaggtgcctgtgggctacttcagcggcatctacagcaccaagaagatgattggatttgccctgtgcctgagctctgtgctgagcctgctgatccccccagctgctggcattggagtggcctgggtggtggtgtgcagagctgtgcagggcgccgcccagggcatcgtggccacagcccagtttgagatctacgtgaagtgggccccacccctggagcggggccgcctgacctccatgagcaccagcggcttcctgctgggccccttcatcgtgctgctggtgactggagtcatctgtgagagcctgggctggcccatggtgttctacatctttggagcctgtggctgtgctgtgtgcctgctgtggtttgtgctcttctatgatgaccccaaggaccacccctgcatcagcatcagcgagaaggagtacatcaccagcagcctggtgcagcaggtgagcagcagccggcagagcctgcccatcaaggccatcctgaagagcctgcctgtgtgggccatcagcacaggcagcttcaccttcttctggagccacaacatcatgaccctgtacacccccatgttcatcaacagcatgctgcacgtgaacatcaaggaaaatggcttcctgagcagcctgccctacctgtttgcctggatctgtggcaacctggccggccagctgagtgacttcttcctgaccaggaacatcctgtctgtgattgctgtgaggaagctgttcaccgctgctggcttcctgctgcctgccatctttggagtgtgcctgccctacctgagcagcaccttctacagcatcgtcatcttcctgatcctggccggggccaccggcagcttctgcctgggcggcgtcttcatcaatggcctggacatcgccccccgctacttcggcttcatcaaggcctgcagcaccctgaccggcatgattggaggcctcatcgccagcaccctgaccggcctcatcctgaagcaggaccctgagagcgcctggttcaagaccttcatcctgatggccgccatcaacgtgacaggcctcatcttctacctgattgtggccacagctgagatccaggactgggccaaggagaagcagcacacccggctgtag

SEQ ID NO: 170261 - DNA, 630 bp, synthetic construct
  misc_feature 1..630: note = Description of Artificial Sequence: Synthetic coding sequence
  source 1..630: mol_type = other DNA
atgcagatggacaaccggctgccccccaagaaggtgcccggcttctgcagcttccgctatggcctgtccttcctggtgcactgctgcaacgtcatcatcacagcccagagggcctgcctgaacctgaccatggtggtgatggtgaacagcacagacccccacggcctgcccaacaccagcaccaagaagctgctggacaacatcaagaaccccatgtacaactggagcccagacatccagggcatcatcctgagcagcaccagctatggagtcatcatcatccaggtgcctgtgggctacttcagcggcatctacagcaccaagaagatgattggatttgccctgtgcctgagctctgtgctgagcctgctgatccccccagctgctggcattggagtggcctgggtggtggtgtgcagagctgtgcagggcgccgcccagggcatcgtggccacagcccagtttgagatctacgtgaagtgggccccacccctggagcggggccgcctgacctccatgagcaccagcggcttcctgctgggccccttcatcgtgctgctggtgactggagtcatctgtgagagcctgggctggcccatggtgttctacatcttcggccagttcaagtag

SEQ ID NO: 170262 - DNA, 1242 bp, synthetic construct
  misc_feature 1..1242: note = Description of Artificial Sequence: Synthetic coding sequence
  source 1..1242: mol_type = other DNA
atgcagatggacaaccggctgccccccaagaaggtgcccggcttctgcagcttccgctatggcctgtccttcctggtgcactgctgcaacgtcatcatcacagcccagagggcctgcctgaacctgaccatggtggtgatggtgaacagcacagacccccacggcctgcccaacaccagcaccaagaagctgctggacaacatcaagaaccccatgtacaactggagcccagacatccagggcatcatcctgagcagcaccagctatggagtcatcatcatccaggtgcctgtgggctacttcagcggcatctacagcaccaagaagatgattggatttgccctgtgcctgagctctgtgctgagcctgctgatccccccagctgctggcattggagtggcctgggtggtggtgtgcagagctgtgcagggcgccgcccagggcatcgtggccacagcccagtttgagatctacgtgaagtgggccccacccctggagcggggccgcctgacctccatgagcaccagcggcttcctgctgggccccttcatcgtgctgctggtgactggagtcatctgtgagagcctgggctggcccatggtgttctacatctttggagcctgtggctgtgctgtgtgcctgctgtggtttgtgctcttctatgatgaccccaaggaccacccctgcatcagcatcagcgagaaggagtacatcaccagcagcctggtgcagcagaatggcttcctgagcagcctgccctacctgtttgcctggatctgtggcaacctggccggccagctgagtgacttcttcctgaccaggaacatcctgtctgtgattgctgtgaggaagctgttcaccgctgctggcttcctgctgcctgccatctttggagtgtgcctgccctacctgagcagcaccttctacagcatcgtcatcttcctgatcctggccggggccaccggcagcttctgcctgggcggcgtcttcatcaatggcctggacatcgccccccgctacttcggcttcatcaaggcctgcagcaccctgaccggcatgattggaggcctcatcgccagcaccctgaccggcctcatcctgaagcaggaccctgagagcgcctggttcaagaccttcatcctgatggccgccatcaacgtgacaggcctcatcttctacctgattgtggccacagctgagatccaggactgggccaaggagaagcagcacacccggctgtag

SEQ ID NO: 170263 - DNA, 1242 bp, synthetic construct; identical to SEQ ID NO: 170262
  misc_feature 1..1242: note = Description of Artificial Sequence: Synthetic coding sequence
  source 1..1242: mol_type = other DNA

SEQ ID NO: 170264 - DNA, 1404 bp, synthetic construct; identical to SEQ ID NO: 170260
  misc_feature 1..1404: note = Description of Artificial Sequence: Synthetic coding sequence
  source 1..1404: mol_type = other DNA

SEQ ID NO: 170265 - DNA, 1320 bp, synthetic construct
  misc_feature 1..1320: note = Description of Artificial Sequence: Synthetic coding sequence
  source 1..1320: mol_type = other DNA
atggatggcaagccagccaccaggaaaggaccagacttctgcagcctgcgctatggcctggccctgatcatgcacttcagcaacttcaccatgatcacccagagggtgtccctgagcatcgccatcatcgccatggtgaacaccacccagcagcagggcctgagcaatgccagcacagagggccctgtggctgatgccttcaacaacagcagcatcagcatcaaggagtttgacaccaaggcctctgtgtaccagtggagccctgagacccagggcatcatcttcagcagcatcaactacggcatcatcctgaccctcatccccagcggctacctggccggcatctttggagccaagaagatgctgggcgccggcctgctgatcagcagcctgctgaccctcttcacccccctggccgctgactttggagtcatcctggtgatcatggtgaggacagtgcagggcatggcccagggcatggcctggacaggccagttcaccatctgggccaagtgggccccacccctggagaggagcaagctgaccaccatcgccggcagcggcagcgccttcggcagcttcatcatcctgtgtgtgggcggcctcatcagccaggccctgtcctggcccttcatcttctacatcttcggcagcacaggctgtgtgtgctgcctgctgtggttcaccgtcatctatgatgaccccatgcaccacccctgcatctctgtgcgggagaaggagcacatcctgagcagcctggcccagcagcccagcagccctggccgggctgtgcccatcaaggccatggtgacctgcctgcccctgtgggccatcttcctgggcttcttcagccacttctggctgtgcaccatcatcctgacctacctgcccacctacatcagcaccctgctgcacgtgaacatccgggacagcggcgtgctgagcagcctgcccttcatcgccgccgccagctgcaccatcctgggcggccagctggccgacttcctgctgagcaggaacctgctgcggctcatcaccgtgaggaagctgttcagcagcctgggcctgctgctgcccagcatctgtgctgtggccctgccctttgtggccagcagctatgtgatcaccatcatcctgctgatcctgatccctggcaccagcaacctgtgtgacagcggcttcatcatcaacaccctggacatcgcccccaggtatgccagcttcctgatgggcatcagccggggcttcggcctgattgctggcatcatcagcagcacagccaccggcttcctgatcagccaggtgggccctgtgtactag

SEQ ID NO: 170266 - DNA, 1311 bp, synthetic construct
  misc_feature 1..1311: note = Description of Artificial Sequence: Synthetic coding sequence
  source 1..1311: mol_type = other DNA
atggatggcaagccagccaccaggaaaggaccagacttctgcagcctgcgctatggcctggccctgatcatgcacttcagcaacttcaccatgatcacccagagggtgtccctgagcatcgccatcatcgccatggtgaacaccacccagcagcagggcctgagcaatgccagcacagagggccctgtggctgatgccttcaacaacagcagcatcagcatcaaggagtttgacaccaaggcctctgtgtaccagtggagccctgagacccagggcatcatcttcagcagcatcaactacggcatcatcctgaccctcatccccagcggctacctggccggcatctttggagccaagaagatgctgggcgccggcctgctgatcagcagcctgctgaccctcttcacccccctggccgctgactttggagtcatcctggtgatcatggtgaggacagtgcagggcatggcccagggcatggcctggacaggccagttcaccatctgggccaagtgggccccacccctggagaggagcaagctgaccaccatcgccggcagcggcagcgccttcggcagcttcatcatcctgtgtgtgggcggcctcatcagccaggccctgtcctggcccttcatcttctacatcttcggcagcacaggctgtgtgtgctgcctgctgtggttcaccgtcatctatgatgaccccatgcaccacccctgcatctctgtgcgggagaaggagcacatcctgagcagcctggcccagcagcccagcagccctggccgggctgtgcccatcaaggccatggtgacctgcctgcccctgtgggccatcttcctgggcttcttcagccacttctggctgtgcaccatcatcctgacctacctgcccacctacatcagcaccctgctgcacgtgaacatccgggacagcggcgtgctgagcagcctgcccttcatcgccgccgccagctgcaccatcctgggcggccagctggccgacttcctgctgagcaggaacctgctgcggctcatcaccgtgaggaagctgttcagcagcctggacatgcaggtgtcctcctgggagagccagggcgacctgggcagcagccaggagagcagcctgcccctgcccctggacagcagctctgtgcgcatcctgagcctggtgggcggcatgtccttcagctgcctgctgcagagcacctgcctggcctggagcttcaccagccggctggacaagcagaacttcaagacaggccccaagaggggccccctgcctgccagcgaggacatcaagctgcagacctag

SEQ ID NO: 170267 - DNA, 1437 bp, synthetic construct
  misc_feature 1..1437: note = Description of Artificial Sequence: Synthetic coding sequence
  source 1..1437: mol_type = other DNA
atggatggcaagccagccaccaggaaaggaccagacttctgcagcctgcgctatggcctggccctgatcatgcacttcagcaacttcaccatgatcacccagagggtgtccctgagcatcgccatcatcgccatggtgaacaccacccagcagcagggcctgagcaatgccagcacagagggccctgtggctgatgccttcaacaacagcagcatcagcatcaaggagtttgacaccaaggcctctgtgtaccagtggagccctgagacccagggcatcatcttcagcagcatcaactacggcatcatcctgaccctcatccccagcggctacctggccggcatctttggagccaagaagatgctgggcgccggcctgctgatcagcagcctgctgaccctcttcacccccctggccgctgactttggagtcatcctggtgatcatggtgaggacagtgcagggcatggcccagggcatggcctggacaggccagttcaccatctgggccaagtgggccccacccctggagaggagcaagctgaccaccatcgccggcagcggcagcgccttcggcagcttcatcatcctgtgtgtgggcggcctcatcagccaggccctgtcctggcccttcatcttctacatcttcggcagcacaggctgtgtgtgctgcctgctgtggttcaccgtcatctatgatgaccccatgcaccacccctgcatctctgtgcgggagaaggagcacatcctgagcagcctggcccagcagcccagcagccctggccgggctgtgcccatcaaggccatggtgacctgcctgcccctgtgggccatcttcctgggcttcttcagccacttctggctgtgcaccatcatcctgacctacctgcccacctacatcagcaccctgctgcacgtgaacatccgggacagcggcgtgctgagcagcctgcccttcatcgccgccgccagctgcaccatcctgggcggccagctggccgacttcctgctgagcaggaacctgctgcggctcatcaccgtgaggaagctgttcagcagcctgggcctgctgctgcccagcatctgtgctgtggccctgccctttgtggccagcagctatgtgatcaccatcatcctgctgatcctgatccctggcaccagcaacctgtgtgacagcggcttcatcatcaacaccctggacatcgcccccaggtatgccagcttcctgatgggcatcagccggggcttcggcctgattgctggcatcatcagcagcacagccaccggcttcctgatcagccaggactttgagagcggctggagaaatgtgttcttcctgtctgctgctgtgaacatgtttggcctggtgttctacctgaccttcggccaggccgagctgcaggactgggccaaggagaggaccctgacccggctgtag

SEQ ID NO: 170268 - DNA, 1263 bp, synthetic construct
  misc_feature 1..1263: note = Description of Artificial Sequence: Synthetic coding sequence
  source 1..1263: mol_type = other DNA
atggccaccaagacagagctgagccccacagcccgggagagcaagaatgcccaggacatgcaggtggatgagaccctcatccccaggaaggtgcccagcctgtgcagcgcccgctatggaattgccctggtgctgcacttctgcaacttcaccaccatcgcccagaatgtcatcatgaacatcaccatggtggccatggtgaacagcaccagcccccagagccagctgaatgacagcagcgaggtgctgcctgtggacagctttggaggcctgagcaaggcccccaagagcctgcctgccaagagcagcatcctgggcggccagtttgccatctgggagaagtggggccccccccaggagaggagccggctgtgcagcatcgccctgagcggcatgctgctgggctgcttcaccgccatcctgattggaggcttcatcagcgagaccctgggctggccctttgtgttctacatctttggaggagtgggctgtgtgtgctgcctgctgtggtttgtggtgatctatgatgatcctgtgtcctacccctggatcagcaccagcgagaaggagtacatcatcagcagcctgaagcagcaggtgggcagcagcaagcagcccctgcccatcaaggccatgctgcggagcctgcccatctggagcatctgcctgggctgcttcagccaccagtggctggtgtccaccatggtggtgtacatccccacctacatcagctctgtgtaccacgtgaacatccgggacaatggcctgctgagcgccctgcccttcatcgtggcctgggtgattggcatggtgggcggctacctggccgacttcctgctgaccaagaagttccgcctcatcaccgtgaggaagatcgccaccatcctgggcagcctgcccagcagcgccctgattgtgtccctgccctacctgaacagcggctacatcacagccacagccctgctgaccctgagctgtggcctgagcaccctgtgccagagcggcatctacatcaacgtgctggacatcgccccccgctacagcagcttcctgatgggcgccagccggggcttcagcagcatcgcccctgtgattgtgcccaccgtgtctggcttcctgctgagccaggaccctgagtttggctggagaaatgtgttcttcctgctgtttgctgtgaacctgctgggcctgctcttctacctgatctttggagaggctgatgtgcaggagtgggccaaggagaggaagctgacccggctgtag

SEQ ID NO: 170269 - DNA, 1263 bp, synthetic construct; identical to SEQ ID NO: 170268
  misc_feature 1..1263: note = Description of Artificial Sequence: Synthetic coding sequence
  source 1..1263: mol_type = other DNA

SEQ ID NO: 170270 - DNA, 1497 bp, synthetic construct
  misc_feature 1..1497: note = Description of Artificial Sequence: Synthetic coding sequence
  source 1..1497: mol_type = other DNA
atggccaccaagacagagctgagccccacagcccgggagagcaagaatgcccaggacatgcaggtggatgagaccctcatccccaggaaggtgcccagcctgtgcagcgcccgctatggaattgccctggtgctgcacttctgcaacttcaccaccatcgcccagaatgtcatcatgaacatcaccatggtggccatggtgaacagcaccagcccccagagccagctgaatgacagcagcgaggtgctgcctgtggacagctttggaggcctgagcaaggcccccaagagcctgcctgccaaggcccctgtgtatgactggagcccccagatccagggcatcatctttggagctgtgggctatggaggcatcctgaccatggcccccagcggctacctggccggccgggtgggcaccaagagggtggtgggcatcagcctgtttgccaccagcttcctgaccctgtgcatccccctggccacagactttggaattgtgctgctgattgtgaccagaattgtgcagggcctgagccagagcagcatcctgggcggccagtttgccatctgggagaagtggggccccccccaggagaggagccggctgtgcagcatcgccctgagcggcatgctgctgggctgcttcaccgccatcctgattggaggcttcatcagcgagaccctgggctggccctttgtgttctacatctttggaggagtgggctgtgtgtgctgcctgctgtggtttgtggtgatctatgatgatcctgtgtcctacccctggatcagcaccagcgagaaggagtacatcatcagcagcctgaagcagcaggtgggcagcagcaagcagcccctgcccatcaaggccatgctgcggagcctgcccatctggagcatctgcctgggctgcttcagccaccagtggctggtgtccaccatggtggtgtacatccccacctacatcagctctgtgtaccacgtgaacatccgggacaatggcctgctgagcgccctgcccttcatcgtggcctgggtgattggcatggtgggcggctacctggccgacttcctgctgaccaagaagttccgcctcatcaccgtgaggaagatcgccaccatcctgggcagcctgcccagcagcgccctgattgtgtccctgccctacctgaacagcggctacatcacagccacagccctgctgaccctgagctgtggcctgagcaccctgtgccagagcggcatctacatcaacgtgctggacatcgccccccgctacagcagcttcctgatgggcgccagccggggcttcagcagcatcgcccctgtgattgtgcccaccgtgtctggcttcctgctgagccaggaccctgagtttggctggagaaatgtgttcttcctgctgtttgctgtgaacctgctgggcctgctcttctacctgatctttggagaggctgatgtgcaggagtgggccaaggagaggaagctgacccggctgtag

SEQ ID NO: 170271 - DNA, 300 bp, synthetic construct
  misc_feature 1..300: note = Description of Artificial Sequence: Synthetic coding sequence
  source 1..300: mol_type = other DNA
tgaaccctgagctgtggcctgagcaccctgtgccagagcggcatctacatcaacgtgctggacatcgccccccgctacagcagcttcctgatgggcgccagccggggcttcagcagcatcgcccctgtgattgtgcccaccgtgtctggcttcctgctgagccaggaccctgagtttggctggagaaatgtgttcttcctgctgtttgctgtgaacctgctgggcctgctcttctacctgatctttggagaggctgatgtgcaggagtgggccaaggagaggaagctgacccggctgtag

SEQ ID NO: 170272 - DNA, 156 bp, synthetic construct
  misc_feature 1..156: note = Description of Artificial Sequence: Synthetic coding sequence
  source 1..156: mol_type = other DNA
tctggcttcctgctgagccaggaccctgagtttggctggagaaatgtgttcttcctgctgtttgctgtgaacctgctgggcctgctcttctacctgatctttggagaggctgatgtgcaggagtgggccaaggagaggaagctgacccggctgtag

SEQ ID NO: 170273 - DNA, 1494 bp, synthetic construct
  misc_feature 1..1494: note = Description of Artificial Sequence: Synthetic coding sequence
  source 1..1494: mol_type = other DNA
atgagcactggaccagatgtgaaggccaccgtgggggacatcagcagtgatggcaacctgaatgtggcccaggaggagtgcagcaggaagggcttctgcagcgtgagacatggcctggccctgatcctgcagctgtgcaacttcagcatctacacccagcagatgaacctgagcatcgccatcccagccatggtgaacaacacagccccacccagccagcccaatgccagcacagagcggcccagcacagacagccagggctactggaatgagaccctgaaggagttcaaggccatggccccagcctatgactggagccctgagatccagggcatcatcctgagcagcctgaactacggcagcttcctggcccccatccccagcggctacgtggccggcatctttggagccaagtatgtggtgggcgccggcctcttcatcagcagcttcctgaccctcttcatccccctggccgccaatgccggcgtggccctgctgattgtgctgagaattgtgcagggcatcgcccaggtgatggtgctgaccggccagtacagcatctgggtgaagtgggccccacccctggagaggagccagctgaccaccatcgccggcagcggctccatgctgggcagcttcatcgtgctgctggccggcggcctgctgtgccagaccatcggctggccctacgtgttctacatctttggaggcatcggctgtgcctgctgccccctgtggttccccctcatctatgatgatcctgtgaaccaccccttcatctctgctggggagaagcgctacatcgtgtgcagcctggcccagcaggactgcagccctggctggagcctgcccatccgggccatgatcaagagcctgcccctgtgggccatcctggtgtcctacttctgtgagtactggctgttctacaccatcatggcctacacccccacctacatcagctctgtgctgcaggccaacctgcgggacagcggcatcctgagcgccctgccctttgtggtgggctgcatctgcatcatcctgggcggcctgctggccgacttcctgctgagcaggaagatcctgcggctcatcaccatcaggaagctgttcaccgccatcggcgtgctcttccccagcgtcatcctggtgtccctgccctgggtgcgcagcagccacagcatgaccatgaccttcctggtgctgagcagcgccatcagcagcttctgtgagagcggggccctggtgaacttcctggacatcgccccccgctacacaggcttcctgaagggcctgctgcaggtgtttgcccacatcgccggggccatcagccccacagctgctggcttcttcatcagccaggacagcgagtttggctggagaaatgtgttcctgctgtctgctgctgtgaacatcagcggcctggtgttctacctgatcttcggccgggcagatgtgcaggactgggccaaggagcagaccttcacccacctgtag

SEQ ID NO: 170274 - DNA, 666 bp, synthetic construct
  misc_feature 1..666: note = Description of Artificial Sequence: Synthetic coding sequence
  source 1..666: mol_type = other DNA
atgaacctgagcatcgccatcccagccatggtgaacaacacagccccacccagccagcccaatgccagcacagagcggcccagcacagacagccagggctactggaatgagaccctgaaggagttcaaggccatggactgcagccctggctggagcctgcccatccgggccatgatcaagagcctgcccctgtgggccatcctggtgtcctacttctgtgagtactggctgttctacaccatcatggcctacacccccacctacatcagctctgtgctgcaggccaacctgcgggacagcggcatcctgagcgccctgccctttgtggtgggctgcatctgcatcatcctgggcggcctgctggccgacttcctgctgagcaggaagatcctgcggctcatcaccatcaggaagctgttcaccgccatcggcaaaggagagaccggccacagaggagagcggggcaagctgcgggccgccttcagcctgctgtgtgtgtgcccccccaccccaggagtgctcttccccagcgtcatcctggtgtccctgccctgggtgcgcagcagccacagcatgaccatgaccttcctggtgctgagcagcgccatcagcagcttctgtgagagcggggccctggtgaacttcctggacatcgcccccaggtag

SEQ ID NO: 170275 - DNA, 804 bp, synthetic construct
  misc_feature 1..804: note = Description of Artificial Sequence: Synthetic coding sequence
  source 1..804: mol_type = other DNA
atgagcactggaccagatgtgaaggccaccgtgggggacatcagcagtgatggcaacctgaatgtggcccaggaggagtgcagcaggaagggcttctgcagcgtgagacatggcctggccctgatcctgcagctgtgcaacttcagcatctacacccagcagatgaacctgagcatcgccatcccagccatggtgaacaacacagccccacccagccagcccaatgccagcacagagcggcccagcacagacagccagggctactggaatgagaccctgaaggagttcaaggccatgagcggcatcctgagcgccctgccctttgtggtgggctgcatctgcatcatcctgggcggcctgctggccgacttcctgctgagcaggaagatcctgcggctcatcaccatcaggaagctgttcaccgccatcggcgtgctcttccccagcgtcatcctggtgtccctgccctgggtgcgcagcagccacagcatgaccatgaccttcctggtgctgagcagcgccatcagcagcttctgtgagagcggggccctggtgaacttcctggacatcgccccccgctacacaggcttcctgaagggcctgctgcaggtgtttgcccacatcgccggggccatcagccccacagctgctggcttcttcatcagccaggacagcgagtttggctggagaaatgtgttcctgctgtctgctgctgtgaacatcagcggcctggtgttctacctgatcttcggccgggcagatgtgcaggactgggccaaggagcagaccttcacccacctgtag

SEQ ID NO: 170276 - DNA, 1749 bp, synthetic construct
  misc_feature 1..1749: note = Description of Artificial Sequence: Synthetic coding sequence
  source 1..1749: mol_type = other DNA
atggagagcgtgaagcagaggatcctggcccctgggaaggagggcctgaagaactttgctgggaagagcctgggccagatctacagagtgctggagaagaagcaggacacaggagagaccatcgagctgacagaagatggcaagcccctggaggtgcctgagaggaaggcccccctgtgtgactgcacctgcttcggcctgccccggcgctacatcatcgccatcatgagcggcctgggcttctgcatcagctttggcatccgctgcaacctgggcgtggccatcgtggacatggtgaacaacagcaccatccacagaggaggcaaggtgatcaaggagaaggccaagttcaactgggaccctgagaccgtgggcatgatccacggcagcttcttctggggctacatcatcacccagatccctgggggctacatcgccagccggctggccgccaacagagtgtttggagctgccatcctgctgaccagcaccctgaacatgctgatccccagcgctgcccgggtgcactacggctgtgtgatctttgtgcgcatcctgcagggcctggtggagggcgtgacctacccagcctgccacggcatctggagcaagtgggccccacccctggagaggagccggctggccaccaccagcttctgtggcagctatgctggggccgtcatcgccatgcccctggccggcatcctggtgcagtacacaggctggagcagcgtcttctacgtgtatggcagctttggcatggtgtggtacatgttctggctgctggtgtcctatgagagccctgccaagcaccccaccatcacagatgaggagcggcgctacatcgaggagagcatcggggagagcgccaacctgctgggcgccatggagaagttcaagaccccctggaggaagttcttcacctccatgcctgtgtatgccatcatcgtggccaacttctgccgctcctggaccttctacctgctgctgatcagccagcctgcctactttgaggaggtgtttggatttgagatcagcaaggtgggcatgctgtctgctgtgccccacctggtgatgaccatcatcgtgcccatcggcggccagattgctgacttcctgcggagcaagcagatcctgagcaccaccaccgtgaggaagatcatgaactgtggcggcttcggcatggaggccaccctgctgctggtggtgggctacagccacacccggggcgtggccatctccttcctggtgctggccgtgggcttcagcggctttgccatcagcggcttcaacgtgaaccacctggacatcgcccccaggtatgccagcatcctgatgggcatcagcaatggagtgggcaccctgagcggcatggtgtgccccatcatcgtgggcgccatgaccaagaacaagagccgggaggagtggcagtatgtgttcctgattgctgccctggtgcactacggcggcgtcatcttctacgccatctttgccagcggggagaagcagccctgggccgaccctgaggagaccagcgaggagaagtgtggcttcatccatgaagatgagctggatgaggagaccggggacatcacccagaactacatcaactacggcaccaccaagagctatggagccaccacccaggccaatggaggctggcccagcggctgggagaagaaggaggagtttgtgcagggcgaggtgcaggacagccacagctacaaggacagagtggactacagctag

SEQ ID NO: 170277 - DNA, 1413 bp, synthetic construct
  misc_feature 1..1413: note = Description of Artificial Sequence: Synthetic coding sequence
  source 1..1413: mol_type = other DNA
atgaaggccaagttcaactgggaccctgagaccgtgggcatgatccacggcagcttcttctggggctacatcatcacccagatccctgggggctacatcgccagccggctggccgccaacagagtgtttggagctgccatcctgctgaccagcaccctgaacatgctgatccccagcgctgcccgggtgcactacggctgtgtgatctttgtgcgcatcctgcagggcctggtggagggcgtgacctacccagcctgccacggcatctggagcaagtgggccccacccctggagaggagccggctggccaccaccagcttctgtggcagctatgctggggccgtcatcgccatgcccctggccggcatcctggtgcagtacacaggctggagcagcgtcttctacgtgtatggcagctttggcatggtgtggtacatgttctggctgctggtgtcctatgagagccctgccaagcaccccaccatcacagatgaggagcggcgctacatcgaggagagcatcggggagagcgccaacctgctgggcgccatggagaagttcaagaccccctggaggaagttcttcacctccatgcctgtgtatgccatcatcgtggccaacttctgccgctcctggaccttctacctgctgctgatcagccagcctgcctactttgaggaggtgtttggatttgagatcagcaaggtgggcatgctgtctgctgtgccccacctggtgatgaccatcatcgtgcccatcggcggccagattgctgacttcctgcggagcaagcagatcctgagcaccaccaccgtgaggaagatcatgaactgtggcggcttcggcatggaggccaccctgctgctggtggtgggctacagccacacccggggcgtggccatctccttcctggtgctggccgtgggcttcagcggctttgccatcagcggcttcaacgtgaaccacctggacatcgcccccaggtatgccagcatcctgatgggcatcagcaatggagtgggcaccctgagcggcatggtgtgccccatcatcgtgggcgccatgaccaagaacaagagccgggaggagtggcagtatgtgttcctgattgctgccctggtgcactacggcggcgtcatcttctacgccatctttgccagcggggagaagcagccctgggccgaccctgaggagaccagcgaggagaagtgtggcttcatccatgaagatgagctggatgaggagaccggggacatcacccagaactacatcaactacggcaccaccaagagctatggagccaccacccaggccaatggaggctggcccagcggctgggagaagaaggaggagtttgtgcagggcgaggtgcaggacagccacagctacaaggacagagtggactacagctag

SEQ ID NO: 170278 - DNA, 5223 bp, synthetic construct
  misc_feature 1..5223: note = Description of Artificial Sequence: Synthetic coding sequence
  source 1..5223: mol_type = other DNA
atgggagagaagctggagctgcggctgaagagccctgtgggcgctgagcctgctgtgtacccctggcccctgcctgtgtatgacaagcaccatgatgctgcccacgagatcatcgagaccatccgctgggtgtgtgaggagatcccagacctgaagctggccatggagaactacgtgctgattgattatgacaccaagagctttgagagcatgcagaggctgtgtgacaagtacaacagagccatcgacagcatccaccagctgtggaagggcaccacccagcccatgaagctgaacacccggcccagcacaggcctgctgcggcacatcctgcagcaggtgtacaaccacagcgtgacagatcctgagaagctgaacaactatgagcccttcagccctgaggtgtatggagagaccagctttgacctggtggcccagatgattgatgagatcaagatgacagatgatgacctgtttgtggacctgggcagcggcgtgggccaggtggtgctgcaggtggccgccgccaccaactgcaagcaccactatggagtggagaaggctgacatcccagccaagtatgcagagaccatggaccgggagttcaggaagtggatgaagtggtacggcaagaagcacgccgagtacaccctggagcggggggacttcctgtctgaggagtggagggagcgcatcgccaacaccagcgtcatctttgtgaacaactttgcctttggacctgaggtggaccaccagctgaaggagagatttgccaacatgaaggagggcggccgcatcgtgagcagcaagccctttgcccccctgaacttccgcatcaacagcaggaacctgagtgacatcggcaccatcatgagggtggtggagctgagccccctgaagggctctgtgtcctggacaggcaagcctgtgtcctactacctgcacaccatcgacaggaccatcctggagaactacttcagcagcctgaagaaccccaagctgcgggaggagcaggaggccgcccggcggcggcagcagcgggagagcaagagcaatgctgccacccccaccaagggccctgagggcaaggtggccggccctgcagatgcccccatggacagcggggctgaggaggagaaggccggggccgccaccgtgaagaagcccagccccagcaaggccaggaagaagaagctgaacaagaagggcaggaagatggccggcaggaagaggggccggcccaagaagatgaacacagccaaccctgagaggaagcccaagaagaaccagacagccctggatgccctgcacgcccagacagtgtcccagacagctgccagcagcccccaggatgcctaccgcagcccccacagccccttctaccagctgccccccagcgtgcagaggcacagccccaaccccctgctggtggcccccaccccaccagccctgcagaagctgctggagagcttcaagatccagtacctgcagttcctggcctacaccaagaccccccagtacaaggccagcctgcaggagctgctgggccaggagaaggagaagaatgcccagctgctgggcgccgcccagcagctgctgagccactgccaggcccagaaggaggagatccggcggctcttccagcagaagctggatgagctgggcgtgaaggccctgacctacaatgacctgatccaggcccagaaggagatcagcgcccacaaccagcagctgcgggagcagagcgagcagctggagcaggacaacagagccctgcggggccagagcctgcagctgctgaaggcccgctgtgaggagctgcagctggactgggccaccctgagcctggagaagctgctgaaggagaagcaggccctgaagagccagatcagcgagaagcagaggcactgcctggagctgcagatcagcatcgtggagctggagaagagccagaggcagcaggagctgctgcagctgaagagctgtgtgcccccagatgatgccctgagcctgcacctgcggggcaagggggccctgggccgggagctggagccagatgccagccggctgcacctggagctggactgcaccaagttcagcctgccccacctgagctccatgagccctgagctgtccatgaatggccaggccgccggctatgagctgtgtggggtgctgagccggcccagcagcaagcagaacaccccccagtacctggccagccccctggaccaggaggtggtgccctgcacccccagccacgtgggccggccccggctggagaagctgagcggcctggccgccccagactacacccggctgagccctgccaagatcgtgctgcggcggcacctgagccaggaccacacagtgcccggccggcctgctgccagcgagctgcacagcagagctgagcacaccaaggaaaatggcctgccctaccagagccccagcgtgcccggctccatgaagctgagcccccaggacccccggcccctgagccctggggccctgcagctggccggggagaagagcagcgagaagggcctgcgggagcgggcctacggcagcagcggggagctgatcaccagcctgcccatcagcatccccctgagcacagtgcagcccaacaagctgcctgtgtccatccccctggcctctgtggtgctgcccagcagagctgagcgggcccggagcacccccagccctgtgctgcagccccgggaccccagcagcaccctggagaagcagatcggggccaatgcccatggagctggcagccgcagcctggccctggccccagctggcttctcctatgccggctctgtggccatcagcggggccctggccggcagccctgccagcctgaccccaggagctgagcccgccaccctggatgagagcagcagcagcggcagcctgtttgccaccgtgggcagccgcagcagcaccccccagcaccccctgctgctggcccagcccaggaacagcctgcctgccagccctgcccaccagctgagcagcagcccccggctgggcggggccgcccagggccccctgcctgaggccagcaaaggagacctgcccagcgacagcggcttcagtgaccctgagagcgaggccaagagaagaattgtgttcaccatcaccactggagctggcagcgccaagcagagccccagcagcaagcacagccccctgacagccagcgcccggggggactgtgtgcccagccacggccaggacagcagaagaagaggccgcaggaagagggccagcgctggcacccccagcctgtctgctggggtgagccccaagagaagagccctgcccagcgtggccggcctcttcacccagcccagcggcagccccctgaacctgaacagcatggtgagcaacatcaaccagcccctggagatcacagccatcagcagccctgagaccagcctgaagagcagccctgtgccctaccaggaccatgaccagccccctgtgctgaagaaggagcggcccctgagccagaccaacggggcccactacagccccctgaccagtgatgaggagcccggctctgaagatgagcccagcagcgcccgcatcgagaggaagatcgccaccatcagcctggagagcaagagcccccccaagaccctggagaatggaggcggcctggccggcaggaagccagccccagctggggagcctgtgaacagcagcaagtggaagagcaccttcagccccatcagtgacatcggcctggccaagtctgctgacagccccctgcaggccagcagcgccctgagccagaacagcctcttcaccttccggcctgccctggaggagcccagcgcagatgccaagctggccgcccaccccaggaagggcttccctggcagcctgtctggagcagatggcctgagccctggcaccaacccagccaacggctgcaccttcggcggcggcctggccgctgacctgagcctgcacagcttcagtgatggagccagcctgccccacaagggccctgaggccgccggcctgagcagccccctgtccttccccagccagaggggcaaggagggcagtgatgccaaccccttcctgagcaagaggcagctggatggcctggccggcctgaagggggagggcagccggggcaaggaggccggggagggcggcctgcccctgtgtggccccacagacaagacccccctgctgagcggcaaggccgccaaggcccgggaccgggaggtggacctgaagaatggccacaacctcttcatctctgctgctgctgtgcccccaggcagcctgctgagcggccctggcctggccccagctgccagcagcgctggaggagctgccagcagcgcccagacccaccgctccttcctgggccccttccccccaggcccccagtttgccctgggccccatgagcctgcaggccaacctgggctctgtggccggcagctctgtgctgcagagcctcttcagctctgtgcctgctgctgctggcctggtgcacgtgagcagcgctgccacccggctgaccaacagccacgccatgggcagcttctctggagtggccggcggcaccgtgggcgctgggggcgtcttcaaccacgctgtgcccagcgccagcgcccacccctttggagcccgggtgggccgcggggccgcctgtggcagcgccaccctgggccccagccccctgcaggccgccgccagcgccagcgccagcagcttccaggccccagcctctgtggagaccaggcctcctcctcctcctcctcctcctcctccacccctgcccccaccagcccacctgggccgcagccctgctggcccccctgtgctgcacgcccctcctcctccaaatgctgccctgcccccaccacccaccctgctggccagcaaccctgagcccgccctgctgcagagcctggccagcctgccccccaaccaggccttcctgccccccaccagcgctgccagcctgcccccagccaatgccagcctgagcatcaagctgaccagcctgccccacaagggggcccggcccagcttcaccgtgcaccaccagcccctgccccggctggccctggcccaggccgcccctggcatcccccaggccagcgccaccggccccagcgctgtgtgggtgtccctgggcatgcccccaccctatgctgcccacctgtctggagtgaagcccaggtag

SEQ ID NO: 170279 - DNA, 1647 bp, synthetic construct
  misc_feature 1..1647: note = Description of Artificial Sequence: Synthetic coding sequence
  source 1..1647: mol_type = other DNA
atgggcagccagctggccctggccggcctgctggagaagaggcaggagggcgctgagaccctggagctgtctgcagatggccggcctgtgaccacccagacccgggacccccctgtggtggactgcacctgcttcggcctgccccggcgctacatcatcgccatcatgagcggcctgggcttctgcatcagctttggcatccgctgcaacctgggcgtggccatcgtgtccatggtgaacaacagcaccacccacagaggaggccacgtggtggtgcagaaggcccagttctcctgggaccctgagaccgtgggcctcatccacggcagcttcttctggggctacatcgtgacccagatccctgggggcttcatctgccagaagtttgctgccaacagagtgtttggatttgccatcgtggccaccagcaccctgaacatgctgatccccagcgctgcccgggtgcactacggctgtgtgatctttgtgcgcatcctgcagggcctggtggagggcgtgacctacccagcctgccacggcatctggagcaagtgggccccacccctggagaggagccggctggccaccacagccttctgtggcagctatgctggagctgtggtggccatgcccctggccggcgtgctggtgcagtacagcggctggagcagcgtcttctacgtgtatggcagctttggcatcttctggtacctgttctggctgctggtgtcctatgagagccctgccctgcaccccagcatcagcgaggaggagaggaagtacattgaagatgccatcggggagagcgccaagctgatgaaccccctgaccaagttcagcaccccctggaggcgcttcttcacctccatgcctgtgtatgccatcatcgtggccaacttctgccgctcctggaccttctacctgctgctgatcagccagcctgcctactttgaggaggtgtttggatttgagatcagcaaggtgggcctggtgtctgccctgccccacctggtgatgaccatcatcgtgcccatcggcggccagattgctgacttcctgcggagccgccgcatcatgagcaccaccaacgtgaggaagctgatgaactgtggcggcttcggcatggaggccaccctgctgctggtggtgggctacagccacagcaaaggagtggccatctccttcctggtgctggccgtgggcttcagcggctttgccatcagcggcttcaacgtgaaccacctggacatcgcccccaggtatgccagcatcctgatgggcatcagcaatggagtgggcaccctgagcggcatggtgtgccccatcatcgtgggcgccatgaccaagcacaagacccgggaggagtggcagtatgtgttcctgattgccagcctggtgcactacggcggcgtcatcttctacggcgtgtttgccagcggggagaagcagccctgggccgagcctgaggagatgtctgaggagaagtgtggctttgtgggccatgaccagctggccggcagtgatgacagcgagatggaggatgaggccgagcccccaggggcccccccagcccccccacccagctatggagccacccacagcaccttccagccccccaggcctcctcctcctgtgcgggactactag

SEQ ID NO: 170280 - DNA, 1770 bp, synthetic construct
  misc_feature 1..1770: note = Description of Artificial Sequence: Synthetic coding sequence
  source 1..1770: mol_type = other DNA
atgcccttcaaggcctttgacaccttcaaggagaagatcctgaagccaggcaaggagggcgtgaagaatgctgtgggggacagcctgggcatcctgcagaggaagattgatggcaccacagaggaggaggacaacatcgagctgaatgaggagggccggcctgtgcagaccagccggcccagcccccccctgtgtgactgccactgctgcggcctgcccaagcgctacatcatcgccatcatgagcggcctgggcttctgcatcagctttggcatccgctgcaacctgggcgtggccatcgtggagatggtgaacaacagcacagtgtatgtggatggcaagccagagatccagacagcccagttcaactgggaccctgagaccgtgggcctcatccacggcagcttcttctggggctacatcatgacccagatccctgggggcttcatcagcaacaagtttgctgccaacagagtgtttggagctgccatcttcctgaccagcaccctgaacatgttcatccccagcgctgcccgggtgcactacggctgtgtgatgtgtgtgcgcatcctgcagggcctggtggagggcgtgacctacccagcctgccacggcatgtggagcaagtgggccccacccctggagaggagccggctggccaccaccagcttctgtggcagctatgctggagctgtggtggccatgcccctggccggcgtgctggtgcagtacatcggctggagctctgtgttctacatctacggcatgtttggcatcatctggtacatgttctggctgctgcaggcctatgaatgtcctgctgcccaccccaccatcagcaatgaggagaagacctacatcgagaccagcattggagagggcgccaacgtggtgtccctgagcaagttcagcaccccctggaagcgcttcttcaccagcctgcctgtgtatgccatcatcgtggccaacttctgccgctcctggaccttctacctgctgctgatcagccagcctgcctactttgaggaggtgtttggatttgccatcagcaaggtgggcctgctgtctgctgtgccccacatggtgatgaccatcgtggtgcccatcggcggccagctggccgactacctgcggagccggcagatcctgaccaccacagctgtgaggaagatcatgaactgtggcggcttcggcatggaggccaccctgctgctggtggtgggcttcagccacaccaagggcgtggccatctccttcctggtgctggccgtgggcttcagcggctttgccatcagcggcttcaacgtgaaccacctggacatcgcccccaggtatgccagcatcctgatgggcatcagcaatggagtgggcaccctgagcggcatggtgtgccccctgattgtgggcgccatgaccaggcacaagacccgggaggagtggcagaatgtgttcctgattgctgccctggtgcactacagcggggtcatcttctacggcgtgtttgccagcggggagaagcaggagtgggccgaccctgagaacctgtctgaggagaagtgtggcatcatcgaccaggatgagctggccgaggagattgagctgaaccacgagagctttgccagccccaagaagaagatgtcctatggagccaccagccagaactgtgaggtgcagaagaaggagtggaagggccagagaggagccaccctggatgaggaggagctgaccagctaccagaatgaggagaggaacttcagcaccatctcctag

SEQ ID NO: 170281 - DNA, 1620 bp, synthetic construct
  misc_feature 1..1620: note = Description of Artificial Sequence: Synthetic coding sequence
  source 1..1620: mol_type = other DNA
atgcccttcaaggcctttgacaccttcaaggagaagatcctgaagccaggcaaggagggcgtgaagaatgctgtgggggacagcctgggcatcctgcagaggaagattgatggcaccacagaggaggaggacaacatcgagctgaatgaggagggccggcctgtgcagaccagccggcccagcccccccctgtgtgactgccactgctgcggcctgcccaagcgctacatcatcgccatcatgagcggcctgggcttctgcatcagctttggcatccgctgcaacctgggcgtggccatcgtggagatggtgaacaacagcacagtgtatgtggatggcaagccagagatccagacagcccagttcaactgggaccctgagaccgtgggcctcatccacggcagcttcttctggggctacatcatgacccagatccctgggggcttcatcagcaacaagtttgctgccaacagagtgtttggagctgccatcttcctgaccagcaccctgaacatgttcatccccagcgctgcccgggtgcactacggctgtgtgatgtgtgtgcgcatcctgcagggcctggtggagggcgtgacctacccagcctgccacggcatgtggagcaagtgggccccacccctggagaggagccggctggccaccaccagcttctgtggcagctatgctggagctgtggtggccatgcccctggccggcgtgctggtgcagtacatcggctggagctctgtgttctacatctacggcatgtttggcatcatctggtacatgttctggctgctgcaggcctatgaatgtcctgctgcccaccccaccatcagcaatgaggagaagacctacatcgagaccagcattggagagggcgccaacgtggtgtccctgtctgtgggcctgctgtctgctgtgccccacatggtgatgaccatcgtggtgcccatcggcggccagctggccgactacctgcggagccggcagatcctgaccaccacagctgtgaggaagatcatgaactgtggcggcttcggcatggaggccaccctgctgctggtggtgggcttcagccacaccaagggcgtggccatctccttcctggtgctggccgtgggcttcagcggctttgccatcagcggcttcaacgtgaaccacctggacatcgcccccaggtatgccagcatcctgatgggcatcagcaatggagtgggcaccctgagcggcatggtgtgccccctgattgtgggcgccatgaccaggcacaagacccgggaggagtggcagaatgtgttcctgattgctgccctggtgcactacagcggggtcatcttctacggcgtgtttgccagcggggagaagcaggagtgggccgaccctgagaacctgtctgaggagaagtgtggcatcatcgaccaggatgagctggccgaggagattgagctgaaccacgagagctttgccagccccaagaagaagatgtcctatggagccaccagccagaactgtgaggtgcagaagaaggagtggaagggccagagaggagccaccctggatgaggaggagctgaccagctaccagaatgaggagaggaacttcagcaccatctcctag

SEQ ID NO: 170282 - DNA, 1293 bp, synthetic construct
  misc_feature 1..1293: note = Description of Artificial Sequence: Synthetic coding sequence
  source 1..1293: mol_type = other DNA
atgaccctgaccagccggcggcaggacagccaggaggcccggcctgagtgccaggcctggacaggcaccctgctgctgggcacctgcctgctgtactgtgcccggagctccatgcccatctgcaccgtgtccatgagccaggactttggctggaacaagaaggaggccggcatcgtgctgagcagcttcttctggggctactgcctgacccaggtggtgggcggccacctgggggacagaattggaggagagaaggtgatcctgctgagcgccagcgcctggggcagcatcacagctgtgacccccctgctggcccacctgagcagcgcccacctggccttcatgaccttcagccgcatcctgatgggcctgctgcagggcgtgtacttccctgccctgaccagcctgctgagccagaaggtgcgggagagcgagcgggccttcacctacagcatcgtgggcgccggcagccagtttggcaccctgctgaccggggctgtgggcagcctgctgctggagtggtacggctggcagagcatcttctacttcagcggcggcctgaccctgctgtgggtgtggtacgtgtaccgctacctgctgtctgagaaggacctgatcctggccctgggcgtgctggcccagagcaggcctgtgagccgccacaacagagtgccctggaggaggctcttcaggaagccagctgtgtgggccgctgtggtgtcccagctgtctgctgcctgcagcttcttcatcctgctgtcctggctgcccaccttctttgaggagaccttcccagatgccaagggctggatcttcaacgtggtgccctggctggtggccatcccagccagcctcttcagcggcttcctgagtgaccacctgatcaaccagggctaccgggccatcaccgtgaggaagctgatgcagggcatgggcctgggcctgagctctgtgtttgccctgtgcctgggccacaccagcagcttctgtgagagcgtggtgtttgccagcgccagcatcggcctgcagaccttcaaccacagcggcatctctgtgaacatccaggacctggcccccagctgtgccggcttcctgtttggagtggccaacacagctggggccctggccggcgtggtgggcgtgtgcctgggcggctacctgatggagaccaccggctcctggacctgcctcttcaacctggtggccatcatcagcaacctgggcctgtgcaccttcctggtgtttggccaggcccagagggtggacctgagcagcacccatgaggacctgtag

SEQ ID NO: 170283 - DNA, 1311 bp, synthetic construct
  misc_feature 1..1311: note = Description of Artificial Sequence: Synthetic coding sequence
  source 1..1311: mol_type = other DNA
atgcagcccccaccagatgaggcccggcgggacatggccggggacacccagtggagcaggcctgagtgccaggcctggacaggcaccctgctgctgggcacctgcctgctgtactgtgcccggagctccatgcccatctgcaccgtgtccatgagccaggactttggctggaacaagaaggaggccggcatcgtgctgagcagcttcttctggggctactgcctgacccaggtggtgggcggccacctgggggacagaattggaggagagaaggtgatcctgctgagcgccagcgcctggggcagcatcacagctgtgacccccctgctggcccacctgagcagcgcccacctggccttcatgaccttcagccgcatcctgatgggcctgctgcagggcgtgtacttccctgccctgaccagcctgctgagccagaaggtgcgggagagcgagcgggccttcacctacagcatcgtgggcgccggcagccagtttggcaccctgctgaccggggctgtgggcagcctgctgctggagtggtacggctggcagagcatcttctacttcagcggcggcctgaccctgctgtgggtgtggtacgtgtaccgctacctgctgtctgagaaggacctgatcctggccctgggcgtgctggcccagagcaggcctgtgagccgccacaacagagtgccctggaggaggctcttcaggaagccagctgtgtgggccgctgtggtgtcccagctgtctgctgcctgcagcttcttcatcctgctgtcctggctgcccaccttctttgaggagaccttcccagatgccaagggctggatcttcaacgtggtgccctggctggtggccatcccagccagcctcttcagcggcttcctgagtgaccacctgatcaaccagggctaccgggccatcaccgtgaggaagctgatgcagggcatgggcctgggcctgagctctgtgtttgccctgtgcctgggccacaccagcagcttctgtgagagcgtggtgtttgccagcgccagcatcggcctgcagaccttcaaccacagcggcatctctgtgaacatccaggacctggcccccagctgtgccggcttcctgtttggagtggccaacacagctggggccctggccggcgtggtgggcgtgtgcctgggcggctacctgatggagaccaccggctcctggacctgcctcttcaacctggtggccatcatcagcaacctgggcctgtgcaccttcctggtgtttggccaggcccagagggtggacctgagcagcacccatgaggacctgtag

SEQ ID NO: 170284 - DNA, 459 bp, synthetic construct
  misc_feature 1..459: note = Description of Artificial Sequence: Synthetic coding sequence
  source 1..459: mol_type = other DNA
atgttccccaggcctggggccctgtcctggacagtgagaagacacaccccccggcaggtggagcccccctgtgtgtgcatgaccctgaccagccggcggcaggacagccaggaggcccggcctgagtgccaggcctggacaggcaccctgctgctgggcacctgcctgctgtactgtgcccggagctccatgcccatctgcaccgtgtccatgagccaggactttggctggaacaagaaggaggccggcatcgtgctgagcagcttcttctggggctactgcctgacccaggtggtgggcggccacctgggggacagaattggaggagagaaggtgatcctgctgagcgccagcgcctggggcagcatcacagctgtgacccccctgctggcccacctgagcagcgcccacctggccttcatgaccttcagccgcatcctgatgggcctgctgcagtag

SEQ ID NO: 170285 - DNA, 1599 bp, synthetic construct
  misc_feature 1..1599: note = Description of Artificial Sequence: Synthetic coding sequence
  source 1..1599: mol_type = other DNA
atggagagcgctgagcctgctggccaggcccgggctgctgccaccaagctgtctgaggccgtgggcgccgccctgcaggagccccggcggcagaggcggctggtgctggtgattgtgtgtgtggccctgctgctggacaacatgctgtacatggtgattgtgcccatcgtgcctgactacatcgcccacatgaggggcggcggggagggccccaccaggaccccagaggtgtgggagcccaccctgcccctgcccaccccagccaatgccagcgcctacacagccaacaccagcgccagccccacagctgcctggccagctggcagcgccctgcggccccgctaccccacagaaagtgaagatgtgaagattggagtgctgtttgccagcaaggccatcctgcagctgctggtgaaccccctgagcggccccttcatcgacaggatgtcctatgatgtgcccctgctgattggcctgggcgtgatgtttgccagcacagtgctgtttgcctttgctgaagattatgccaccctgtttgctgcccggagcctgcagggcctgggcagcgcctttgctgacaccagcggcatcgccatgattgctgacaagtacccagaggagcctgagaggagccgggccctgggcgtggccctggccttcatcagctttggcagcctggtggcccccccatttggaggcatcctgtatgaatttgctgggaagagggtgcccttcctggtgctggccgctgtgtccctgtttgatgccctgctgctgctggccgtggccaagcccttctctgctgctgcccgggcccgggccaacctgcctgtgggcacccccatccaccggctgatgctggacccctacatcgctgtggtggccggggccctgaccacctgcaacatccccctggccttcctggagcccaccatcgccacctggatgaagcacaccatggccgccagcgagtgggagatgggcatggcctggctgcctgcctttgtgccccacgtgctgggcgtgtacctgactgtgcggctggccgcccgctacccccacctgcagtggctgtatggagccctgggcctggccgtgattggagccagcagctgcatcgtgcctgcctgccgcagctttgcccccctggtggtgtccctgtgtggcctgtgcttcggcatcgccctggtggacacagccctgctgcccaccctggccttcctggtggatgtgagacatgtgtctgtgtatggctctgtgtatgccatcgctgacatctcctacagcgtggcctatgccctgggccccatcgtggccggccacatcgtgcacagcctgggctttgagcagctgagcctgggcatgggcctggccaacctgctgtatgcccctgtgctgctgctgctgagaaatgtgggcctgctgaccaggagccgctcagaaagagatgtgctgctggatgagcccccccagggcctgtatgatgctgtgcggctgcgggagaggcctgtgtctggccaggatggagagcccaggagccccccaggcccctttgatgcctgtgaagatgactacaactactactacaccaggagctag

SEQ ID NO: 170286 - DNA, 1482 bp, synthetic construct
  misc_feature 1..1482: note = Description of Artificial Sequence: Synthetic coding sequence
  source 1..1482: mol_type = other DNA
atgctgcggaccatcctggatgccccccagaggctgctgaaggagggccgggccagccggcagctggtgctggtggtggtgtttgtggccctgctgctggacaacatgctgttcaccgtggtggtgcccatcgtgcccaccttcctgtatgacatggagttcaaggaggtgaacagcagcctgcacctgggccacgccggcagcagcccccacgccctggccagccctgccttcagcaccatcttctccttcttcaacaacaacacagtggccgtggaggagagcgtgcccagcggcatcgcctggatgaatgacacagccagcaccatccccccaccagccacagaggccatcagcgcccacaagaacaactgcctgcagggcaccggcttcctggaggaggagatcaccagggtgggcgtgctgtttgccagcaaggctgtgatgcagctgctggtgaacccctttgtgggccccctgaccaaccgcatcggctaccacatccccatgtttgctggcttcgtcatcatgttcctgagcacagtgatgtttgccttcagcggcacctacaccctgctgtttgtggcccggaccctgcagggcatcggcagcagcttcagctctgtggccggcctgggcatgctggcctctgtgtacacagatgaccacgagcggggccgggccatgggcacagccctgggcggcctggccctgggcctgctggtgggcgcccccttcggctctgtgatgtatgaatttgtgggcaagagcgcccccttcctgatcctggccttcctggccctgctggatggagccctgcagctgtgcatcctgcagcccagcaaggtgtccccagagagcgccaagggcacccccctcttcatgctgctgaaggacccctacatcctggtggccgccggcctggccttcctgcctgcctctgtgtcctacctgattggcaccaacctgtttggagtgctggccaacaagatgggccgctggctgtgcagcctgattggcatgctggtggtgggcaccagcctgctgtgtgtgcccctggcccacaacatcttcggcctgattggccccaatgccggcctgggcctggccatcggcatggtggacagctccatgatgcccatcatgggccacctggtggacctgcggcacacctctgtgtatggctctgtgtatgccatcgcagatgtggccttctgcatgggctttgccatcggccccagcactggaggagccatcgtgaaggccatcggcttcccctggctgatggtgatcaccggggtcatcaacatcgtgtatgcccccctgtgctactacctgcggagccccccagccaaggaggagaagctggccatcctgagccaggactgccccatggagaccaggatgtatgccacccagaagcccaccaaggagttccccctgggagaagattctgatgaggagccagaccacgaggagtag

SEQ ID NO: 170287 - DNA, 1578 bp, synthetic construct
  misc_feature 1..1578: note = Description of Artificial Sequence: Synthetic coding sequence
  source 1..1578: mol_type = other DNA
atgctgcggaccatcctggatgccccccagaggctgctgaaggagggccgggccagccggcagctggtgctggtggtggtgtttgtggccctgctgctggacaacatgctgttcaccgtggtggtgcccatcgtgcccaccttcctgtatgacatggagttcaaggaggtgaacagcagcctgcacctgggccacgccggcagcagcccccacgccctggccagccctgccttcagcaccatcttctccttcttcaacaacaacacagtggccgtggaggagagcgtgcccagcggcatcgcctggatgaatgacacagccagcaccatccccccaccagccacagaggccatcagcgcccacaagaacaactgcctgcagggcaccggcttcctggaggaggagatcaccagggtgggcgtgctgtttgccagcaaggctgtgatgcagctgctggtgaacccctttgtgggccccctgaccaaccgcatcggctaccacatccccatgtttgctggcttcgtcatcatgttcctgagcacagtgatgtttgccttcagcggcacctacaccctgctgtttgtggcccggaccctgcagggcatcggcagcagcttcagctctgtggccggcctgggcatgctggcctctgtgtacacagatgaccacgagcggggccgggccatgggcacagccctgggcggcctggccctgggcctgctggtgggcgcccccttcggctctgtgatgtatgaatttgtgggcaagagcgcccccttcctgatcctggccttcctggccctgctggatggagccctgcagctgtgcatcctgcagcccagcaaggtgtccccagagagcgccaagggcacccccctcttcatgctgctgaaggacccctacatcctggtggccgccggcagcatctgctttgccaacatgggcgtggccatcctggagcccaccctgcccatctggatgatgcagaccatgtgcagccccaagtggcagctgggcctggccttcctgcctgcctctgtgtcctacctgattggcaccaacctgtttggagtgctggccaacaagatgggccgctggctgtgcagcctgattggcatgctggtggtgggcaccagcctgctgtgtgtgcccctggcccacaacatcttcggcctgattggccccaatgccggcctgggcctggccatcggcatggtggacagctccatgatgcccatcatgggccacctggtggacctgcggcacacctctgtgtatggctctgtgtatgccatcgcagatgtggccttctgcatgggctttgccatcggccccagcactggaggagccatcgtgaaggccatcggcttcccctggctgatggtgatcaccggggtcatcaacatcgtgtatgcccccctgtgctactacctgcggagccccccagccaaggaggagaagctggccatcctgagccaggactgccccatggagaccaggatgtatgccacccagaagcccaccaaggagttccccctgggagaagattctgatgaggagccagaccacgaggagtag

SEQ ID NO: 170288 - DNA, 1419 bp, synthetic construct
  misc_feature 1..1419: note = Description of Artificial Sequence: Synthetic coding sequence
  source 1..1419: mol_type = other DNA
atgctgcggaccatcctggatgccccccagaggctgctgaaggagggccgggccagccggcagctggtgctggtggtggtgtttgtggccctgctgctggacaacatgctgttcaccgtggtggtgcccatcgtgcccaccttcctgtatgacatggagttcaaggaggtgaacagcagcctgcacctgggccacgccggcagcagcccccacgccctggccagccctgccttcagcaccatcttctccttcttcaacaacaacacagtggccgtggaggagagcgtgcccagcggcatcgcctggatgaatgacacagccagcaccatccccccaccagccacagaggccatcagcgcccacaagaacaactgcctgcagggcaccggcttcctggaggaggagatcaccagggtgggcgtgctgtttgccagcaaggctgtgatgcagctgctggtgaacccctttgtgggccccctgaccaaccgcatcggctaccacatccccatgtttgctggcttcgtcatcatgttcctgagcacagtgatgtttgccttcagcggcacctacaccctgctgtttgtggcccggaccctgcagggcatcggcagcagcttcagctctgtggccggcctgggcatgctggcctctgtgtacacagatgaccacgagcggggccgggccatgggcacagccctgggcggcctggccctgggcctgctggtgggcgcccccttcggctctgtgatgtatgaatttgtgggcaagagcgcccccttcctgatcctggccttcctggccctgctggatggagccctgcagctgtgcatcctgcagcccagcaaggtgtccccagagagcgccaagggcacccccctcttcatgctgctgaaggacccctacatcctggtggccgccggcagcatctgctttgccaacatgggcgtggccatcctggagcccaccctgcccatctggatgatgcagaccatgtgcagccccaagtggcagctgggcctggccttcctgcctgcctctgtgtcctacctgattggcaccaacctgtttggagtgctggccaacaagatgggccgctggctgtgcagcctgattggcatgctggtggtgggcaccagcctgctgtgtgtgcccctggcccacaacatcttcggcctgattggccccaatgccggcctgggcctggccatcggcatggtggacagctccatgatgcccatcatgggccacctggtggacctgcggcacacctctgtgtatggctctgtgtatgccatcgcagatgtggccttctgcatgggctttgccatcggctacagcgagagcggcctgccccacggggaccctgatgtgtgcaaccctgaggcccacgagggcatcagcagcggcggcggccagtag

SEQ ID NO: 170289 - DNA, 1578 bp, synthetic construct; identical to SEQ ID NO: 170287
  misc_feature 1..1578: note = Description of Artificial Sequence: Synthetic coding sequence
  source 1..1578: mol_type = other DNA

SEQ ID NO: 170290 - DNA, 1158 bp, synthetic construct
  misc_feature 1..1158: note = Description of Artificial Sequence: Synthetic coding sequence
  source 1..1158: mol_type = other DNA
atgctgcggaccatcctggatgccccccagaggctgctgaaggagggccgggccagccggcagctggtgctggtggtggtgtttgtggccctgctgctggacaacatgctgttcaccgtggtggtgcccatcgtgcccaccttcctgtatgacatggagttcaaggaggtgaacagcagcctgcacctgggccacgccggcagcagcccccacgccctggccagccctgccttcagcaccatcttctccttcttcaacaacaacacagtggccgtggaggagagcgtgcccagcggcatcgcctggatgaatgacacagccagcaccatccccccaccagccacagaggccatcagcgcccacaagaacaactgcctgcagggcaccggcttcctggaggaggagatcaccagggtgggcgtgctgtttgccagcaaggctgtgatgcagctgctggtgaacccctttgtgggccccctgaccaaccgcatcggctaccacatccccatgtttgctggcttcgtcatcatgttcctgagcacagtgatgtttgccttcagcggcacctacaccctgctgtttgtggcccggaccctgcagggcatcggcagcagcttcagctctgtggccggcctgggcatgctggcctctgtgtacacagatgaccacgagcggggccgggccatgggcacagccctgggcggcctggccctgggcctgctggtgggcgcccccttcggctctgtgatgtatgaatttgtgggcaagagcgcccccttcctgatcctggccttcctggccctgctggatggagccctgcagctgtgcatcctgcagcccagcaaggtgtccccagagagcgccaagggcacccccctcttcatgctgctgaaggacccctacatcctggtggccgccggcagcatctgctttgccaacatgggcgtggccatcctggagcccaccctgcccatctggatgatgcagaccatgtgcagccccaagtggcagctgggcctggccttcctgcctgcctctgtgtcctacctgattggcaccaacctgtttggagtgctggccaacaagatgggccgctggctgtgcagcctgattggcatgctggtggtgggcaccagcctgctgtgcctgcccagctag

SEQ ID NO: 170291 - DNA, 1482 bp, synthetic construct; identical to SEQ ID NO: 170286
  misc_feature 1..1482: note = Description of Artificial Sequence: Synthetic coding sequence
  source 1..1482: mol_type = other DNA

SEQ ID NO: 170292 - DNA, 1545 bp, synthetic construct
  misc_feature 1..1545: note = Description of Artificial Sequence: Synthetic coding sequence
  source 1..1545: mol_type = other DNA
atggccctgtctgagctggccctggtgcgctggctgcaggagagccgccgcagcaggaagctgatcctcttcatcgtgttcctggccctgctgctggacaacatgctgctgactgtggtggtgcccatcatccccagctacctgtacagcatcaagcatgagaagaatgccacagagatccagacagcccggcctgtgcacacagccagcatcagtgacagcttccagagcatcttctcctactatgacaacagcaccatggtgactggaaatgccacccgggacctgaccctgcaccagacagccacccagcacatggtgaccaatgccagcgctgtgcccagcgactgccccagcgaggacaaggacctgctgaatgaaaatgtgcaggtgggcctgctgtttgccagcaaggccaccgtgcagctgatcaccaaccccttcatcggcctgctgaccaaccgcatcggctaccccatccccatctttgctggcttctgcatcatgtttgtgtccaccatcatgtttgccttcagcagcagctatgccttcctgctgattgcccggagcctgcagggcatcggcagcagctgcagctctgtggccggcatgggcatgctggcctctgtgtacacagatgatgaggagagaggaaatgtgatgggcatcgccctgggcggcctggccatgggcgtgctggtgggcccccccttcggctctgtgctgtatgaatttgtgggcaagacagcccccttcctggtgctggccgccctggtgctgctggatggagccatccagctgtttgtgctgcagcccagccgggtgcagcctgagagccagaagggcacccccctgaccaccctgctgaaggacccctacatcctgattgctgctggcagcatctgctttgccaacatgggcatcgccatgctggagcccgccctgcccatctggatgatggagaccatgtgcagcaggaagtggcagctgggcgtggccttcctgcctgccagcatctcctacctgattggcaccaacatcttcggcatcctggcccacaagatgggccgctggctgtgtgccctgctgggcatgatcatcgtgggcgtgtccatcctgtgcatcccctttgccaagaacatctacggcctgattgcccccaactttggagtgggctttgccatcggcatggtggacagctccatgatgcccatcatgggctacctggtggacctgcggcacgtgtctgtgtatggctctgtgtatgccatcgcagatgtggccttctgcatgggctacgccatcggccccagcgctggaggagccatcgccaaggccatcggcttcccctggctgatgaccatcatcggcatcatcgacatcctgtttgcccccctgtgcttcttcctgcggagccccccagccaaggaggagaagatggccatcctgatggaccacaactgccccatcaagaccaagatgtacacccagaacaacatccagagctaccccatcggagaagatgaggagagcgagagtgactag

SEQ ID NO: 170293 - DNA, 1494 bp, synthetic construct
  misc_feature 1..1494: note = Description of Artificial Sequence: Synthetic coding sequence
  source 1..1494: mol_type = other DNA
atggatgtgcccggccctgtgtccagaagagctgctgctgctgctgccaccgtgctgctgaggacagcccgggtgcggcgggagtgctggttcctgcccacagccctgctgtgtgcctacggcttctttgccagcctgcggcccagcgagcccttcctgaccccctacctgctgggccctgacaagaacctgacagagcgggaggtgttcaatgagatctaccctgtgtggacctacagctacctggtgctgctcttccctgtgttcctggccacagactacctgcgctacaagcctgtggtgctgctgcagggcctgagcctgattgtgacctggttcatgctgctgtatgcccagggcctgctggccatccagttcctggagttcttctatggaattgccacagccacagaaattgcctactacagctacatctacagcgtggtggacctgggcatgtaccagaaggtgaccagctactgccgcagcgccaccctggtgggcttcaccgtgggctctgtgctgggccagatcctggtgtctgtggccggctggagcctcttcagcctgaatgtcatcagcctgacctgtgtgtctgtggcctttgctgtggcctggttcctgcccatgccccagaagagcctcttcttccaccacatccccagcacctgccagagggtgaatggcatcaaggtgcagaatggaggcatcgtgacagacaccccagccagcaaccacctgcccggctgggaggacatcgagagcaagatccccctgaacatggaggagccccctgtggaggagcctgagcccaagccagaccggctgctggtgctgaaggtgctgtggaatgacttcctgatgtgctacagcagccggcccctgctgtgctggagcgtgtggtgggccctgagcacctgtggctacttccaggtggtgaactacacccagggcctgtgggagaaggtgatgcccagccgctatgctgccatctacaatggaggagtggaggccgtgtccaccctgctgggcgctgtggccgtgtttgctgtgggctacatcaagatctcctggagcacctggggcgagatgaccctgagcctcttcagcctgctgattgctgctgctgtgtacatcatggacacagtgggcaacatctgggtgtgctacgccagctatgtggtgttccgcatcatctacatgctgctgatcaccatcgccaccttccagattgctgccaacctgtccatggagagatatgccctggtgtttggagtgaacaccttcatcgccctggccctgcagaccctgctgaccctgattgtggtggatgccagcggcctgggcctggagatcaccacccagttcctgatctatgccagctactttgccctgattgctgtggtgttcctggccagcggggctgtgtctgtgatgaagaagtgcaggaagctggaggacccccagagcagcagccaggtgaccaccagctag

SEQ ID NO: 170294 - DNA, 1380 bp, synthetic construct
  misc_feature 1..1380: note = Description of Artificial Sequence: Synthetic coding sequence
  source 1..1380: mol_type = other DNA
atggatgtgcccggccctgtgtccagaagagctgctgctgctgctgccaccgtgctgctgaggacagcccgggtgcggcgggagtgctggttcctgcccacagccctgctgtgtgcctacggcttctttgccagcctgcggcccagcgagcccttcctgaccccctacctgctgggccctgacaagaacctgacagagcgggaggtgttcaatgagatctaccctgtgtggacctacagctacctggtgctgctcttccctgtgttcctggccacagactacctgcgctacaagcctgtggtgctgctgcagggcctgagcctgattgtgacctggttcatgctgctgtatgcccagggcctgctggccatccagttcctggagttcttctatggaattgccacagccacagaaattgcctactacagctacatctacagcgtggtggacctgggcatgtaccagaaggtgaccagctactgccgcagcgccaccctggtgggcttcaccgtgggctctgtgctgggccagatcctggtgtctgtggccggctggagcctcttcagcctgaatgtcatcagcctgacctgtgtgtctgtggcctttgctgtggcctggttcctgcccatgccccagaagagcctcttcttccaccacatccccagcacctgccagagggtgaatggcatcaaggagcccaagccagaccggctgctggtgctgaaggtgctgtggaatgacttcctgatgtgctacagcagccggcccctgctgtgctggagcgtgtggtgggccctgagcacctgtggctacttccaggtggtgaactacacccagggcctgtgggagaaggtgatgcccagccgctatgctgccatctacaatggaggagtggaggccgtgtccaccctgctgggcgctgtggccgtgtttgctgtgggctacatcaagatctcctggagcacctggggcgagatgaccctgagcctcttcagcctgctgattgctgctgctgtgtacatcatggacacagtgggcaacatctgggtgtgctacgccagctatgtggtgttccgcatcatctacatgctgctgatcaccatcgccaccttccagattgctgccaacctgtccatggagagatatgccctggtgtttggagtgaacaccttcatcgccctggccctgcagaccctgctgaccctgattgtggtggatgccagcggcctgggcctggagatcaccacccagttcctgatctatgccagctactttgccctgattgctgtggtgttcctggccagcggggctgtgtctgtgatgaagaagtgcaggaagctggaggacccccagagcagcagccaggtgaccaccagctag

SEQ ID NO: 170295 - DNA, 891 bp, synthetic construct
  misc_feature 1..891: note = Description of Artificial Sequence: Synthetic coding sequence
  source 1..891: mol_type = other DNA
atggatgtgcccggccctgtgtccagaagagctgctgctgctgctgccaccgtgctgctgaggacagcccgggtgcggcgggagtgctggttcctgcccacagccctgctgtgtgcctacggcttctttgccagcctgcggcccagcgagcccttcctgaccccctacctgctgggccctgacaagaacctgacagagcgggaggagcccaagccagaccggctgctggtgctgaaggtgctgtggaatgacttcctgatgtgctacagcagccggcccctgctgtgctggagcgtgtggtgggccctgagcacctgtggctacttccaggtggtgaactacacccagggcctgtgggagaaggtgatgcccagccgctatgctgccatctacaacggcggcgtggaggccgtgtccaccctgctgggcgctgtggccgtgtttgctgtgggctacatcaagatctcctggagcacctggggcgagatgaccctgagcctcttcagcctgctgattgctgctgctgtgtacatcatggacacagtgggcaacatctgggtgtgctacgccagctatgtggtgttccgcatcatctacatgctgctgatcaccatcgccaccttccagattgctgccaacctgtccatggagagatatgccctggtgtttggagtgaacaccttcatcgccctggccctgcagaccctgctgaccctcatcgtggtggatgccagcggcctgggcctggagatcaccacccagttcctgatctatgccagctactttgccctgattgctgtggtgttcctggccagcggggctgtgtctgtgatgaagaagtgcaggaagctggaggacccccagagcagcagccaggtgaccaccagctag

SEQ ID NO: 170296 - DNA, 1491 bp, synthetic construct
  misc_feature 1..1491: note = Description of Artificial Sequence: Synthetic coding sequence
  source 1..1491: mol_type = other DNA
atggactgctaccgcaccagcctgagcagctcctggatctaccccaccgtcatcctgtgcctgtttggcttcttctccatgatgaggccttctgagcccttcctgatcccctacctgagcggccctgacaagaacctgaccagcgctgagatcaccaatgagatcttccctgtgtggacctacagctacctggtgctgctgctgcctgtgtttgtgctgacagattatgtgcgctacaagcctgtgatcatcctgcagggcatctccttcatcatcacctggctgctgctgctgtttggccagggcgtgaagaccatgcaggtggtggagttcttctacggcatggtgacagctgctgaggtggcctactatgcctacatctacagcgtggtgtccccagagcactaccagagggtgtctggctactgccgctctgtgaccctggccgcctacacagctggctctgtgctggcccagctgctggtgtccctggccaacatgagctacttctacctgaatgtcatcagcctggcctctgtgtctgtggccttcctgttcagcctcttcctgcccatgcccaagaagtccatgttcttccacgccaagcccagccgggagatcaagaagagcagctctgtgaaccctgtgctggaggagacccatgaaggagaggcccctggctgtgaggagcagaagcccaccagcgagatcctgagcaccagcggcaagctgaacaagggccagctgaacagcctgaagcccagcaatgtgacagtggatgtgtttgtgcagtggttccaggacctgaaggagtgctacagcagcaagaggctcttctactggagcctgtggtgggcctttgccacagctggcttcaaccaggtgctgaactacgtgcagatcctgtgggactacaaggcccccagccaggacagcagcatctacaacggggctgtggaggccatcgccacctttggaggagctgtggccgcctttgctgtgggctacgtgaaggtgaactgggacctgctgggggagctggccctggtggtgttttctgtggtgaatgccggcagcctcttcctgatgcactacacagccaacatctgggcctgctacgccggctacctgatcttcaagagcagctacatgctgctgatcaccatcgctgtgttccagattgctgtgaacctgaatgtggagagatatgccctggtgtttggcatcaacaccttcatcgccctggtgatccagaccatcatgaccgtcatcgtggtggaccagaggggcctgaacctgcctgtgtccatccagttcctggtgtatggcagctactttgctgtgattgctggcatcttcctgatgaggtccatgtacatcacctacagcaccaagagccagaaggatgtgcagagccctgcccccagtgaaaatccagatgtgagccaccctgaggaggagagcaacatcatcatgagcaccaagctgtag

SEQ ID NO: 170297 - DNA, 165 bp, synthetic construct
  misc_feature 1..165: note = Description of Artificial Sequence: Synthetic coding sequence
  source 1..165: mol_type = other DNA
atggactgctaccgcaccagcctgagcagctcctggatctaccccaccgtcatcctgtgcctgtttggcttcttctccatgatgaggccttctgagcccttcctgatcccctacctgagcggccctgacaagaacctgaccagcgctgagatcaccaatgaatag

SEQ ID NO: 170298 - DNA, 195 bp, synthetic construct
  misc_feature 1..195: note = Description of Artificial Sequence: Synthetic coding sequence
  source 1..195: mol_type = other DNA
atggactgctaccgcaccagcctgagcagctcctggatctaccccaccgtcatcctgtgcctgtttggcttcttctccatgatgaggccttctgagcccttcctgatcccctacctgagcggccctgacaagaacctgaccagcgctgagatcaccaatgagatcttccctgtgtggacctacagctacctgtag

SEQ ID NO: 170299 - DNA, 1491 bp, synthetic construct; identical to SEQ ID NO: 170296
  misc_feature 1..1491: note = Description of Artificial Sequence: Synthetic coding sequence
  source 1..1491: mol_type = other DNA

SEQ ID NO: 170300 - DNA, 399 bp, synthetic construct
  misc_feature 1..399: note = Description of Artificial Sequence: Synthetic coding sequence
  source 1..399: mol_type = other DNA
atggactgctaccgcaccagcctgagcagctcctggatctaccccaccgtcatcctgtgcctgtttggcttcttctccatgatgaggccttctgagcccttcctgatcccctacctgagcggccctgacaagaacctgaccagcgctgagatcaccaatgagatcttccctgtgtggacctacagctacctggtgctgctgctgcctgtgtttgtgctgacagattatgtgcgctacaagcctgtgatcatcctgcagggcatctccttcatcatcacctggctgctgctgctgtttggccagggcgtgaagaccatgcaggtggtggagttcttctacggcatggtgacagctgctgaggtggcctactatgcctacatctacagcgtggtgtcctag

SEQ ID NO: 170301 - DNA, 1479 bp, synthetic construct
  misc_feature 1..1479: note = Description of Artificial Sequence: Synthetic coding sequence
  source 1..1479: mol_type = other DNA
atgaaccccctgggcagcgccagccgggccaccgtggaccagctgacagacctgcccagcaaggagcagctgagctgtgtggtgtttgccctgtggcccccagccttcagcagcaacctgagtgaccccggggtgaagatcaccaatgagatcttccctgtgtggacctacagctacctggtgctgctgctgcctgtgtttgtgctgacagattatgtgcgctacaagcctgtgatcatcctgcagggcatctccttcatcatcacctggctgctgctgctgtttggccagggcgtgaagaccatgcaggtggtggagttcttctacggcatggtgacagctgctgaggtggcctactatgcctacatctacagcgtggtgtccccagagcactaccagagggtgtctggctactgccgctctgtgaccctggccgcctacacagctggctctgtgctggcccagctgctggtgtccctggccaacatgagctacttctacctgaatgtcatcagcctggcctctgtgtctgtggccttcctgttcagcctcttcctgcccatgcccaagaagtccatgttcttccacgccaagcccagccgggagatcaagaagagcagctctgtgaaccctgtgctggaggagacccatgaaggagaggcccctggctgtgaggagcagaagcccaccagcgagatcctgagcaccagcggcaagctgaacaagggccagctgaacagcctgaagcccagcaatgtgacagtggatgtgtttgtgcagtggttccaggacctgaaggagtgctacagcagcaagaggctcttctactggagcctgtggtgggcctttgccacagctggcttcaaccaggtgctgaactacgtgcagatcctgtgggactacaaggcccccagccaggacagcagcatctacaacggggctgtggaggccatcgccacctttggaggagctgtggccgcctttgctgtgggctacgtgaaggtgaactgggacctgctgggggagctggccctggtggtgttttctgtggtgaatgccggcagcctcttcctgatgcactacacagccaacatctgggcctgctacgccggctacctgatcttcaagagcagctacatgctgctgatcaccatcgctgtgttccagattgctgtgaacctgaatgtggagagatatgccctggtgtttggcatcaacaccttcatcgccctggtgatccagaccatcatgaccgtcatcgtggtggaccagaggggcctgaacctgcctgtgtccatccagttcctggtgtatggcagctactttgctgtgattgctggcatcttcctgatgaggtccatgtacatcacctacagcaccaagagccagaaggatgtgcagagccctgcccccagtgaaaatccagatgtgagccaccctgaggaggagagcaacatcatcatgagcaccaagctgtag

SEQ ID NO: 170302 - DNA, 1626 bp, synthetic construct
  misc_feature 1..1626: note = Description of Artificial Sequence: Synthetic coding sequence
  source 1..1626: mol_type = other DNA
atgggccacagcccccctgtgctgcccctgtgtgcctctgtgtccctgctgggcggcctgaccttcggctatgagctggccgtcatcagcggggccctgctgcccctgcagctggactttggcctgagctgcctggagcaggagttcctggtgggcagcctgctgctgggcgccctgctggccagcctggtgggcggcttcctgattgactgctacggcaggaagcaggccatcctgggcagcaacctggtgctgctggccggcagcctgaccctgggcctggccggcagcctggcctggctggtgctgggccgggctgtggtgggctttgccatcagcctgagctccatggcctgctgcatctacgtgtctgagctggtgggcccccggcagaggggcgtgctggtgtccctgtatgaagctggcatcaccgtgggcatcctgctgtcctatgccctgaactatgccctggccggcaccccctggggctggaggcacatgtttggctgggccacagccccagctgtgctgcagagcctgagcctgctcttcctgcctgctggaacagatgaaacagccacccacaaggacctgatccccctgcagggcggggaggcccccaagctgggccctggccggccccgctacagcttcctggacctcttccgggcccgggacaacatgaggggccgcaccaccgtgggcctgggcctggtgctcttccagcagctgaccggccagcccaacgtgctgtgctacgccagcaccatcttcagctctgtgggcttccacggcggcagcagcgctgtgctggcctctgtgggcctgggcgctgtgaaggtggccgccaccctgacagccatgggcctggtggaccgggccggccggcgggccctgctgctggccggctgtgccctgatggccctgtctgtgtctggcatcggcctggtgtcctttgctgtgcccatggattctggccccagctgcctggccgtgcccaatgccaccggccagacaggcctgcccggggacagcggcctgctgcaggacagcagcctgccccccatccccaggaccaatgaagaccagcgggagcccatcctgagcacagccaagaagaccaagccccaccccaggtctggggaccccagcgccccaccccggctggccctgagcagcgccctgcccggcccccccctgcctgcccggggccacgccctgctgcgctggacagccctgctgtgcctgatggtgtttgtgtctgccttctcctttggatttggacctgtgacctggctggtgctgtctgagatctaccctgtggagatccggggccgggcctttgccttctgcaacagcttcaactgggccgccaacctcttcatcagcctgtccttcctggacctgattggcaccatcggcctgtcctggaccttcctgctgtatggcctgacagctgtgctgggcctgggcttcatctacctgtttgtgcctgagaccaagggccagagcctggccgagattgaccagcagttccagaagaggcgcttcaccctgagctttggccaccggcagaacagcacaggcatcccctacagcagaattgagatctctgctgccagctag

SEQ ID NO: 170303 - DNA, 1947 bp, synthetic construct
  misc_feature 1..1947: note = Description of Artificial Sequence: Synthetic coding sequence
  source 1..1947: mol_type = other DNA
atgagcaggaaggcctctgaaaatgtggagtacaccctgcggagcctgagcagcctgatgggagagaggaggaggaagcagcctgagccagatgctgccagcgctgctggggagtgcagcctgctggccgctgctgagagcagcaccagcctgcagagcgctggggccggcggcggcggcgtgggggacctggagagagctgcccggcggcagttccagcaggatgagaccccagcctttgtgtatgtggtggccgtgttcagcgccctgggcggcttcctgtttggctatgacacaggagtggtgtctggggccatgctgctgctgaagaggcagctgagcctggatgccctgtggcaggagctgctggtgagcagcacagtgggcgctgctgctgtgtctgccctggccggcggggccctgaatggagtgtttggaagaagagctgccatcctgctggccagcgccctcttcaccgctggcagcgctgtgctggccgccgccaacaacaaggagaccctgctggccggccgcctggtggtgggcctgggcattggaattgcctccatgacagtgcctgtgtacatcgccgaggtgtccccacccaacctgcggggccgcctggtgaccatcaacaccctcttcatcactggaggccagttctttgcctctgtggtggatggagccttctcctacctgcagaaggatggctggagatacatgctgggcctggccgctgtgcctgctgtgatccagttcttcggcttcctgttcctgcctgagagcccccgctggctgatccagaagggccagacccagaaggcccggcgcatcctgagccagatgaggggcaaccagaccattgatgaggagtatgacagcatcaagaacaacatcgaggaggaggagaaggaggtgggcagcgctggccctgtgatctgcaggatgctgagctacccacccacccggcgggccctgattgtgggctgcggcctgcagatgttccagcagctgagcggcatcaacaccatcatgtactacagcgccaccatcctgcagatgtctggagtggaggatgaccggctggccatctggctggcctctgtgacagccttcaccaacttcatcttcaccctggtgggcgtgtggctggtggagaaggtgggccgcaggaagctgaccttcggcagcctggccggcaccaccgtggccctgatcatcctggccctgggctttgtgctgagcgcccaggtgagcccccgcatcaccttcaagcccatcgcccccagcggccagaatgccacctgcacccgctacagctactgcaatgaatgcatgctggaccctgactgtggcttctgctacaagatgaacaagagcacagtgattgacagcagctgtgtgcctgtgaacaaggccagcaccaatgaggccgcctggggccgctgtgaaaatgagaccaagttcaagacagaggacatcttctgggcctacaacttctgccccaccccctacagctggacagccctgctgggcctcatcctgtacctggtgttctttgcccctggcatgggccccatgccctggacagtgaacagcgagatctaccccctgtgggcccggagcactggaaatgcctgcagcagcggcatcaactggatcttcaacgtgctggtgtccctgaccttcctgcacacagctgagtacctgacctactatggagccttcttcctgtatgccggctttgctgctgtgggcctgctcttcatctacggctgcctgcctgagaccaagggcaagaagctggaggagattgagagcctgtttgacaaccggctgtgcacctgtggcaccagtgacagtgatgagggccgctacatcgagtacatccgggtgaagggcagcaactaccacctgagtgacaatgatgccagtgatgtggagtag

SEQ ID NO: 170304 - DNA, 1074 bp, synthetic construct
  misc_feature 1..1074: note = Description of Artificial Sequence: Synthetic coding sequence
  source 1..1074: mol_type = other DNA
atgagcaggaaggcctctgaaaatgtggagtacaccctgcggagcctgagcagcctgatgggagagaggaggaggaagcagcctgagccagatgctgccagcgctgctggggagtgcagcctgctggccgctgctgagagcagcaccagcctgcagagcgctggggccggcggcggcggcgtgggggacctggagagagctgcccggcggcagttccagcaggatgagaccccagcctttgtgtatgtggtggccgtgttcagcgccctgggcggcttcctgtttggctatgacacaggagtggtgtctggggccatgctgctgctgaagaggcagctgagcctggatgccctgtggcaggagctgctggtgagcagcacagtgggcgctgctgctgtgtctgccctggccggcggggccctgaatggagtgtttggaagaagagctgccatcctgctggccagcgccctcttcaccgctggcagcgctgtgctggccgccgccaacaacaaggagaccctgctggccggccgcctggtggtgggcctgggcattggaattgcctccatgacagtgcctgtgtacatcgccgaggtgtccccacccaacctgcggggccgcctggtgaccatcaacaccctcttcatcactggaggccagttctttgcctctgtggtggatggagccttctcctacctgcagaaggatggctggagatacatgctgggcctggccgctgtgcctgctgtgatccagttcttcggcttcctgttcctgcctgagagcccccgctggctgatccagaagggccagacccagaaggcccggcgcatcctgagccagatgaggggcaaccagaccattgatgaggagtatgacagcatcaagaacaacatcgaggaggaggagaaggaggtgggcagcgctggccctgtgatctgcaggatgctgagctacccacccacccggcgggccctgattgtgggctgcggcctgcagatgttccagcagctgagcggcatcaacaccatcatgtatgtgttcctgagcggcttcctgctgaagaggctgtag

SEQ ID NO: 170305 - DNA, 1494 bp, synthetic construct
  misc_feature 1..1494: note = Description of Artificial Sequence: Synthetic coding sequence
  source 1..1494: mol_type = other DNA
atggacaaccggcagaatgtgaccccagccctgatctttgccatcaccgtggccaccatcggcagcttccagtttggctacaacacaggagtcatcaatgcccctgagaccatcatcaaggagttcatcaacaagaccctgacagacaaggccaatgccccacccagcgaggtgctgctgaccaacctgtggagcctgtctgtggccatcttctctgtgggcggcatgattggcagcttctctgtgggcctgtttgtgaacagatttggaagaagaaacagcatgctgattgtgaacctgctggccgccaccggcggctgcctgatgggcctgtgcaagattgctgagagcgtggagatgctgatcctgggccgcctggtgattggcctcttctgtggcctgtgcaccggctttgtgcccatgtacatcggggagatcagccccacagccctgcggggggccttcggcaccctgaaccagctgggcatcgtgattggcatcctggtggcccagatcttcggcctggagctgatcctgggcagcgaggagctgtggcctgtgctgctgggcttcaccatcctgcctgccatcctgcagagcgctgccctgccctgctgcccagagagcccccgcttcctgctgatcaacaggaagaaggaggagaatgccacccgcatcctgcagaggctgtggggcacccaggatgtgtcccaggacatccaggagatgaaggatgaaagtgccaggatgagccaggagaagcaggtgacagtgctggagctgttccgggtgagcagctaccggcagcccatcatcatcagcatcgtgctgcagctgagccagcagctgagcggcatcaatgctgtgttctactacagcacaggcatcttcaaggatgctggggtgcagcagcccatctatgccaccatctctgctggggtggtgaacaccatcttcaccctgctgagcctcttcctggtggagcgggccggccgccgcaccctgcacatgattggcctgggcggcatggccttctgcagcaccctgatgacagtgtccctgctgctgaagaaccactacaacggcatgagctttgtgtgcatcggggccatcctggtgtttgtggcctgctttgagatcggccctggccccatcccctggttcatcgtggccgagctgttcagccagggccccaggcctgctgccatggctgtggccggctgcagcaactggaccagcaacttcctggtgggcctgctcttccccagcgctgcctactacctgggcgcctacgtgttcatcatcttcaccggcttcctgatcaccttcctggccttcaccttcttcaaggtgcctgagacccggggccgcacctttgaggacatcacccgggcctttgagggccaggcccatggagctgacagaagtggcaaggatggagtgatgggcatgaacagcattgaaccagccaaggagaccaccaccaacgtgtag

SEQ ID NO: 170306 - DNA, 1563 bp, synthetic construct
  misc_feature 1..1563: note = Description of Artificial Sequence: Synthetic coding sequence
  source 1..1563: mol_type = other DNA
atggagttccacaatggaggccacgtgtctggcatcggcggcttcctggtgtccctgaccagcaggatgaagccccacaccctggccgtgaccccagccctgatctttgccatcaccgtggccaccatcggcagcttccagtttggctacaacacaggagtcatcaatgcccctgagaccatcatcaaggagttcatcaacaagaccctgacagacaaggccaatgcccctccttctgaggtgctgctgaccaacctgtggagcctgtctgtggccatcttctctgtgggcggcatgattggcagcttctctgtgggcctgtttgtgaaccgcttcggcagaagaaattccatgctgattgtgaacctgctggccgccactggaggctgcctgatgggcctgtgcaagattgctgagagcgtggagatgctgatcctgggccgcctggtgattggcctcttctgtggcctgtgcaccggctttgtgcccatgtacatcggggagatcagccccacagccctgcggggggccttcggcaccctgaaccagctgggcatcgtcatcggcatcctggtggcccagatcttcggcctggagctgatcctgggcagcgaggagctgtggcctgtgctgctgggcttcaccatcctgcctgccatcctgcagagcgctgccctgccctgctgcccagagagcccccgcttcctgctgatcaacaggaagaaggaggagaatgccacccgcatcctgcagaggctgtggggcacccaggatgtgtcccaggacatccaggagatgaaggatgagagcgccaggatgagccaggagaagcaggtgacagtgctggagctgttccgggtgtcctcctaccggcagcccatcatcatcagcatcgtgctgcagctgagccagcagctgagcggcatcaatgctgtgttctactacagcacaggcatcttcaaggatgctggggtgcagcagcccatctatgccaccatctctgctggggtggtgaacaccatcttcaccctgctgagcctcttcctggtggagagagctggaagaaggaccctgcacatgattggcctgggcggcatggccttctgcagcaccctgatgacagtgtccctgctgctgaagaaccactacaacggcatgagctttgtgtgcattggagccatcctggtgtttgtggcctgctttgaaattggccctggccccatcccctggttcatcgtggccgagctgttcagccagggccccaggcctgctgccatggctgtggccggctgcagcaactggaccagcaacttcctggtgggcctgctcttccccagcgctgcctactacctgggcgcctacgtgttcatcatcttcaccggcttcctgatcaccttcctggccttcaccttcttcaaggtgcctgagacccggggccgcacctttgaggacatcacccgggcctttgagggccaggcccacggggctgacagaagtggcaaggatggagtgatgggcatgaacagcattgagcccgccaaggagaccaccaccaacgtgtag

SEQ ID NO: 170307 - DNA, 1494 bp, synthetic construct; identical to SEQ ID NO: 170305
  misc_feature 1..1494: note = Description of Artificial Sequence: Synthetic coding sequence
  source 1..1494: mol_type = other DNA

SEQ ID NO: 170308 - DNA, 363 bp, synthetic construct
  misc_feature 1..363: note = Description of Artificial Sequence: Synthetic coding sequence
  source 1..363: mol_type = other DNA
atggagttccacaatggaggccacgtgtctggcatcggcggcttcctggtgtccctgaccagcaggatgaagccccacaccctggccgtgaccccagccctgatctttgccatcaccgtggccaccatcggcagcttccagtttggctacaacacaggagtcatcaatgcccctgagaccatcatcaaggagttcatcaacaagaccctgacagacaaggccaatgcccctccttctgaggtgctgctgaccaacctgtggagcctgtctgtggccatcttctctgtgggcggcatgattggcagcttctctgtgggcctgtttgtgaaccgcttcggcagaagaaattccatgctgatctag

SEQ ID NO: 170309 - DNA, 1236 bp, synthetic construct
  misc_feature 1..1236: note = Description of Artificial Sequence: Synthetic coding sequence
  source 1..1236: mol_type = other DNA
atgctgctgcggcggaggaacagcatgctgattgtgaacctgctggccgccaccggcggctgcctgatgggcctgtgcaagattgctgagagcgtggagatgctgatcctgggccgcctggtgattggcctcttctgtggcctgtgcaccggctttgtgcccatgtacatcggggagatcagccccacagccctgcggggggccttcggcaccctgaaccagctgggcatcgtgattggcatcctggtggcccagatcttcggcctggagctgatcctgggcagcgaggagctgtggcctgtgctgctgggcttcaccatcctgcctgccatcctgcagagcgctgccctgccctgctgcccagagagcccccgcttcctgctgatcaacaggaagaaggaggagaatgccacccgcatcctgcagaggctgtggggcacccaggatgtgtcccaggacatccaggagatgaaggatgaaagtgccaggatgagccaggagaagcaggtgacagtgctggagctgttccgggtgagcagctaccggcagcccatcatcatcagcatcgtgctgcagctgagccagcagctgagcggcatcaatgctgtgttctactacagcacaggcatcttcaaggatgctggggtgcagcagcccatctatgccaccatctctgctggggtggtgaacaccatcttcaccctgctgagcctcttcctggtggagcgggccggccgccgcaccctgcacatgattggcctgggcggcatggccttctgcagcaccctgatgacagtgtccctgctgctgaagaaccactacaacggcatgagctttgtgtgcatcggggccatcctggtgtttgtggcctgctttgagatcggccctggccccatcccctggttcatcgtggccgagctgttcagccagggccccaggcctgctgccatggctgtggccggctgcagcaactggaccagcaacttcctggtgggcctgctcttccccagcgctgcctactacctgggcgcctacgtgttcatcatcttcaccggcttcctgatcaccttcctggccttcaccttcttcaaggtgcctgagacccggggccgcacctttgaggacatcacccgggcctttgagggccaggcccatggagctgacagaagtggcaaggatggagtgatgggcatgaacagcattgaaccagccaaggagaccaccaccaacgtgtag

SEQ ID NO: 170310 - DNA, 426 bp, synthetic construct
  misc_feature 1..426: note = Description of Artificial Sequence: Synthetic coding sequence
  source 1..426: mol_type = other DNA
atggacaaccggcagaatgtgaccccagccctgatctttgccatcaccgtggccaccatcggcagcttccagtttggctacaacacaggagtcatcaatgcccctgagaccatcatcaaggagttcatcaacaagaccctgacagacaaggccaatgccccacccagcgaggtgctgctgaccaacctgtggagcctgtctgtggccatcttctctgtgggcggcatgattggcagcttctctgtgggcctgtttgtgaacagatttggaagaagaaacagcatgctgattgtgaacctgctggccgccaccggcggctgcctgatgggcctgtgcaagattgctgagagcgtggagatgctgatcctgggccgcctggtgattggcctcttctgtggcctgtgcaccggctttgtgcccatgtag

SEQ ID NO: 170311 - DNA, 144 bp, synthetic construct
  misc_feature 1..144: note = Description of Artificial Sequence: Synthetic coding sequence
  source 1..144: mol_type = other DNA
atggacaaccggcagaatgtgaccccagccctgatctttgccatcaccgtggccaccatcggcagcttccagtttggctacaacacaggagtcatcaatgcccctgagaccatcatcaaggagttcatcaacaagaccctgtag

SEQ ID NO: 170312 - DNA, 69 bp, synthetic construct
  misc_feature 1..69: note = Description of Artificial Sequence: Synthetic coding sequence
  source 1..69: mol_type = other DNA
atggacaaccggcagaatgtgaccccagccctgatctttgccatcaccgtggccaccatcggcagctag

SEQ ID NO: 170313 - DNA, 426 bp, synthetic construct
  misc_feature 1..426: note = Description of Artificial Sequence: Synthetic coding sequence
  source 1..426: mol_type = other DNA
atggagttccacaatggaggccacgtgtctggcatcggcggcttcctggtgtccctgaccagcaggatgaagccccacaccctggccgtgaccccagccctgatctttgccatcaccgtggccaccatcggcagcttccagtttggctacaacacaggagtcatcaatgcccctgagaccatcatcaaggagttcatcaacaagaccctgacagacaaggccaatgcccctccttctgaggtgctgctgaccaacctgtggagcctgtctgtggccatcttctctgtgggcggcatgattggcagcttctctgtgggcctgtttgtgaaccgcttcggcagaagaaattccatgctgattgtgaacctgctggccgccactggaggctgcctgatgggcctgtgcaagattgctgagagcgtgtag

SEQ ID NO: 170314 - DNA, 1608 bp, synthetic construct
  misc_feature 1..1608: note = Description of Artificial Sequence: Synthetic coding sequence
  source 1..1608: mol_type = other DNA
atgcagaggctgcagctgctgcgggtggaggtgctgctgggcgtgaagcagggagatgagatgaggcacttcttcttcagcagccagaccagcaccctggagaagagccagaatggaggagtgggggaggaggtgaccccagccctgatctttgccatcaccgtggccaccatcggcagcttccagtttggctacaacacaggagtcatcaatgcccctgagaccatcatcaaggagttcatcaacaagaccctgacagacaaggccaatgccccacccagcgaggtgctgctgaccaacctgtggagcctgtctgtggccatcttctctgtgggcggcatgattggcagcttctctgtgggcctgtttgtgaacagatttggaagaagaaacagcatgctgattgtgaacctgctggccgccaccggcggctgcctgatgggcctgtgcaagattgctgagagcgtggagatgctgatcctgggccgcctggtgattggcctcttctgtggcctgtgcaccggctttgtgcccatgtacatcggggagatcagccccacagccctgcggggggccttcggcaccctgaaccagctgggcatcgtgattggcatcctggtggcccagatcttcggcctggagctgatcctgggcagcgaggagctgtggcctgtgctgctgggcttcaccatcctgcctgccatcctgcagagcgctgccctgccctgctgcccagagagcccccgcttcctgctgatcaacaggaagaaggaggagaatgccacccgcatcctgcagaggctgtggggcacccaggatgtgtcccaggacatccaggagatgaaggatgaaagtgccaggatgagccaggagaagcaggtgacagtgctggagctgttccgggtgagcagctaccggcagcccatcatcatcagcatcgtgctgcagctgagccagcagctgagcggcatcaatgctgtgttctactacagcacaggcatcttcaaggatgctggggtgcagcagcccatctatgccaccatctctgctggggtggtgaacaccatcttcaccctgctgagcctcttcctggtggagcgggccggccgccgcaccctgcacatgattggcctgggcggcatggccttctgcagcaccctgatgacagtgtccctgctgctgaagaaccactacaacggcatgagctttgtgtgcatcggggccatcctggtgtttgtggcctgctttgagatcggccctggccccatcccctggttcatcgtggccgagctgttcagccagggccccaggcctgctgccatggctgtggccggctgcagcaactggaccagcaacttcctggtgggcctgctcttccccagcgctgcctactacctgggcgcctacgtgttcatcatcttcaccggcttcctgatcaccttcctggccttcaccttcttcaaggtgcctgagacccggggccgcacctttgaggacatcacccgggcctttgagggccaggcccatggagctgacagaagtggcaaggatggagtgatgggcatgaacagcattgaaccagccaaggagaccaccaccaacgtgtag

SEQ ID NO: 170315 - DNA, 486 bp, synthetic construct
  misc_feature 1..486: note = Description of Artificial Sequence: Synthetic coding sequence
  source 1..486: mol_type = other DNA
atgattggcctgggcggcatggccttctgcagcaccctgatgacagtgtccctgctgctgaagaaccactacaacggcatgagctttgtgtgcatcggggccatcctggtgtttgtggcctgctttgagatcggccctggccccatcccctggttcatcgtggccgagctgttcagccagggccccaggcctgctgccatggctgtggccggctgcagcaactggaccagcaacttcctggtgggcctgctcttccccagcgctgcctactacctgggcgcctacgtgttcatcatcttcaccggcttcctgatcaccttcctggccttcaccttcttcaaggtgcctgagacccggggccgcacctttgaggacatcacccgggcctttgagggccaggcccatggagctgacagaagtggcaaggatggagtgatgggcatgaacagcattgaaccagccaaggagaccaccaccaacgtgtag

SEQ ID NO: 170316 - DNA, 1236 bp, synthetic construct; identical to SEQ ID NO: 170309
  misc_feature 1..1236: note = Description of Artificial Sequence: Synthetic coding sequence
  source 1..1236: mol_type = other DNA

SEQ ID NO: 170317 - DNA, 459 bp, synthetic construct
  misc_feature 1..459: note = Description of Artificial Sequence: Synthetic coding sequence
  source 1..459: mol_type = other DNA
atggacaaccggcagaatgtgaccccagccctgatctttgccatcaccgtggccaccatcggcagcttccagtttggctacaacacaggagtcatcaatgcccctgagaccatcatcaaggagttcatcaacaagaccctgacagacaaggccaatgccccacccagcgaggtgctgctgaccaacctgtggagcctgtctgtggccatcttctctgtgggcggcatgattggcagcttctctgtgggcctgtttgtgaacagatttggaagaagaaacagcatgctgattgtgaacctgctggccgccaccggcggctgcctgatgggcctgtgcaagattgctgagagcgtggagatgctgatcctgggccgcctggtgattggcctcttctgtggcctgtgcaccggctttgtgcccatgtacatcggggagatcagccccacagccctgaggtag

SEQ ID NO: 170318 - DNA, 255 bp, synthetic construct
  misc_feature 1..255: note = Description of Artificial Sequence: Synthetic coding sequence
  source 1..255: mol_type = other DNA
atggacaaccggcagaatgtgaccccagccctgatctttgccatcaccgtggccaccatcggcagcttccagtttggctacaacacaggagtcatcaatgcccctgagaccatcatcaaggagttcatcaacaagaccctgacagacaaggccaatgccccacccagcgaggtgctgctgaccaacctgtggagcctgtctgtggccatcttctctgtgggcggcatgattggcagcttctctgtgggcctgtag

SEQ ID NO: 170319 - DNA, 1563 bp, synthetic construct; identical to SEQ ID NO: 170306
  misc_feature 1..1563: note = Description of Artificial Sequence: Synthetic coding sequence
  source 1..1563: mol_type = other DNA

SEQ ID NO: 170320 - DNA, 510 bp, synthetic construct
  misc_feature 1..510: note = Description of Artificial Sequence: Synthetic coding sequence
  source 1..510: mol_type = other DNA
atggacaaccggcagaatgtgaccccagccctgatctttgccatcaccgtggccaccatcggcagcttccagtttggctacaacacaggagtcatcaatgcccctgagaccatcatcaaggagttcatcaacaagaccctgacagacaaggccaatgccccacccagcgaggtgctgctgaccaacctgtggagcctgtctgtggccatcttctctgtgggcggcatgattggcagcttctctgtgggcctgtttgtgaacagatttggaagaagaaacagcatgctgattgtgaacctgctggccgccaccggcggctgcctgatgggcctgtgcaagattgctgagagcgtggagatgctgatcctgggccgcctggtgattggcctcttctgtggcctgtgcaccggctttgtgcccatgtacatcggggagatcagccccacagccctgcggggggccttcggcaccctgaaccagctgggcatcgtgattggcatcctggtgtag

SEQ ID NO: 170321 - DNA, 1491 bp, synthetic construct
  misc_feature 1..1491: note = Description of Artificial Sequence: Synthetic coding sequence
  source 1..1491: mol_type = other DNA
atgggcacccagaaggtgaccccagccctgatctttgccatcaccgtggccaccatcggcagcttccagtttggctacaacacaggagtcatcaatgcccctgagaagatcatcaaggagttcatcaacaagaccctgacagacaagggaaatgcccctccttctgaggtgctgctgaccagcctgtggagcctgtctgtggccatcttctctgtgggcggcatgattggcagcttctctgtgggcctgtttgtgaaccgcttcggcagaagaaattccatgctgattgtgaacctgctggccgtgactggaggctgcttcatgggcctgtgcaaggtggccaagtctgtggagatgctgatcctgggccgcctggtgattggcctcttctgtggcctgtgcaccggctttgtgcccatgtacatcggggagatcagccccacagccctgcggggggccttcggcaccctgaaccagctgggcatcgtggtgggcatcctggtggcccagatcttcggcctggagttcatcctgggcagcgaggagctgtggcccctgctgctgggcttcaccatcctgcctgccatcctgcagagcgctgccctgcccttctgcccagagagcccccgcttcctgctgatcaacaggaaggaggaggagaatgccaagcagatcctgcagaggctgtggggcacccaggatgtgtcccaggacatccaggagatgaaggatgagagcgccaggatgagccaggagaagcaggtgacagtgctggagctgttccgggtgtcctcctaccggcagcccatcatcatcagcatcgtgctgcagctgagccagcagctgagcggcatcaatgctgtgttctactacagcacaggcatcttcaaggatgctggggtgcaggagcccatctatgccaccatcggggccggcgtggtgaacaccatcttcaccgtggtgtccctcttcctggtggagagagctggaagaaggaccctgcacatgattggcctgggcggcatggccttctgcagcaccctgatgacagtgtccctgctgctgaaggacaactacaacggcatgagctttgtgtgcattggagccatcctggtgtttgtggccttctttgaaattggccctggccccatcccctggttcatcgtggccgagctgttcagccagggccccaggcctgctgccatggctgtggccggctgcagcaactggaccagcaacttcctggtgggcctgctcttccccagcgctgcccactacctgggcgcctacgtgttcatcatcttcaccggcttcctgatcaccttcctggccttcaccttcttcaaggtgcctgagacccggggccgcacctttgaggacatcacccgggcctttgagggccaggcccacggggctgacagaagtggcaaggatggagtgatggagatgaacagcattgagcccgccaaggagaccaccaccaacgtgtag

SEQ ID NO: 170322 - DNA, 1269 bp, synthetic construct
  misc_feature 1..1269: note = Description of Artificial Sequence: Synthetic coding sequence
  source 1..1269: mol_type = other DNA
atgattggcagcttctctgtgggcctgtttgtgaaccgcttcggcagaagaaattccatgctgattgtgaacctgctggccgtgactggaggctgcttcatgggcctgtgcaaggtggccaagtctgtggagatgctgatcctgggccgcctggtgattggcctcttctgtggcctgtgcaccggctttgtgcccatgtacatcggggagatcagccccacagccctgcggggggccttcggcaccctgaaccagctgggcatcgtggtgggcatcctggtggcccagatcttcggcctggagttcatcctgggcagcgaggagctgtggcccctgctgctgggcttcaccatcctgcctgccatcctgcagagcgctgccctgcccttctgcccagagagcccccgcttcctgctgatcaacaggaaggaggaggagaatgccaagcagatcctgcagaggctgtggggcacccaggatgtgtcccaggacatccaggagatgaaggatgagagcgccaggatgagccaggagaagcaggtgacagtgctggagctgttccgggtgtcctcctaccggcagcccatcatcatcagcatcgtgctgcagctgagccagcagctgagcggcatcaatgctgtgttctactacagcacaggcatcttcaaggatgctggggtgcaggagcccatctatgccaccatcggggccggcgtggtgaacaccatcttcaccgtggtgtccctcttcctggtggagagagctggaagaaggaccctgcacatgattggcctgggcggcatggccttctgcagcaccctgatgacagtgtccctgctgctgaaggacaactacaacggcatgagctttgtgtgcattggagccatcctggtgtttgtggccttctttgaaattggccctggccccatcccctggttcatcgtggccgagctgttcagccagggccccaggcctgctgccatggctgtggccggctgcagcaactggaccagcaacttcctggtgggcctgctcttccccagcgctgcccactacctgggcgcctacgtgttcatcatcttcaccggcttcctgatcaccttcctggccttcaccttcttcaaggtgcctgagacccggggccgcacctttgaggacatcacccgggcctttgagggccaggcccacggggctgacagaagtggcaaggatggagtgatggagatgaacagcattgagcccgccaaggagaccaccaccaacgtgtag

SEQ ID NO: 170323 - DNA, 1530 bp, synthetic construct
  misc_feature 1..1530: note = Description of Artificial Sequence: Synthetic coding sequence
  source 1..1530: mol_type = other DNA
atgcccagcggcttccagcagatcggctctgaagatggagagcccccccagcagagggtgacaggcaccctggtgctggccgtgttttctgctgtgctgggcagcctgcagtttggctacaacatcggggtcatcaatgccccccagaaggtgattgagcagagctacaatgagacctggctgggccggcagggccctgagggccccagcagcatccccccaggcaccctgaccaccctgtgggccctgtctgtggccatcttctctgtgggcggcatgatcagcagcttcctgattggcatcatcagccagtggctgggcaggaagagggccatgctggtgaacaacgtgctggccgtgctgggcggcagcctgatgggcctggccaatgctgctgccagctatgagatgctgatcctgggccgcttcctgattggagcctacagcggcctgaccagcggcctggtgcccatgtatgtgggggagatcgcccccacccacctgcggggggccctgggcaccctgaaccagctggccatcgtcatcggcatcctgattgcccaggtgctgggcctggagagcctgctgggcacagccagcctgtggcccctgctgctgggcctgactgtgctgcctgccctgctgcagctggtgctgctgcccttctgcccagagagcccccgctacctgtacatcatccagaacctggagggccctgccaggaagagcctgaagaggctgaccggctgggcagatgtgtctggagtgctggccgagctgaaggatgagaagaggaagctggagcgggagcggcccctgagcctgctgcagctgctgggcagcaggacccaccggcagcccctcatcatcgctgtggtgctgcagctgagccagcagctgagcggcatcaatgctgtgttctactacagcaccagcatctttgaaacagctggggtgggccagcctgcctatgccaccatcggggccggcgtggtgaacacagtgttcaccctggtgtctgtgctgctggtggagagagctggaagaaggaccctgcacctgctgggcctggccggcatgtgtggctgtgccatcctgatgacagtggccctgctgctgctggagcgggtgcctgccatgtcctatgtgtccatcgtggccatctttggatttgtggccttctttgaaattggccctggccccatcccctggttcatcgtggccgagctgttcagccagggccccaggcctgctgccatggctgtggccggcttcagcaactggaccagcaacttcatcatcggcatgggcttccagtatgtggccgaggccatgggcccctacgtgttcctgctgtttgctgtgctgctgctgggcttcttcatcttcaccttcctgcgggtgcctgagacccggggccgcacctttgaccagatctctgctgccttccacaggacccccagcctgctggagcaggaggtgaagcccagcacagagctggagtacctgggcccagatgaaaatgactag

SEQ ID NO: 170324 - DNA, 1356 bp, synthetic construct
  misc_feature 1..1356: note = Description of Artificial Sequence: Synthetic coding sequence
  source 1..1356: mol_type = other DNA
atggatggagagcccccccagcagagggtgacaggcaccctggtgctggccgtgttttctgctgtgctgggcagcctgcagtttggctacaacatcggggtcatcaatgccccccagaaggtgattgagcagagctacaatgagacctggctgggccggcagggccctgagggccccagcagcatccccccaggcaccctgaccaccctgtgggccctgtctgtggccatcttctctgtgggcggcatgatcagcagcttcctgattggcatcatcagccagtggctgggcaggaagagggccatgctggtgaacaacgtgctggccgtgctgggcggcagcctgatgggcctggccaatgctgctgccagctatgagatgctgatcctgggccgcttcctgattggagcctacagcggcctgaccagcggcctggtgcccatgtatgtgggggagatcgcccccacccacctgcggggggccctgggcaccctgaaccagctggccatcgtcatcggcatcctgattgcccaggtgctgggcctggagagcctgctgggcacagccagcctgtggcccctgctgctgggcctgactgtgctgcctgccctgctgcagctggtgctgctgcccttctgcccagagagcccccgctacctgtacatcatccagaacctggagggccctgccaggaagagcctgaagaggctgaccggctgggcagatgtgtctggagtgctggccgagctgaaggatgagaagaggaagctggagcgggagcggcccctgagcctgctgcagctgctgggcagcaggacccaccggcagcccctcatcatcgctgtggtgctgcagctgagccagcagctgagcggcatcaatgctgtgttctactacagcaccagcatctttgaaacagctggggtgggccagcctgcctatgccaccatcggggccggcgtggtgaacacagtgttcaccctggtgtctgtgctgctggtggagagagctggaagaaggaccctgcacctgctgggcctggccggcatgtgtggctgtgccatcctgatgacagtggccctgctgctgctggagcgggtgcctgccatgtcctatgtgtccatcgtggccatctttggatttgtggccttctttgaaattggccctggccccatcccctggttcatcgtggccgagctgttcagccagggccccaggcctgctgccatggctgtggccggcttcagcaactggaccagcaacttcatcatcggcatgggcttccagtatgtggccgtgggccccccagccccagccagccacacagtgggccagcgctgggccagccacagctag

SEQ ID NO: 170325 - DNA, 1338 bp, synthetic construct
  misc_feature 1..1338: note = Description of Artificial Sequence: Synthetic coding sequence
  source 1..1338: mol_type = other DNA
atgcaggagcccctgctgggcgctgagggccctgactatgacaccttccctgagaagcccccacccagccctggggaccgggcccgggtgggcaccctgcagaacaagagggtcttcctggccacctttgctgctgtgctgggcaacttctcctttggctacgccctggtgtacaccagccctgtgatcccagccctggagaggagcctggaccctgacctgcacctgaccaagagccaggcctcctggtttggcagcgtcttcaccctgggcgctgctgctgggggcctgagcgccatgatcctgaatgacctgctgggcaggaagctgagcatcatgttttctgctgtgcccagcgctgctggctacgccctgatggccggggcccacggcctgtggatgctgctgctgggccgcaccctgaccggctttgctgggggcctgacagctgcctgcatccctgtgtatgtgtctgagatcgcccctcctggggtgcggggggccctgggcgccaccccccagctgatggctgtgtttggcagcctgagcctgtatgccctgggcctgctgctgccctggcgctggctggccgtggccggggaggcccctgtgctgatcatgatcctgctgctgtccttcatgcccaacagcccccgcttcctgctgagccggggcagagatgaggaggccctgcgggccctggcctggctgcggggcacagatgtggatgtgcactgggagtttgagcagatccaggacaacgtgcggcggcagagcagccgggtgtcctgggccgaggcccgggcccctcatgtgtgccggcccatcaccgtggccctgctgatgaggctgctgcagcagctgaccggcatcacccccatcctggtgtacctgcagagcatctttgacagcacagctgtgctgctgccccccaaggatgatgctgccatcgtgggcgctgtgcggctgctgtctgtgctgattgctgccctgaccatggacctggccggcaggaaggtgctgctgtttgtgtctggctatgctgtgggctggggccccatcacctggctgctgatgtctgaggtgctgcccctgcgggcccggggcgtggccagcggcctgtgtgtgctggcctcctggctgacagcctttgtgctgaccaagagcttcctgcctgtggtgtccaccttcggcctgcaggtgcccttcttcttctttgctgccatctgcctggtgtccctggtgttcaccggctgctgcgtgcctgagaccaagggccgcagcctggagcagatcgagagcttcttcagaacaggccgccgctccttcctgaggtag

SEQ ID NO: 170326 - DNA, 1524 bp, synthetic construct
  misc_feature 1..1524: note = Description of Artificial Sequence: Synthetic coding sequence
  source 1..1524: mol_type = other DNA
atgcaggagcccctgctgggcgctgagggccctgactatgacaccttccctgagaagcccccacccagccctggggaccgggcccgggtgggcaccctgcagaacaagagggtcttcctggccacctttgctgctgtgctgggcaacttctcctttggctacgccctggtgtacaccagccctgtgatcccagccctggagaggagcctggaccctgacctgcacctgaccaagagccaggcctcctggtttggcagcgtcttcaccctgggcgctgctgctgggggcctgagcgccatgatcctgaatgacctgctgggcaggaagctgagcatcatgttttctgctgtgcccagcgctgctggctacgccctgatggccggggcccacggcctgtggatgctgctgctgggccgcaccctgaccggctttgctgggggcctgacagctgcctgcatccctgtgtatgtgtctgagatcgcccctcctggggtgcggggggccctgggcgccaccccccagctgatggctgtgtttggcagcctgagcctgtatgccctgggcctgctgctgccctggcgctggctggccgtggccggggaggcccctgtgctgatcatgatcctgctgctgtccttcatgcccaacagcccccgcttcctgctgagccggggcagagatgaggaggccctgcgggccctggcctggctgcggggcacagatgtggatgtgcactgggagtttgagcagatccaggacaacgtgcggcggcagagcagccgggtgtcctgggccgaggcccgggcccctcatgtgtgccggcccatcaccgtggccctgctgatgaggctgctgcagcagctgaccggcatcacccccatcctggtgtacctgcagagcatctttgacagcacagctgtgctgctgccccccaaggatgatgctgccatcgtgggcgctgtgcggctgctgtctgtgctgattgctgccctgaccatggacctggccggcaggaaggtgctgctgtttgtgtctgctgccatcatgtttgctgccaacctgaccctgggcctgtacatccacttcggcccccggcccctgagccccaacagcacagctggcctggagagcgagagctggggagacctggcccagcccctggccgccccagctggctacctgaccctggtgcccctgctggccaccatgctgttcatcatgggctatgctgtgggctggggccccatcacctggctgctgatgtctgaggtgctgcccctgcgggcccggggcgtggccagcggcctgtgtgtgctggcctcctggctgacagcctttgtgctgaccaagagcttcctgcctgtggtgtccaccttcggcctgcaggtgcccttcttcttctttgctgccatctgcctggtgtccctggtgttcaccggctgctgcgtgcctgagaccaagggccgcagcctggagcagatcgagagcttcttcagaacaggccgccgctccttcctgaggtag

SEQ ID NO: 170327 - DNA, 441 bp, synthetic construct
  misc_feature 1..441: note = Description of Artificial Sequence: Synthetic coding sequence
  source 1..441: mol_type = other DNA
atgatcctgaatgacctgctgggcaggaagctgagcatcatgttttctgctgtgcccagcgctgctggctacgccctgatggccggggcccacggcctgtggatgctgctgctgggccgcaccctgactggatttgctgggggcctgacagctgcctgcatccctggcctgaccctgcccagcaggcctggcctgggcaccagcatcttcagcaagacctggtgtggcggctgtgtgctgcaggtgtatgtgtctgaaattgcccctcctggggtgcggggggccctgggcgccaccccccagctgatggctgtgtttggcagcctgagcctgtatgccctgggcaaggatgaggaggccctgcgggccctggcctggctgcggggcacagatgtggatgtgcactgggagtttgagcagatccaggacaacgtgaggtag

SEQ ID NO: 170328 - DNA, 660 bp, synthetic construct
  misc_feature 1..660: note = Description of Artificial Sequence: Synthetic coding sequence
  source 1..660: mol_type = other DNA
atgcaggagcccctgctgggcgctgagggccctgactatgacaccttccctgagaagcccccacccagccctggggaccgggcccgggtgggcaccctgcagaacaagagggtcttcctggccacctttgctgctgtgctgggcaacttctcctttggctacgccctggtgtacaccagccctgtgatcccagccctggagaggagcctggaccctgacctgcacctgaccaagagccaggcctcctggtttggcagcgtcttcaccctgggcgctgctgctgggggcctgagcgccatgatcctgaatgacctgctgggcaggaagctgagcatcatgttttctgctgtgcccagcgctgctggctacgccctgatggccggggcccacggcctgtggatgctgctgctgggccgcaccctgaccggctttgctgggggcctgacagctgcctgcatccctgtgtatgtgtctgagatcgcccctcctggggtgcggggggccctgggcgccaccccccagctgatggctgtgtttggcagcctgagcctgtatgccctgggcaccaagaggccctgtggccgctggccaggctgtgtgggccgcacctccatgagcacaggcagcagcagccgcagcaggaccaccagcggggactag

SEQ ID NO: 170329 - DNA, 1539 bp, synthetic construct
  misc_feature 1..1539: note = Description of Artificial Sequence: Synthetic coding sequence
  source 1..1539: mol_type = other DNA
atggagaacaaggaggccggcaccccaccacccatccccagccgggagggccgcctgcagcccaccctgctgctggccaccctgtctgctgccttcggcagcgccttccagtatggctacaacctgtctgtggtgaacaccccccacaaggtgttcaagagcttctacaatgagacctactttgaaagacatgccaccttcatggatggcaagctgatgctgctgctgtggagctgcaccgtgtccatgttccccctgggcggcctgctgggcagcctgctggtgggcctgctggtggacagctgtggcaggaagggcaccctgctgatcaacaacatctttgccatcatcccagccatcctgatgggcgtgtccaaggtggccaaggcctttgagctgattgtgttcagccgggtggtgctgggcgtgtgtgccggcatctcctacagcgccctgcccatgtacctgggggagctggcccccaagaacctgcggggcatggtgggcaccatgacagaggtgtttgtgattgtgggcgtcttcctggcccagatcttcagcctgcaggccatcctgggcaacccagctggctggcctgtgctgctggccctgactggagtgcctgccctgctgcagctgctgaccctgcccttcttccctgagagcccccgctacagcctcatccagaagggagatgaggccacagcccggcaggccctgcggcggctgcggggccacacagacatggaggccgagctggaggacatgagagctgaggcccgggcagagagagctgagggccacctgtctgtgctgcacctgtgtgccctgcggagcctgcgctggcagctgctgagcatcatcgtgctgatggccggccagcagctgagcggcatcaatgccatcaactactatgctgacaccatctacaccagcgctggggtggaggccgcccacagccagtatgtgacagtgggcagcggcgtggtgaacatcgtgatgaccatcaccagcgctgtgctggtggagcggctgggcagaagacacctgctgctggccggctacggcatctgtggcagcgcctgcctggtgctgactgtggtgctgctcttccagaacagagtgcctgagctgagctacctgggcatcatctgtgtgtttgcctacatcgccggccacagcatcggccccagccctgtgcccagcgtggtgaggacagagatcttcctgcagagcagccggcgggccgccttcatggtggatggagctgtgcactggctgaccaacttcatcatcggcttcctgttccccagcatccaggaggccatcggggcctacagcttcatcatctttgctggcatctgcctgctgacagccatctacatctacgtggtgattcctgagaccaagggcaagacctttgtggagatcaaccgcatctttgccaagaggaacagagtgaagctgcctgaggagaaggaggagaccattgatgctggccccccaacagccagccctgccaaggagaccagcttctag

SEQ ID NO: 170330 - DNA, 804 bp, synthetic construct
  misc_feature 1..804: note = Description of Artificial Sequence: Synthetic coding sequence
  source 1..804: mol_type = other DNA
atgacctgcagcctgggcaaggtgtacatcagcgagatcgcctacccagctgtgcggggcctgctgggcagctgtgtgcagctgatggtggtggtgggcatcctgctggcctacctggccggctgggtgctggagtggcgctggctggccgtgctgggctgtgtgccccccagcctgatgctgctgctgatgtgcttcatgcctgagaccccccgcttcctgctgacccagcaccggcggcaggaggccatggccgccctgcgcttcctgtggggcagcgagcagggctgggaggacccccccatcggggctgagcagagcttccacctggccctgctgcggcagcccggcatctacaagcccttcatcatcggcgtgtccctgatggccttccagcagctgtctggagtgaatgctgtgatgttttatgcagagaccatctttgaggaggccaagttcaaggacagcagcctggcctctgtggtggtgggcgtcatccaggtgctcttcaccgctgtggccgccctgatcatggacagagctggaagaaggctgctgctggtgctgagcggcgtggtgatggtgttcagcaccagcgcctttggagcctacttcaagctgacccagggcggccctggcaacagcagccacgtggccatcagcgcccctgtgtctgcccagcctgtggatgcctctgtgggcctggcctggctggccgtgggctccatgtgcctcttcatcgccggctttgctgtgggctggggccccatcccctggctgctgatgtctgagatcttcccctag

SEQ ID NO: 170331 - DNA, 645 bp, synthetic construct
  misc_feature 1..645: note = Description of Artificial Sequence: Synthetic coding sequence
  source 1..645: mol_type = other DNA
atggccttccagcagctgtctggagtgaatgctgtgatgttttatgcagagaccatctttgaggaggccaagttcaaggacagcagcctggcctctgtggtggtgggcgtcatccaggtgctcttcaccgctgtggccgccctgatcatggacagagctggaagaaggctgctgctggtgctgagcggcgtggtgatggtgttcagcaccagcgcctttggagcctacttcaagctgacccagggcggccctggcaacagcagccacgtggccatcagcgcccctgtgtctgcccagcctgtggatgcctctgtgggcctggcctggctggccgtgggctccatgtgcctcttcatcgccggctttgctgtgggctggggccccatcccctggctgctgatgtctgagatcttccccctgcacgtgaagggcgtggccaccggcatctgtgtgctgaccaactggctgatggccttcctggtgaccaaggagttcagcagcctgatggaggtgctgcggccctatggagccttctggctggccagcgccttctgcatcttctctgtgctcttcaccctcttctgtgtgcctgagaccaagggcaagaccctggagcagatcacagcccactttgagggccgctag

SEQ ID NO: 170332 - DNA, 1236 bp, synthetic construct
  misc_feature 1..1236: note = Description of Artificial Sequence: Synthetic coding sequence
  source 1..1236: mol_type = other DNA
atgaccccagaggaccctgaggagacccagcccctgctgggccccccaggcggcagcgccccccggggccggcgggtcttcctggccgcctttgctgctgccctgggccccctgagctttggatttgccctgggctacagcagccctgccatccccagcctgcagagagctgcccccccagccccccggctggatgatgctgctgcctcctggtttggagctgtggtgaccctgggcgctgctgctgggggcgtgctgggcggctggctggtggaccgggccggcaggaagctgagcctgctgctgtgcagcgtgccctttgtggccggctttgctgtgatcacagctgcccaggatgtgtggatgctgctgggcggccgcctgctgaccggcctggcctgtggggtggccagcctggtggcccctgtgtacatcagcgagatcgcctacccagctgtgcggggcctgctgggcagctgtgtgcagctgatggtggtggtgggcatcctgctggcctacctggccggctgggtgctggagtggcgctggctggccgtgctgggctgtgtgccccccagcctgatgctgctgctgatgtgcttcatgcctgagaccccccgcttcctgctgacccagcaccggcggcaggaggccatggccgccctgcgcttcctgtggggcagcgagcagggctgggaggacccccccatcggggctgagcagagcttccacctggccctgctgcggcagcccggcatctacaagcccttcatcattggagtgtccctgatggccttccagcagctgagcggcgtgaatgctgtgatgttttatgcagagaccatctttgaggaggccaagttcaaggacagcagcctggcctctgtggtggtgggcgtcatccaggtgctcttcaccgctgtggccgccctgatcatggaccgggccggccggcggctgctgctggtgctgtctggagtggtgatggtgttcagcaccagcgccttcggggcctacttcaagctgacccagggcggccctggcaacagcagccacgtggccatcagcgcccctgtgtctgcccagcctgtggatgcctctgtgggcctggcctggctggccgtgggctccatgtgcctcttcatcgccggcggcccccaggccctgtggagcctgctggcctgcctgcgcttcctgcacctgcagtgccccttccactttgtgctgtgcccctag

SEQ ID NO: 170333 - DNA, 1434 bp, synthetic construct
  misc_feature 1..1434: note = Description of Artificial Sequence: Synthetic coding sequence
  source 1..1434: mol_type = other DNA
atgaccccagaggaccctgaggagacccagcccctgctgggccccccaggcggcagcgccccccggggccggcgggtcttcctggccgcctttgctgctgccctgggccccctgagctttggatttgccctgggctacagcagccctgccatccccagcctgcagagagctgcccccccagccccccggctggatgatgctgctgcctcctggtttggagctgtggtgaccctgggcgctgctgctgggggcgtgctgggcggctggctggtggaccgggccggcaggaagctgagcctgctgctgtgcagcgtgccctttgtggccggctttgctgtgatcacagctgcccaggatgtgtggatgctgctgggcggccgcctgctgaccggcctggcctgtggggtggccagcctggtggcccctgtgtacatcagcgagatcgcctacccagctgtgcggggcctgctgggcagctgtgtgcagctgatggtggtggtgggcatcctgctggcctacctggccggctgggtgctggagtggcgctggctggccgtgctgggctgtgtgccccccagcctgatgctgctgctgatgtgcttcatgcctgagaccccccgcttcctgctgacccagcaccggcggcaggaggccatggccgccctgcgcttcctgtggggcagcgagcagggctgggaggacccccccatcggggctgagcagagcttccacctggccctgctgcggcagcccggcatctacaagcccttcatcattggagtgtccctgatggccttccagcagctgagcggcgtgaatgctgtgatgttttatgcagagaccatctttgaggaggccaagttcaaggacagcagcctggcctctgtggtggtgggcgtcatccaggtgctcttcaccgctgtggccgccctgatcatggaccgggccggccggcggctgctgctggtgctgtctggagtggtgatggtgttcagcaccagcgccttcggggcctacttcaagctgacccagggcggccctggcaacagcagccacgtggccatcagcgcccctgtgtctgcccagcctgtggatgcctctgtgggcctggcctggctggccgtgggctccatgtgcctcttcatcgccggctttgctgtgggctggggccccatcccctggctgctgatgtctgagatcttccccctgcacgtgaagggcgtggccaccggcatctgtgtgctgaccaactggctgatggccttcctggtgaccaaggagttcagcagcctgatggaggtgctgcggccctacggggccttctggctggccagcgccttctgcatcttctctgtgctcttcaccctcttctgtgtgcctgagaccaagggcaagaccctggagcagatcacagcccactttgagggccgctag

SEQ ID NO: 170334 - DNA, 510 bp, synthetic construct
  misc_feature 1..510: note = Description of Artificial Sequence: Synthetic coding sequence
  source 1..510: mol_type = other DNA
tgaggaagaagagtcttcctggccgcctttgctgctgccctgggccccctgagctttggatttgccctgggctacagcagccctgccatccccagcctgcagagagctgcccccccagccccccggctggatgatgctgctgcctcctggtttggagtgtacatcagcgagatcgcctacccagctgtgcggggcctgctgggcagctgtgtgcagctgatggtggtggtgggcatcctgctggcctacctggccggctgggtgctggagtggcgctggctggccgtgctgggctgtgtgccccccagcctgatgctgctgctgatgtgcttcatgcctgagaccccccgcttcctgctgacccagcaccggcggcaggaggccatggccgccctgcgcttcctgtggggcagcgagcagggctgggaggacccccccatcggggctgagcagcagctgagcggcgtgaatgctgtgatgttttatgcagagaccatctttgaggagtag

SEQ ID NO: 170335 - DNA, 771 bp, synthetic construct
  misc_feature 1..771: note = Description of Artificial Sequence: Synthetic coding sequence
  source 1..771: mol_type = other DNA
atgaccccagaggaccctgaggagacccagcccctgctgggccccccaggcggcagcgccccccggggccggcgggtcttcctggccgcctttgctgctgccctgggccccctgagctttggatttgccctgggctacagcagccctgccatccccagcctgcagagagctgcccccccagccccccggctggatgatgctgctgcctcctggtttggagtgtacatcagcgagatcgcctacccagctgtgcggggcctgctgggcagctgtgtgcagctgatggtggtggtgggcatcctgctggcctacctggccggctgggtgctggagtggcgctggctggccgtgctgggctgtgtgccccccagcctgatgctgctgctgatgtgcttcatgcctgagaccccccgcttcctgctgacccagcaccggcggcaggaggccatggccgccctgcgcttcctgtggggcagcgagcagggctgggaggacccccccatcggggctgagcagagcttccacctggccctgctgcggcagcccggcatctacaagcccttcatcatcggcgtgtccctgatggccttccagcagctgtctggagtgaatgctgtgatgttttatgcagagaccatctttgaggaggccaagttcaaggacagcagcctggcctctgtggtggtgggcgtcatccaggtgctcttcaccgctgtggccgccctgatcatggacagagctggaagaaggctgctgctggtgctgtcctag

SEQ ID NO: 170336 - DNA, 804 bp, synthetic construct; identical to SEQ ID NO: 170330
  misc_feature 1..804: note = Description of Artificial Sequence: Synthetic coding sequence
  source 1..804: mol_type = other DNA

SEQ ID NO: 170337 - DNA, 831 bp, synthetic construct
  misc_feature 1..831: note = Description of Artificial Sequence: Synthetic coding sequence
  source 1..831: mol_type = other DNA
cagctgatggtggtggtgggcatcctgctggcctacctggccggctgggtgctggagtggcgctggctggccgtgctgggctgtgtgccccccagcctgatgctgctgctgatgtgcttcatgcctgagaccccccgcttcctgctgacccagcaccggcggcaggaggccatggccgccctgcgcttcctgtggggcagcgagcagggctgggaggacccccccatcggggctgagcagagcttccacctggccctgctgcggcagcccggcatctacaagcccttcatcatcggcgtgtccctgatggccttccagcagctgtctggagtgaatgctgtgatgttttatgcagagaccatctttgaggaggccaagttcaaggacagcagcctggcctctgtggtggtgggcgtcatccaggtgctcttcaccgctgtggccgccctgatcatggacagagctggaagaaggctgctgctggtgctgagcggcgtggtgatggtgttcagcaccagcgcctttggagcctacttcaagctgacccagggcggccctggcaacagcagccacgtggccatcagcgcccctgtgtctgcccagcctgtggatgcctctgtgggcctggcctggctggccgtgggctccatgtgcctcttcatcgccggctttgctgtgggctggggccccatcccctggctgctgatgtctgagatcttccccctgcacgtgaagggcgtggccaccggcatctgtgtgctgaccaactggctgatggccttcctggtgaccaaggagttcagcagcctgatgctgctgctgctgctgtag

SEQ ID NO: 170338 - DNA, 726 bp, synthetic construct
  misc_feature 1..726: note = Description of Artificial Sequence: Synthetic coding sequence
  source 1..726: mol_type = other DNA
atgacctgcagcctgggcaaggtgtacatcagcgagatcgcctacccagctgtgcggggcctgctgggcagctgtgtgcagctgatggtggtggtgggcatcctgctggcctacctggccggctgggtgctggagtggcgctggctggccgtgctgggctgtgtgccccccagcctgatgctgctgctgatgtgcttcatgcctgagaccccccgcttcctgctgacccagcaccggcggcaggaggccatggccgccctgcgcttcctgtggggcagcgagcagggctgggaggacccccccatcggggctgagcagcagctgtctggagtgaatgctgtgatgttttatgcagagaccatctttgaggaggccaagttcaaggacagcagcctggcctctgtggtggtgggcgtcatccaggtgctcttcaccgctgtggccgccctgatcatggacagagctggaagaaggctgctgctggtgctgagcggcgtggtgatggtgttcagcaccagcgcctttggagcctacttcaagctgacccagggcggccctggcaacagcagccacgtggccatcagcgcccctgtgtctgcccagcctgtggatgcctctgtgggcctggcctggctggccgtgggctccatgtgcctcttcatcgccggctttgctgtgggctggggccccatcccctggctgctgatgtctgagatcttcccctag

SEQ ID NO: 170339 - DNA, 798 bp, synthetic construct
  misc_feature 1..798: note = Description of Artificial Sequence: Synthetic coding sequence
  source 1..798: mol_type = other DNA
atggtggtggtgggcatcctgctggcctacctggccggctgggtgctggagtggcgctggctggccgtgctgggctgtgtgccccccagcctgatgctgctgctgatgtgcttcatgcctgagaccccccgcttcctgctgacccagcaccggcggcaggaggccatggccgccctgcgcttcctgtggggcagcgagcagggctgggaggacccccccatcggggctgagcagagcttccacctggccctgctgcggcagcccggcatctacaagcccttcatcatcggcgtgtccctgatggccttccagcagctgtctggagtgaatgctgtgatgttttatgcagagaccatctttgaggaggccaagttcaaggacagcagcctggcctctgtggtggtgggcgtcatccaggtgctcttcaccgctgtggccgccctgatcatggacagagctggaagaaggctgctgctggtgctgagcggcgtggtgatggtgttcagcaccagcgcctttggagcctacttcaagctgacccagggcggccctggcaacagcagccacgtggccatcagcgcccctgtgtctgcccagcctgtggatgcctctgtgggcctggcctggctggccgtgggctccatgtgcctcttcatcgccggctttgctgtgggctggggccccatcccctggctgctgatgtctgagatcttccccctgcacgtgaagggcgtggccaccggcatctgtgtgctgaccaactggctgatggccttcctggtgaccaaggagttctag

SEQ ID NO: 170340 - DNA, 1623 bp, synthetic construct
  misc_feature 1..1623: note = Description of Artificial Sequence: Synthetic coding sequence
  source 1..1623: mol_type = other DNA
atggccaggaagcagaacagaaacagcaaggagctgggcctggtgcccctgacagatgacaccagccacgccggccccccaggccctggccgggccctgctggagtgtgaccacctgcggtctggagtgcctgggggcagaagaaggaaggactggagctgcagcctgctggtggccagcctggccggggccttcggcagcagcttcctgtatggctacaacctgtctgtggtgaatgcccccaccccctacatcaaggccttctacaatgaatcctgggagaggagacatggccggcccattgatcctgacaccctgaccctgctgtggagcgtgacagtgtccatctttgccatcggcggcctggtgggcaccctgattgtgaagatgattggcaaggtgctgggcaggaagcacaccctgctggccaacaatggatttgccatctctgctgccctgctgatggcctgcagcctgcaggccggggcctttgagatgctgattgtgggccgcttcatcatgggcattgatggaggagtggccctgtctgtgctgcccatgtacctgtctgagatcagccccaaggagatccggggcagcctgggccaggtgacagccatcttcatctgcattggagtcttcaccggccagctgctgggcctgcctgagctgctgggcaaggagagcacctggccctacctgtttggagtcatcgtggtgcctgctgtggtgcagctgctgagcctgcccttcctgcctgacagcccccgctacctgctgctggagaagcacaatgaggcccgggctgtgaaggccttccagaccttcctgggcaaggcagatgtgtcccaggaggtggaggaggtgctggccgagagccgggtgcagaggagcatccggctggtgtctgtgctggagctgctgcgggccccctacgtgcgctggcaggtggtgacagtgattgtgaccatggcctgctaccagctgtgtggcctgaatgccatctggttctacaccaacagcatctttgggaaggccggcatccccccagccaagatcccctacgtgaccctgagcactggaggcatcgagaccctggccgctgtgttttctggcctggtgattgagcacctgggccggcggcccctgctgattggaggcttcggcctgatgggcctcttcttcggcaccctgaccatcaccctgaccctgcaggaccacgccccctgggtgccctacctgagcatcgtgggcatcctggccatcatcgccagcttctgcagcggccctgggggcatccccttcatcctgaccggggagttcttccagcagagccagaggcctgctgccttcatcatcgccggcaccgtgaactggctgagcaactttgctgtgggcctgctcttccccttcatccagaagagcctggacacctactgcttcctggtgtttgccaccatctgcatcaccggggccatctacctgtactttgtgctgcctgagaccaagaacagaacctacgccgagatcagccaggccttcagcaagaggaacaaggcctacccacctgaggagaagattgattctgctgtgacagatggcaagatcaatggccggccctag

SEQ ID NO: 170341 - DNA, 1536 bp, synthetic construct
  misc_feature 1..1536: note = Description of Artificial Sequence: Synthetic coding sequence
  source 1..1536: mol_type = other DNA
atgaagctgagcaagaaggacagaggagaagatgaggagagtgacagcgccaagaagaagctggactggagctgcagcctgctggtggccagcctggccggggccttcggcagcagcttcctgtatggctacaacctgtctgtggtgaatgcccccaccccctacatcaaggccttctacaatgaatcctgggagcggcggcacggccggcccatcgaccctgacaccctgaccctgctgtggagcgtgacagtgtccatctttgccatcggcggcctggtgggcaccctcatcgtgaagatgattggcaaggtgctgggcaggaagcacaccctgctggccaacaacggctttgccatctctgctgccctgctgatggcctgcagcctgcaggccggggcctttgagatgctgattgtgggccgcttcatcatgggcattgatggcggcgtggccctgtctgtgctgcccatgtacctgtctgagatcagccccaaggagatccggggcagcctgggccaggtgacagccatcttcatctgcatcggggtcttcaccggccagctgctgggcctgcctgagctgctgggcaaggagagcacctggccctacctgtttggagtgattgtggtgcctgctgtggtgcagctgctgagcctgcccttcctgcctgacagcccccgctacctgctgctggagaagcacaatgaggcccgggctgtgaaggccttccagaccttcctgggcaaggcagatgtgtcccaggaggtggaggaggtgctggccgagagccgggtgcagaggagcatccggctggtgtctgtgctggagctgctgcgggccccctacgtgcgctggcaggtggtgaccgtcatcgtgaccatggcctgctaccagctgtgtggcctgaatgccatctggttctacaccaacagcatctttgggaaggccggcatccccccagccaagatcccctacgtgaccctgagcactggaggcatcgagaccctggccgctgtgttcagcggcctggtgattgagcacctgggcagaagacccctgctgattggaggcttcggcctgatgggcctcttcttcggcaccctgaccatcaccctgaccctgcaggaccacgccccctgggtgccctacctgagcatcgtgggcatcctggccatcatcgccagcttctgcagcggccctgggggcatccccttcatcctgactggagagttcttccagcagagccagaggcctgctgccttcatcatcgccggcaccgtgaactggctgagcaactttgctgtgggcctgctcttccccttcatccagaagagcctggacacctactgcttcctggtgtttgccaccatctgcatcactggagccatctacctgtactttgtgctgcctgagaccaagaacagaacctatgcagagatcagccaggccttcagcaagaggaacaaggcctacccacctgaggagaagattgacagcgctgtgacagatggcaagatcaatggccggccctag

SEQ ID NO: 170342 - DNA, 1536 bp, synthetic construct; identical to SEQ ID NO: 170341
  misc_feature 1..1536: note = Description of Artificial Sequence: Synthetic coding sequence
  source 1..1536: mol_type = other DNA

SEQ ID NO: 170343 - DNA, 597 bp, synthetic construct
  misc_feature 1..597: note = Description of Artificial Sequence: Synthetic coding sequence
  source 1..597: mol_type = other DNA
atgaagctgagcaagaaggacagaggagaagatgaggagagtgacagcgccaagaagaagctggactggagctgcagcctgctggtggccagcctggccggggccttcggcagcagcttcctgtatggctacaacctgtctgtggtgaatgcccccaccccctacatcaaggccttctacaatgaatcctgggagcggcggcacggccggcccatcgaccctgacaccctgaccctgctgtggagcgtgacagtgtccatctttgccatcggcggcctggtgggcaccctcatcgtgaagatgattggcaaggtgctgggcaggaagcacaccctgctggccaacaacggctttgccatctctgctgccctgctgatggcctgcagcctgcaggccggggcctttgagatgctgattgtgggccgcttcatcatgggcattgatggcggcgtggccctgtctgtgctgcccatgtacctgtctgagatcagccccaaggagatccggggcagcctgggccaggtgacagccatcttcatctgcatcggggtcttcaccggccagctgctgggcctgcctgagctgctgggcaagtag

SEQ ID NO: 170344 - DNA, 735 bp, synthetic construct
  misc_feature 1..735: note = Description of Artificial Sequence: Synthetic coding sequence
  source 1..735: mol_type = other DNA
atggagcagcaggaccagagcatgaaggagggccgcctgaccctggtgctggccctggccaccctgattgctgccttcggcagcagcttccagtatggctacaacgtggccgctgtgaacagccctgccctgctgatgcagcagttctacaatgagacctactacggccgcactggagagttcatggaggacttccccctgaccctgctgtggagcgtgacagtgtccatgttcccctttggaggcttcatcggcagcctgctggtgggccccctggtgaacaagtttggaagaaaaggagccctgctcttcaacaacatcttcagcatcgtgcctgccatcctgatgggctgcagccgggtggccaccagctttgagctgatcatcatcagccggctgctggtgggcatctgtgccggcgtgagcagcaatgtggtgcccatgtacctgggggagctggcccccaagaacctgcggggggccctgggcgtggtgccccagctgttcatcaccgtgggcatcctggtggcccagatcttcggcctgaggaacctgctggccaacgtggatggagagttccgcaccagccgggagcacccccaccccttcaccaccaccctgggccccctgctggtgttccagagccaccaccacaggacaggcctgtctgctgactggagcctgctgaccggctggatgagcctgggcggccccagctgcccagagcccacctag

SEQ ID NO: 170345 - DNA, 1506 bp, synthetic construct
  misc_feature 1..1506: note = Description of Artificial Sequence: Synthetic coding sequence
  source 1..1506: mol_type = other DNA
atggagcagcaggaccagagcatgaaggagggccgcctgaccctggtgctggccctggccaccctgattgctgccttcggcagcagcttccagtatggctacaacgtggccgctgtgaacagccctgccctgctgatgcagcagttctacaatgagacctactacggccgcactggagagttcatggaggacttccccctgaccctgctgtggagcgtgacagtgtccatgttcccctttggaggcttcatcggcagcctgctggtgggccccctggtgaacaagtttggaagaaaaggagccctgctcttcaacaacatcttcagcatcgtgcctgccatcctgatgggctgcagccgggtggccaccagctttgagctgatcatcatcagccggctgctggtgggcatctgtgccggcgtgagcagcaatgtggtgcccatgtacctgggggagctggcccccaagaacctgcggggggccctgggcgtggtgccccagctgttcatcaccgtgggcatcctggtggcccagatcttcggcctgaggaacctgctggccaacgtggatggctggcccatcctgctgggcctgactggagtgcctgctgccctgcagctgctgctgctgcccttcttccctgagagcccccgctacctgctgatccagaagaaggatgaggccgccgccaagaaggccctgcagaccctgcggggctgggacagcgtggaccgggaggtggccgagatccggcaggaggatgaggccgagaaggccgccggcttcatctctgtgctgaagctgttcaggatgaggagcctgcgctggcagctgctgagcatcatcgtgctgatgggcggccagcagctgtctggagtgaatgccatctactactatgctgaccagatctacctgtctgctggggtgcctgaggagcacgtgcagtatgtgacagctggcactggagctgtgaatgtggtgatgaccttctgtgctgtgtttgtggtggagctgctgggccgccgcctgctgctgctgctgggcttcagcatctgcctgattgcctgctgcgtgctgacagctgccctggccctgcaggacacagtgtcctggatgccctacatcagcatcgtgtgtgtgatctcctatgtgattggacatgccctgggccccagccccatcccagccctgctgatcacagagatcttcctgcagagcagccggcccagcgccttcatggtgggcggctctgtgcactggctgagcaacttcaccgtgggcctcatcttccccttcatccaggagggcctgggcccctacagcttcatcgtgtttgctgtgatctgcctgctgaccaccatctacatcttcctgattgtgcctgagaccaaggccaagaccttcatcgagatcaaccagatcttcaccaagatgaacaaggtgtctgaggtgtacccagagaaggaggagctgaaggagctgccccctgtgaccagcgagcagtag

SEQ ID NO: 170346 - DNA, 1455 bp, synthetic construct
  misc_feature 1..1455: note = Description of Artificial Sequence: Synthetic coding sequence
  source 1..1455: mol_type = other DNA
atggagcagcaggaccagagcatgaaggagggccgcctgaccctggtgctggccctggccgctgtgaacagccctgccctgctgatgcagcagttctacaatgagacctactacggccgcactggagagttcatggaggacttccccctgaccctgctgtggagcgtgacagtgtccatgttcccctttggaggcttcatcggcagcctgctggtgggccccctggtgaacaagtttggaaggaagggggccctgctcttcaacaacatcttcagcatcgtgcctgccatcctgatgggctgcagccgggtggccaccagctttgagctgatcatcatcagccggctgctggtgggcatctgtgccggcgtgagcagcaatgtggtgcccatgtacctgggggagctggcccccaagaacctgcggggggccctgggcgtggtgccccagctgttcatcaccgtgggcatcctggtggcccagatcttcggcctgaggaacctgctggccaacgtggatggctggcccatcctgctgggcctgactggagtgcctgctgccctgcagctgctgctgctgcccttcttccctgagagcccccgctacctgctgatccagaagaaggatgaagctgctgccaagaaggccctgcagaccctgcggggctgggacagcgtggaccgggaggtggccgagatccggcaggaggatgaagctgagaaggctgctggcttcatctctgtgctgaagctgttcaggatgaggagcctgcgctggcagctgctgagcatcatcgtgctgatgggcggccagcagctgagcggcgtgaatgccatctactactatgctgaccagatctacctgtctgctggggtgcctgaggagcacgtgcagtatgtgacagctggcaccggggctgtgaatgtggtgatgaccttctgtgctgtgtttgtggtggagctgctgggccggcggctgctgctgctgctgggcttcagcatctgcctgattgcctgctgcgtgctgacagctgccctggccctgcaggacacagtgtcctggatgccctacatcagcatcgtgtgtgtgatctcctatgtgattggccacgccctgggccccagccccatcccagccctgctgatcacagagatcttcctgcagagcagccggcccagcgccttcatggtgggcggctctgtgcactggctgagcaacttcaccgtgggcctcatcttccccttcatccaggagggcctgggcccctacagcttcatcgtgtttgctgtgatctgcctgctgaccaccatctacatcttcctgattgtgcctgagaccaaggccaagaccttcatcgagatcaaccagatcttcaccaagatgaacaaggtgtctgaggtgtacccagagaaggaggagctgaaggagctgccccctgtgaccagcgagcagtag

SEQ ID NO: 170347 - DNA, 1161 bp, synthetic construct
  misc_feature 1..1161: note = Description of Artificial Sequence: Synthetic coding sequence
  source 1..1161: mol_type = other DNA
atgggctgcagccgggtggccaccagctttgagctgatcatcatcagccggctgctggtgggcatctgtgccggcgtgagcagcaatgtggtgcccatgtacctgggggagctggcccccaagaacctgcggggggccctgggcgtggtgccccagctgttcatcaccgtgggcatcctggtggcccagatcttcggcctgaggaacctgctggccaacgtggatggctggcccatcctgctgggcctgactggagtgcctgctgccctgcagctgctgctgctgcccttcttccctgagagcccccgctacctgctgatccagaagaaggatgaagctgctgccaagaaggccctgcagaccctgcggggctgggacagcgtggaccgggaggtggccgagatccggcaggaggatgaagctgagaaggctgctggcttcatctctgtgctgaagctgttcaggatgaggagcctgcgctggcagctgctgagcatcatcgtgctgatgggcggccagcagctgagcggcgtgaatgccatctactactatgctgaccagatctacctgtctgctggggtgcctgaggagcacgtgcagtatgtgacagctggcaccggggctgtgaatgtggtgatgaccttctgtgctgtgtttgtggtggagctgctgggccggcggctgctgctgctgctgggcttcagcatctgcctgattgcctgctgcgtgctgacagctgccctggccctgcaggacacagtgtcctggatgccctacatcagcatcgtgtgtgtgatctcctatgtgattggccacgccctgggccccagccccatcccagccctgctgatcacagagatcttcctgcagagcagccggcccagcgccttcatggtgggcggctctgtgcactggctgagcaacttcaccgtgggcctcatcttccccttcatccaggagggcctgggcccctacagcttcatcgtgtttgctgtgatctgcctgctgaccaccatctacatcttcctgattgtgcctgagaccaaggccaagaccttcatcgagatcaaccagatcttcaccaagatgaacaaggtgtctgaggtgtacccagagaaggaggagctgaaggagctgccccctgtgaccagcgagcagtag

SEQ ID NO: 170348 - DNA, 1329 bp, synthetic construct
  misc_feature 1..1329: note = Description of Artificial Sequence: Synthetic coding sequence
  source 1..1329: mol_type = other DNA
atgctggagctgcacagcctgacagccagcagcatcatgagggtgctgatcatgagggcccccctgcgggaggcccctcctgagaagtttgccctgctgctgagcggcagccctgggaagggggccctgctcttcaacaacatcttcagcatcgtgcctgccatcctgatgggctgcagccgggtggccaccagctttgagctgatcatcatcagccggctgctggtgggcatctgtgccggcgtgagcagcaatgtggtgcccatgtacctgggggagctggcccccaagaacctgcggggggccctgggcgtggtgccccagctgttcatcaccgtgggcatcctggtggcccagatcttcggcctgaggaacctgctggccaacgtggatggctggcccatcctgctgggcctgactggagtgcctgctgccctgcagctgctgctgctgcccttcttccctgagagcccccgctacctgctgatccagaagaaggatgaagctgctgccaagaaggccctgcagaccctgcggggctgggacagcgtggaccgggaggtggccgagatccggcaggaggatgaagctgagaaggctgctggcttcatctctgtgctgaagctgttcaggatgaggagcctgcgctggcagctgctgagcatcatcgtgctgatgggcggccagcagctgagcggcgtgaatgccatctactactatgctgaccagatctacctgtctgctggggtgcctgaggagcacgtgcagtatgtgacagctggcaccggggctgtgaatgtggtgatgaccttctgtgctgtgtttgtggtggagctgctgggccggcggctgctgctgctgctgggcttcagcatctgcctgattgcctgctgcgtgctgacagctgccctggccctgcaggacacagtgtcctggatgccctacatcagcatcgtgtgtgtgatctcctatgtgattggccacgccctgggccccagccccatcccagccctgctgatcacagagatcttcctgcagagcagccggcccagcgccttcatggtgggcggctctgtgcactggctgagcaacttcaccgtgggcctcatcttccccttcatccaggagggcctgggcccctacagcttcatcgtgtttgctgtgatctgcctgctgaccaccatctacatcttcctgattgtgcctgagaccaaggccaagaccttcatcgagatcaaccagatcttcaccaagatgaacaaggtgtctgaggtgtacccagagaaggaggagctgaaggagctgccccctgtgaccagcgagcagtag

SEQ ID NO: 170349 - DNA, 2040 bp, synthetic construct
  misc_feature 1..2040: note = Description of Artificial Sequence: Synthetic coding sequence
  source 1..2040: mol_type = other DNA
atggccaccctcatcaccagcaccacagctgccacagctgccagcggccccctggtggactacctgtggatgctgatcctgggcttcatcatcgcctttgtgctggccttctctgtgggcgccaatgatgtggccaacagctttggaacagctgtgggcagcggcgtggtgaccctgaagcaggcctgcatcctggccagcatctttgaaacagtgggctctgtgctgctgggcgccaaggtgtctgagaccatcaggaagggcctgattgatgtggagatgtacaacagcacccagggcctgctgatggccggctctgtgtctgccatgtttggatctgctgtgtggcagctggtggccagcttcctgaagctgcccatcagcggcacccactgcatcgtgggcgccaccatcggcttcagcctggtggccaagggccaggagggcgtgaagtggagcgagctgatcaagatcgtgatgtcctggtttgtgagccccctgctgagcggcatcatgagcggcatcctcttcttcctggtgcgggccttcatcctgcacaaggctgaccctgtgcccaacggcctgcgggccctgcctgtgttctacgcctgcaccgtgggcatcaacctcttcagcatcatgtacaccggggcccccctgctgggctttgacaagctgcccctgtggggcaccatcctgatctctgtgggctgtgctgtgttctgtgccctgattgtgtggttctttgtgtgccccaggatgaagaggaagattgaaagagagatcaagtgcagccccagcgagagccccctgatggagaagaagaacagcctgaaggaggaccacgaggagaccaagctgtctgtgggggacatcgagaacaagcaccctgtgtctgaggtgggccctgccaccgtgcccctgcaggccgtggtggaggagaggacagtgtccttcaagctgggggacctggaggaggcccctgagcgggagcggctgcccagcgtggacctgaaggaggagaccagcattgacagcacagtgaatggagctgtgcagctgcccaacggcaacctggtgcagttcagccaggccgtgagcaaccagatcaacagcagcggccactaccagtaccacacagtgcacaaggacagcggcctgtacaaggagctgctgcacaagctgcacctggccaaggtgggggactgcatgggagacagcggggacaagcccctgcggaggaacaacagctacaccagctacaccatggccatctgtggcatgcccctggacagcttccgggccaaggagggggagcagaagggggaggagatggagaagctgacctggcccaatgctgacagcaagaagaggatccgcatggacagctacaccagctactgcaatgctgtgtctgacctgcacagcgccagcgagattgacatgtctgtgaaggccgagatgggcctgggggacaggaagggcagcaatggcagcctggaggagtggtatgaccaggacaagccagaggtgtccctgctcttccagttcctgcagatcctgacagcctgcttcggcagctttgcccacggcggcaatgatgtgtccaatgccatcggccccctggtggccctgtacctggtgtatgacacaggagatgtgagcagcaaggtggccacccccatctggctgctgctgtatggaggagtgggcatctgtgtgggcctgtgggtgtggggcagaagagtcatccagaccatgggcaaggacctgacccccatcacccccagcagcggcttcagcattgagctggccagcgccctgactgtggtgattgccagcaacatcggcctgcccatcagcaccacccactgcaaggtgggctctgtggtgtctgtgggctggctgcggagcaagaaggctgtggactggaggctcttcaggaacatcttcatggcctggtttgtgacagtgcccatctctggagtcatctctgctgccatcatggccatcttccgctacgtgatcctgaggatgtag

SEQ ID NO: 170350 - DNA, 1137 bp, synthetic construct
  misc_feature 1..1137: note = Description of Artificial Sequence: Synthetic coding sequence
  source 1..1137: mol_type = other DNA
atgggcaaccccagcgtgccccggggcggcttcacccagtactgccggggcctgctgccctggggcttccaggatgcccccttctacctgctggtgctgggctttgacaagctgcccctgtggggcaccatcctgatctctgtgggctgtgctgtgttctgtgccctgattgtgtggttctttgtgtgccccaggatgaagaggaagattgaaagagagatcaagtgcagccccagcgagagccccctgatggagaagaagaacagcctgaaggaggaccacgaggagaccaagctgtctgtgggggacatcgagaacaagcaccctgtgtctgaggtgggccctgccaccgtgcccctgcaggccgtggtggaggagaggacagtgtccttcaagctgggggacctggaggaggcccctgagcgggagcggctgcccagcgtggacctgaaggaggagaccagcattgacagcacagtgaatggagctgtgcagctgcccaacggcaacctggtgcagttcagccaggccgtgagcaaccagatcaacagcagcggccactaccagtaccacacagtgcacaaggacagcggcctgtacaaggagctgctgcacaagctgcacctggccaaggtgggggactgcatgggagacagcggggacaagcccctgcggaggaacaacagctacaccagctacaccatggccatctgtggcatgcccctggacagcttccgggccaaggagggggagcagaagggggaggagatggagaagctgacctggcccaatgctgacagcaagaagaggatccgcatggacagctacaccagctactgcaatgctgtgtctgacctgcacagcgccagcgagattgacatgtctgtgaaggccgagatgggcctgggggacaggaagggcagcaatggcagcctggaggagtggtatgaccaggacaagccagaggtgtccctgctcttccagttcctgcagatcctgacagcctgcttcggcagctttgcccacggcggcaatgatgtgtccaatgccatcggccccctggtggccctgtacctggtgtatgacacaggagatgtgagcagcaaggtggccacccccatctggctgctgtgctag

SEQ ID NO: 170351 - DNA, 1959 bp, synthetic construct
  misc_feature 1..1959: note = Description of Artificial Sequence: Synthetic coding sequence
  source 1..1959: mol_type = other DNA
atggccatggatgagtacctgtggatggtgatcctgggcttcatcatcgccttcatcctggccttctctgtgggcgccaatgatgtggccaacagctttggaacagctgtgggcagcggcgtggtgaccctgcggcaggcctgcatcctggccagcatctttgagaccactggatctgtgctgctgggcgccaaggtgggggagaccatcaggaagggcatcattgatgtgaacctgtacaatgaaacagtggagaccctgatggccggggaggtgtctgccatggtgggcagcgctgtgtggcagctgattgccagcttcctgcggctgcccatcagcggcacccactgcatcgtgggcagcaccatcggcttcagcctggtggccatcggcaccaagggcgtgcagtggatggagctggtgaagatcgtggcctcctggttcatcagccccctgctgagcggcttcatgagcggcctgctgtttgtgctgatccgcatcttcatcctgaagaaggaggaccctgtgcccaacggcctgcgggccctgcccgtcttctacgccgccaccatcgccatcaacgtgttcagcatcatgtacacaggagcccctgtgctgggcctggtgctgcccatgtgggccatcgccctgatcagctttggagtggccctgctgtttgccttctttgtgtggctgtttgtgtgcccctggatgaggaggaagatcaccgggaagctgcagaaggagggcgccctgagccgggtgtctgatgagagcctgagcaaggtgcaggaggccgagagccctgtgttcaaggagctgcccggggccaaggccaatgatgacagcaccatccccctgaccggggctgctggggagaccctgggcaccagcgagggcaccagcgctggcagccaccccagggctgcctacggccgggccctgtccatgacccacggctctgtgaagagccccatcagcaatggcacctttggatttgatggccacaccaggagtgatggccacgtgtaccacacagtgcacaaggacagcggcctgtacaaggacctgctgcacaagatccacatcgaccggggccctgaggagaagccagcccaggagagcaactaccgcctgctgcggaggaacaacagctacacctgctacacagctgccatctgtggcctgcctgtgcacgccaccttccgggctgctgacagcagcgccccagaagattctgagaagctggtgggggacacagtgtcctacagcaagaagaggctgcgctatgacagctacagcagctactgcaatgctgtggccgaggccgagattgaagctgaggagggcggcgtggagatgaagctggccagcgagctggccgaccctgaccagccccgggaggaccctgctgaggaggagaaggaggagaaggatgcccctgaggtgcacctgctcttccacttcctgcaggtgctgacagcctgcttcggcagctttgcccacggcggcaatgatgtgtccaatgccatcggccccctggtggccctgtggctgatctacaagcagggcggcgtgacccaggaggccgccacccctgtgtggctgctcttctatggaggagtgggcatctgcaccggcctgtgggtgtggggcagaagagtcatccagaccatgggcaaggacctgacccccatcacccccagcagcggcttcaccatcgagctggccagcgccttcaccgtggtgattgccagcaacatcggcctgcctgtgtccaccacccactgcaaggtgggctctgtggtggccgtgggctggatccgcagcaggaaggctgtggactggaggctcttcaggaacatctttgtggcctggtttgtgacagtgcctgtggccggcctcttctctgctgctgtgatggccctgctgatgtatggcatcctgccctacgtgtag

SEQ ID NO: 170352 - DNA, 216 bp, synthetic construct
  misc_feature 1..216: note = Description of Artificial Sequence: Synthetic coding sequence
  source 1..216: mol_type = other DNA
atggccatggatgagtacctgtggatggtgatcctgggcttcatcatcgccttcatcctggccttctctgtgggcgccaatgatgtggccaacagctttggaacagctgtgggcagcggcgtggtgaccctgcggcaggcctgcatcctggccagcatctttgagaccactggatctgtgctgctgggcgccaaggtgggggagaccatcagatag

SEQ ID NO: 170353 - DNA, 87 bp, synthetic construct
  misc_feature 1..87: note = Description of Artificial Sequence: Synthetic coding sequence
  source 1..87: mol_type = other DNA
atggccatggatgagtacctgtggatggtgatcctgggcttcatcatcgccttcatcctggccttctctgtgggcgccaatgactag

SEQ ID NO: 170354 - DNA, 237 bp, synthetic construct
  misc_feature 1..237: note = Description of Artificial Sequence: Synthetic coding sequence
  source 1..237: mol_type = other DNA
atggccatggatgagtacctgtggatggtgatcctgggcttcatcatcgccttcatcctggccttctctgtgggcgccaatgatgtggccaacagctttggaacagctgtgggcagcggcgtggtgaccctgcggcaggcctgcatcctggccagcatctttgagaccactggatctgtgctgctgggcgccaaggtgggggagaccatcaggaagggcatcattgatgtgaactag

SEQ ID NO: 170355 - DNA, 1959 bp, synthetic construct; identical to SEQ ID NO: 170351
  misc_feature 1..1959: note = Description of Artificial Sequence: Synthetic coding sequence
  source 1..1959: mol_type = other DNA

SEQ ID NO: 170356 - DNA, 1959 bp, synthetic construct; identical to SEQ ID NO: 170351
  misc_feature 1..1959: note = Description of Artificial Sequence: Synthetic coding sequence
  source 1..1959: mol_type = other DNA

SEQ ID NO: 170357 - DNA, 144 bp, synthetic construct
  misc_feature 1..144: note = Description of Artificial Sequence: Synthetic coding sequence
  source 1..144: mol_type = other DNA
atggccatggatgagtacctgtggatggtgatcctgggcttcatcatcgccttcatcctggccttctctgtgggcgccaatgatgtggccaacagctttggaacagctgtgggcagcggcgtggtgaccctgcggcaggcctag

SEQ ID NO: 170358 - DNA, 1260 bp, synthetic construct
  misc_feature 1..1260: note = Description of Artificial Sequence: Synthetic coding sequence
  source 1..1260: mol_type = other DNA
atggcccagagcatcttcatggccggcatcctgattggaggcctggtgctgggggacctgagtgaccgcttcggccggcggcccatcctgacctgcagctacctgctgctggccgccagcggcagcggggccgccttcagccccaccttccccatctacatggtgttccgcttcctgtgtggcttcggcatcagcggcatcaccctgagcaccgtcatcctgaatgtggagtgggtgcccaccaggatgagggccatcatgagcacagccctgggctactgctacaccttcggccagttcatcctgcccggcctggcctatgccatcccccagtggcgctggctgcagctgactgtgtccatccccttctttgtgttcttcctgagctcctggtggaccccagagagcatccgctggctggtgctgagcggcaagagcagcaaggccctgaagatcctgcggcgggtggccgtgttcaacgggaagaaggaggagggggagcggctgagcctggaggagctgaagctgaacctgcagaaggagatcagcctggccaaggccaagtacacagccagtgacctcttccgcatccccatgctgcggaggatgaccttctgcctgagcctggcctggtttgccaccggctttgcctactacagcctggccatgggcgtggaggagtttggagtgaacctgtacatcctgcagatcatctttggaggagtggatgtgcctgccaagttcatcaccatcctgagcctgagctacctgggccgccacaccacccaggccgccgccctgctgctggccggcggggccatcctggccctgacctttgtgcccctggacctgcagacagtgaggacagtgctggccgtgtttgggaagggctgcctgagcagcagcttcagctgcctcttcctgtacaccagcgagctgtaccccaccgtcatccggcagacaggcatgggcgtgagcaacctgtggaccagggtgggctccatggtgagccccctggtgaagatcactggagaggtgcagcccttcatccccaacatcatctacggcatcacagccctgctgggcggcagcgctgccctcttcctgcctgagaccctgaaccagcccctgcctgagaccatcgaggacctggagaactggagcctgcgggccaagaagcccaagcaggagcctgaggtggagaaggccagccagaggatccccctgcagccccacggccctggcctgggcagcagctag

SEQ ID NO: 170359 - DNA, 1356 bp, synthetic construct
  misc_feature 1..1356: note = Description of Artificial Sequence: Synthetic coding sequence
  source 1..1356: mol_type = other DNA
atggagccctgcctggatggctgggtgtacaacagcaccaaggacagcatcgtgacagagtgggacctggtgtgcaacagcaacaagctgaaggagatggcccagagcatcttcatggccggcatcctgattggaggcctggtgctgggggacctgagtgaccgcttcggccggcggcccatcctgacctgcagctacctgctgctggccgccagcggcagcggggccgccttcagccccaccttccccatctacatggtgttccgcttcctgtgtggcttcggcatcagcggcatcaccctgagcaccgtcatcctgaatgtggagtgggtgcccaccaggatgagggccatcatgagcacagccctgggctactgctacaccttcggccagttcatcctgcccggcctggcctatgccatcccccagtggcgctggctgcagctgactgtgtccatccccttctttgtgttcttcctgagctcctggtggaccccagagagcatccgctggctggtgctgagcggcaagagcagcaaggccctgaagatcctgcggcgggtggccgtgttcaacgggaagaaggaggagggggagcggctgagcctggaggagctgaagctgaacctgcagaaggagatcagcctggccaaggccaagtacacagccagtgacctcttccgcatccccatgctgcggaggatgaccttctgcctgagcctggcctggtttgccaccggctttgcctactacagcctggccatgggcgtggaggagtttggagtgaacctgtacatcctgcagatcatctttggaggagtggatgtgcctgccaagttcatcaccatcctgagcctgagctacctgggccgccacaccacccaggccgccgccctgctgctggccggcggggccatcctggccctgacctttgtgcccctggacctgcagacagtgaggacagtgctggccgtgtttgggaagggctgcctgagcagcagcttcagctgcctcttcctgtacaccagcgagctgtaccccaccgtcatccggcagacaggcatgggcgtgagcaacctgtggaccagggtgggctccatggtgagccccctggtgaagatcactggagaggtgcagcccttcatccccaacatcatctacggcatcacagccctgctgggcggcagcgctgccctcttcctgcctgagaccctgaaccagcccctgcctgagaccatcgaggacctggagaactggagcctgcgggccaagaagcccaagcaggagcctgaggtggagaaggccagccagaggatccccctgcagccccacggccctggcctgggcagcagctag

SEQ ID NO: 170360 - DNA, 1653 bp, synthetic construct
  misc_feature 1..1653: note = Description of Artificial Sequence: Synthetic coding sequence
  source 1..1653: mol_type = other DNA
atggccttcaatgacctgctgcagcaggtgggcggcgtgggccgcttccagcagatccaggtgaccctggtggtgctgcccctgctgctgatggccagccacaacaccctgcagaacttcaccgctgccatccccacccaccactgccggcccccagcagatgccaacctgagcaagaatggaggcctggaggtgtggctgccccgggaccggcagggccagcctgagagctgcctgcgcttcaccagcccccagtggggcctgcccttcctgaatggaacagaggccaatggaactggagccacagagccctgcacagatggctggatctatgacaacagcaccttccccagcaccatcgtgacagagtgggacctggtgtgcagccaccgggccctgcggcagctggcccagagcctgtacatggtgggcgtgctgctgggcgccatggtgtttggctacctggccgaccggctgggccgcaggaaggtgctgatcctgaactacctgcagacagctgtgtctggcacctgtgccgcctttgcccccaacttccccatctactgtgccttccggctgctgagcggcatggccctggccggcatcagcctgaactgcatgaccctgaatgtggagtggatgcccatccacacccgggcctgtgtgggcaccctcatcggctacgtgtacagcctgggccagttcctgctggccggcgtggcctatgctgtgccccactggaggcacctgcagctgctggtgtctgcccccttctttgccttcttcatctacagctggttcttcattgaaagtgcccgctggcacagcagcagcggccgcctggacctgaccctgcgggccctgcagagggtggcccgcatcaatggcaagcgggaggagggcgccaagctgtccatggaggtgctgcgggccagcctgcagaaggagctgaccatgggcaagggccaggccagcgccatggagctgctgcgctgccccaccctgcggcacctgttcctgtgcctgtccatgctgtggtttgccaccagctttgcctactacggcctggtgatggacctgcagggctttggagtgtccatctacctgatccaggtgatctttggagctgtggacctgcctgccaagctggtgggcttcctggtgatcaacagcctgggccggcggcctgcccagatggccgccctgctgctggccggcatctgcatcctgctgaatggagtcatcccccaggaccagagcatcgtgaggaccagcctggccgtgctgggcaagggctgcctggccgccagcttcaactgcatcttcctgtacacaggagagctgtaccccaccatgatccggcagacaggcatgggcatgggcagcaccatggcccgggtgggcagcatcgtgagccccctggtgtccatgacagctgagctgtaccccagcatgcccctcttcatctacggggctgtgcctgtggccgccagcgctgtgacagtgctgctgcctgagaccctgggccagcccctgcctgacacagtgcaggacctggagagcaggaagggcaagcagacccggcagcagcaggagcaccagaagtacatggtgcccctgcaggccagcgcccaggagaagaatggcctgtag

SEQ ID NO: 170361 - DNA, 1692 bp, synthetic construct
  misc_feature 1..1692: note = Description of Artificial Sequence: Synthetic coding sequence
  source 1..1692: mol_type = other DNA
atggccttcaatgacctgctgcagcaggtgggcggcgtgggccgcttccagcagatccaggtgaccctggtggtgctgcccctgctgctgatggccagccacaacaccctgcagaacttcaccgctgccatccccacccaccactgccggcccccagcagatgccaacctgagcaagaatggaggcctggaggtgtggctgccccgggaccggcagggccagcctgagagctgcctgcgcttcaccagcccccagtggggcctgcccttcctgaatggaacagaggccaatggaactggagccacagagccctgcacagatggctggatctatgacaacagcaccttccccagcaccatcgtgacagagtgggacctggtgtgcagccaccgggccctgcggcagctggcccagagcctgtacatggtgggcgtgctgctgggcgccatggtgtttggctacctggccgaccggctgggccgcaggaaggtgctgatcctgaactacctgcagacagctgtgtctggcacctgtgccgcctttgcccccaacttccccatctactgtgccttccggctgctgagcggcatggccctggccggcatcagcctgaactgcatgaccctgaatgtggagtggatgcccatccacacccgggcctgtgtgggcaccctcatcggctacgtgtacagcctgggccagttcctgctggccggcgtggcctatgctgtgccccactggaggcacctgcagctgctggtgtctgcccccttctttgccttcttcatctacagctggttcttcattgaaagtgcccgctggcacagcagcagcggccgcctggacctgaccctgcgggccctgcagagggtggcccgcatcaatggcaagcgggaggagggcgccaagctgtccatggaggtgctgcgggccagcctgcagaaggagctgaccatgggcaagggccaggccagcgccatggagctgctgcgctgccccaccctgcggcacctgttcctgtgcctgtccatgctgtggtttgccaccagctttgcctactacggcctggtgatggacctgcagggctttggagtgtccatctacctgatccaggtgatctttggagctgtggacctgcctgccaagctggtgggcttcctggtgatcaacagcctgggccggcggcctgcccagatggccgccctgctgctggccggcatctgcatcctgctgaatggagtcatcccccaggaccagagcatcgtgaggaccagcctggccgtgctgggcaagggctgcctggccgccagcttcaactgcatcttcctgtacacaggagagctgtaccccaccatgatccggcagacaggcatgggcatgggcagcaccatggcccgggtgggcagcatcgtgagccccctggtgtccatgacagctgagctgtaccccagcatgcccctcttcatctacggggctgtgcctgtggccgccagcgctgtgacagtgctgctgcctgagaccctgggccagcccctgcctgacacagtgcaggacctggagagccgctgggcccccacccagaaggaggccggcatctaccccaggaagggcaagcagacccggcagcagcaggagcaccagaagtacatggtgcccctgcaggccagcgcccaggagaagaatggcctgtag

SEQ ID NO: 170362 - DNA, 1590 bp, synthetic construct
  misc_feature 1..1590: note = Description of Artificial Sequence: Synthetic coding sequence
  source 1..1590: mol_type = other DNA
atggccttcaatgacctgctgctgctgatggccagccacaacaccctgcagaacttcaccgctgccatccccacccaccactgccggcccccagcagatgccaacctgagcaagaatggaggcctggaggtgtggctgccccgggaccggcagggccagcctgagagctgcctgcgcttcaccagcccccagtggggcctgcccttcctgaatggaacagaggccaacggcaccggggccacagagccctgcacagatggctggatctatgacaacagcaccttccccagcaccatcgtgacagagtgggacctggtgtgcagccaccgggccctgcggcagctggcccagagcctgtacatggtgggcgtgctgctgggcgccatggtgtttggctacctggccgaccggctgggccgcaggaaggtgctgatcctgaactacctgcagacagctgtgtctggcacctgtgccgcctttgcccccaacttccccatctactgtgccttccggctgctgagcggcatggccctggccggcatcagcctgaactgcatgaccctgaatgtggagtggatgcccatccacacccgggcctgtgtgggcaccctgattggctacgtgtacagcctgggccagttcctgctggccggcgtggcctatgctgtgccccactggaggcacctgcagctgctggtgtctgcccccttctttgccttcttcatctacagctggttcttcatcgagagcgcccgctggcacagcagcagcggccgcctggacctgaccctgcgggccctgcagagggtggcccgcatcaacgggaagcgggaggagggcgccaagctgtccatggaggtgctgcgggccagcctgcagaaggagctgaccatgggcaagggccaggccagcgccatggagctgctgcgctgccccaccctgcggcacctgttcctgtgcctgtccatgctgtggtttgccaccagctttgcctactacggcctggtgatggacctgcagggcttcggcgtgtccatctacctgatccaggtgatctttggagctgtggacctgcctgccaagctggtgggcttcctggtgatcaacagcctgggcagaagacctgcccagatggccgccctgctgctggccggcatctgcatcctgctgaatggagtcatcccccaggaccagagcatcgtgaggaccagcctggccgtgctgggcaagggctgcctggccgccagcttcaactgcatcttcctgtacaccggggagctgtaccccaccatgatccggcagacaggcatgggcatgggcagcaccatggcccgggtgggcagcatcgtgagccccctggtgtccatgacagctgagctgtaccccagcatgcccctcttcatctatggagctgtgcctgtggccgccagcgctgtgacagtgctgctgcctgagaccctgggccagcccctgcctgacacagtgcaggacctggagagcaggaagggcaagcagacccggcagcagcaggagcaccagaagtacatggtgcccctgcaggccagcgcccaggagaagaatggcctgtag

SEQ ID NO: 170363 - DNA, 1560 bp, synthetic construct
  misc_feature 1..1560: note = Description of Artificial Sequence: Synthetic coding sequence
  source 1..1560: mol_type = other DNA
atggccttcaatgacctgctgcagcaggtgggcggcgtgggccgcttccagcagatccaggtgaccctggtggtgctgcccctgctgctgatggccagccacaacaccctgcagaacttcaccgctgccatccccacccaccactgccggcccccagcagatgccaacctgagcaagaatggaggcctggaggtgtggctgccccgggaccggcagggccagcctgagagctgcctgcgcttcaccagcccccagtggggcctgcccttcctgaatggaacagaggccaatggaactggagccacagagccctgcacagatggctggatctatgacaacagcaccttccccagcaccatcgtgacagagtgggacctggtgtgcagccaccgggccctgcggcagctggcccagagcctgtacatggtgggcgtgctgctgggcgccatggtgtttggctacctggccgaccggctgggccgcaggaaggtgctgatcctgaactacctgcagacagctgtgtctggcacctgtgccgcctttgcccccaacttccccatctactgtgccttccggctgctgagcggcatggccctggccggcatcagcctgaactgcatgaccctgaatgtggagtggatgcccatccacacccgggcctgtgtgggcaccctcatcggctacgtgtacagcctgggccagttcctgctggccggcgtggcctatgctgtgccccactggaggcacctgcagctgctggtgtctgcccccttctttgccttcttcatctacagctggttcttcattgaaagtgcccgctggcacagcagcagcggccgcctggacctgaccctgcgggccctgcagagggtggcccgcatcaatggcaagcgggaggagggcgccaagctgtccatggaggtgctgcgggccagcctgcagaaggagctgaccatgggcaagggccaggccagcgccatggagctgctgcgctgccccaccctgcggcacctgttcctgtgcctgtccatgctgtggtttgccaccagctttgcctactacggcctggtgatggacctgcagggctttggagtgtccatctacctgatccaggtgatctttggagctgtggacctgcctgccaagctggtgggcttcctggtgatcaacagcctgggccggcggcctgcccagatggccgccctgctgctggccggcatctgcatcctgctgaatggagtcatcccccaggaccagagcatcgtgaggaccagcctggccgtgctgggcaagggctgcctggccgccagcttcaactgcatcttcctgtacacaggagagctgtaccccaccatgatccgggctgtgacagtgctgctgcctgagaccctgggccagcccctgcctgacacagtgcaggacctggagagccgctgggcccccacccagaaggaggccggcatctaccccaggaagggcaagcagacccggcagcagcaggagcaccagaagtacatggtgcccctgcaggccagcgcccaggagaagaatggcctgtag

SEQ ID NO: 170364 - DNA, 1521 bp, synthetic construct
  misc_feature 1..1521: note = Description of Artificial Sequence: Synthetic coding sequence
  source 1..1521: mol_type = other DNA
atggccttcaatgacctgctgcagcaggtgggcggcgtgggccgcttccagcagatccaggtgaccctggtggtgctgcccctgctgctgatggccagccacaacaccctgcagaacttcaccgctgccatccccacccaccactgccggcccccagcagatgccaacctgagcaagaatggaggcctggaggtgtggctgccccgggaccggcagggccagcctgagagctgcctgcgcttcaccagcccccagtggggcctgcccttcctgaatggaacagaggccaatggaactggagccacagagccctgcacagatggctggatctatgacaacagcaccttccccagcaccatcgtgacagagtgggacctggtgtgcagccaccgggccctgcggcagctggcccagagcctgtacatggtgggcgtgctgctgggcgccatggtgtttggctacctggccgaccggctgggccgcaggaaggtgctgatcctgaactacctgcagacagctgtgtctggcacctgtgccgcctttgcccccaacttccccatctactgtgccttccggctgctgagcggcatggccctggccggcatcagcctgaactgcatgaccctgaatgtggagtggatgcccatccacacccgggcctgtgtgggcaccctcatcggctacgtgtacagcctgggccagttcctgctggccggcgtggcctatgctgtgccccactggaggcacctgcagctgctggtgtctgcccccttctttgccttcttcatctacagctggttcttcattgaaagtgcccgctggcacagcagcagcggccgcctggacctgaccctgcgggccctgcagagggtggcccgcatcaatggcaagcgggaggagggcgccaagctgtccatggaggtgctgcgggccagcctgcagaaggagctgaccatgggcaagggccaggccagcgccatggagctgctgcgctgccccaccctgcggcacctgttcctgtgcctgtccatgctgtggtttgccaccagctttgcctactacggcctggtgatggacctgcagggctttggagtgtccatctacctgatccaggtgatctttggagctgtggacctgcctgccaagctggtgggcttcctggtgatcaacagcctgggccggcggcctgcccagatggccgccctgctgctggccggcatctgcatcctgctgaatggagtcatcccccaggaccagagcatcgtgaggaccagcctggccgtgctgggcaagggctgcctggccgccagcttcaactgcatcttcctgtacacaggagagctgtaccccaccatgatccgggctgtgacagtgctgctgcctgagaccctgggccagcccctgcctgacacagtgcaggacctggagagcaggaagggcaagcagacccggcagcagcaggagcaccagaagtacatggtgcccctgcaggccagcgcccaggagaagaatggcctgtag

SEQ ID NO: 170365 - DNA, 1620 bp, synthetic construct
  misc_feature 1..1620: note = Description of Artificial Sequence: Synthetic coding sequence
  source 1..1620: mol_type = other DNA
atgggctttgaggagctgctggagcaggtgggcggcttcggccccttccagctgagaaatgtggccctgctggccctgccccgggtgctgctgcccctgcacttcctgctgcccatcttcctggccgctgtgcctgcccaccgctgtgccctgcccggggccccagccaacttcagccaccaggatgtgtggctggaggcccacctgccccgggagccagatggcaccctgagcagctgcctgcgctttgcctacccccaggccctgcccaacaccaccctgggggaggagcggcagagcagaggagagctggaggatgagcccgccaccgtgccctgcagccagggctgggagtatgaccacagcgagttcagcagcaccatcgccacagagtgggacctggtgtgtgagcagaagggcctgaacagagctgccagcaccttcttctttgctggggtgctggtgggcgctgtggccttcggctacctgagtgacagatttggaagaagaaggctgctgctggtggcctacgtgtccaccctggtgctgggcctggccagcgctgcctctgtgtcctatgtgatgtttgccatcaccaggaccctgactggaagtgccctggccggcttcaccatcatcgtgatgcccctggagctggagtggctggatgtggagcacaggacagtggccggcgtgctgagcagcaccttctggacaggaggagtgatgctgctggccctggtgggctacctgatccgggactggcgctggctgctgctggccgtgaccctgccctgtgcccctggcatcctgagcctgtggtgggtgcctgagagcgcccgctggctgctgacccagggccacgtgaaggaggcccaccgctacctgctgcactgtgcccggctgaatggccggcctgtgtgtgaagattccttcagccaggaggccgtgtccaaggtggccgccggggagcgggtggtgcggcggcccagctacctggacctcttccgcaccccccggctgcggcacatcagcctgtgctgcgtggtggtgtggtttggagtgaacttctcctactacggcctgagcctggatgtgtctggcctgggcctgaatgtgtaccagacccagctgctgtttggagctgtggagctgcccagcaagctgctggtgtacctgtctgtgcgctatgccggccggcggctgacccaggccggcaccctgctgggcacagccctggccttcggcacccggctgctggtgtccagtgacatgaagtcctggagcacagtgctggccgtgatgggcaaggccttcagcgaggccgccttcaccacagcctacctgttcaccagcgagctgtaccccaccgtgctgcggcagacaggcatgggcctgacagccctggtgggccgcctgggcggcagcctggcccccctggccgccctgctggatggagtgtggctgagcctgcccaagctgacctacggcggcatcgccctgctggccgccggcacagccctgctgctgcctgagacccggcaggcccagctgcctgagaccatccaggatgtggagaggaagagatgtgtgcacaggacagtgtctgtgtatgtgtag

SEQ ID NO: 170366 - DNA, 1647 bp, synthetic construct
  misc_feature 1..1647: note = Description of Artificial Sequence: Synthetic coding sequence
  source 1..1647: mol_type = other DNA
atgggctttgaggagctgctggagcaggtgggcggcttcggccccttccagctgagaaatgtggccctgctggccctgccccgggtgctgctgcccctgcacttcctgctgcccatcttcctggccgctgtgcctgcccaccgctgtgccctgcccggggccccagccaacttcagccaccaggatgtgtggctggaggcccacctgccccgggagccagatggcaccctgagcagctgcctgcgctttgcctacccccaggccctgcccaacaccaccctgggggaggagcggcagagcagaggagagctggaggatgagcccgccaccgtgccctgcagccagggctgggagtatgaccacagcgagttcagcagcaccatcgccacagagagccagtgggacctggtgtgtgagcagaagggcctgaacagagctgccagcaccttcttctttgctggggtgctggtgggcgctgtggccttcggctacctgagtgacagatttggaagaagaaggctgctgctggtggcctacgtgtccaccctggtgctgggcctggccagcgctgcctctgtgtcctatgtgatgtttgccatcaccaggaccctgactggaagtgccctggccggcttcaccatcatcgtgatgcccctggagctggagtggctggatgtggagcacaggacagtggccggcgtgctgagcagcaccttctggacaggaggagtgatgctgctggccctggtgggctacctgatccgggactggcgctggctgctgctggccgtgaccctgccctgtgcccctggcatcctgagcctgtggtgggtgcctgagagcgcccgctggctgctgacccagggccacgtgaaggaggcccaccgctacctgctgcactgtgcccggctgaatggccggcctgtgtgtgaagattccttcagccaggaggccgtgtccaaggtggccgccggggagcgggtggtgcggcggcccagctacctggacctcttccgcaccccccggctgcggcacatcagcctgtgctgcgtggtggtgtggtttggagtgaacttctcctactacggcctgagcctggatgtgtctggcctgggcctgaatgtgtaccagacccagctgctgtttggagctgtggagctgcccagcaagctgctggtgtacctgtctgtgcgctatgccggccggcggctgacccaggccggcaccctgctgggcacagccctggccttcggcacccggctgctggtgtccagtgacatgaagtcctggagcacagtgctggccgtgatgggcaaggccttcagcgaggccgccttcaccacagcctacctgttcaccagcgagctgtaccccaccgtgctgcggcagacaggcatgggcctgacagccctggtgggccgcctgggcggcagcctggcccccctggccgccctgctggatggagtgtggctgagcctgcccaagctgacctacggcggcatcgccctgctggccgccggcacagccctgctgctgcctgagacccggcaggcccagctgcctgagaccatccaggatgtggagaggaagagcgcccccaccagcctgcaggaggaggagatgcccatgaagcaggtgcagaactag

SEQ ID NO: 170367 - DNA, 1641 bp, synthetic construct
  misc_feature 1..1641: note = Description of Artificial Sequence: Synthetic coding sequence
  source 1..1641: mol_type = other DNA
atgggctttgaggagctgctggagcaggtgggcggcttcggccccttccagctgagaaatgtggccctgctggccctgccccgggtgctgctgcccctgcacttcctgctgcccatcttcctggccgctgtgcctgcccaccgctgtgccctgcccggggccccagccaacttcagccaccaggatgtgtggctggaggcccacctgccccgggagccagatggcaccctgagcagctgcctgcgctttgcctacccccaggccctgcccaacaccaccctgggggaggagcggcagagcagaggagagctggaggatgagcccgccaccgtgccctgcagccagggctgggagtatgaccacagcgagttcagcagcaccatcgccacagagtgggacctggtgtgtgagcagaagggcctgaacagagctgccagcaccttcttctttgctggggtgctggtgggcgctgtggccttcggctacctgagtgacagatttggaagaagaaggctgctgctggtggcctacgtgtccaccctggtgctgggcctggccagcgctgcctctgtgtcctatgtgatgtttgccatcaccaggaccctgactggaagtgccctggccggcttcaccatcatcgtgatgcccctggagctggagtggctggatgtggagcacaggacagtggccggcgtgctgagcagcaccttctggacaggaggagtgatgctgctggccctggtgggctacctgatccgggactggcgctggctgctgctggccgtgaccctgccctgtgcccctggcatcctgagcctgtggtgggtgcctgagagcgcccgctggctgctgacccagggccacgtgaaggaggcccaccgctacctgctgcactgtgcccggctgaatggccggcctgtgtgtgaagattccttcagccaggaggccgtgtccaaggtggccgccggggagcgggtggtgcggcggcccagctacctggacctcttccgcaccccccggctgcggcacatcagcctgtgctgcgtggtggtgtggtttggagtgaacttctcctactacggcctgagcctggatgtgtctggcctgggcctgaatgtgtaccagacccagctgctgtttggagctgtggagctgcccagcaagctgctggtgtacctgtctgtgcgctatgccggccggcggctgacccaggccggcaccctgctgggcacagccctggccttcggcacccggctgctggtgtccagtgacatgaagtcctggagcacagtgctggccgtgatgggcaaggccttcagcgaggccgccttcaccacagcctacctgttcaccagcgagctgtaccccaccgtgctgcggcagacaggcatgggcctgacagccctggtgggccgcctgggcggcagcctggcccccctggccgccctgctggatggagtgtggctgagcctgcccaagctgacctacggcggcatcgccctgctggccgccggcacagccctgctgctgcctgagacccggcaggcccagctgcctgagaccatccaggatgtggagaggaagagcgcccccaccagcctgcaggaggaggagatgcccatgaagcaggtgcagaactag

SEQ ID NO: 170368 - DNA, 636 bp, synthetic construct
  misc_feature 1..636: note = Description of Artificial Sequence: Synthetic coding sequence
  source 1..636: mol_type = other DNA
atgctgcagccccacctgctgccctaccaggccgtgtccaaggtggccgccggggagcgggtggtgagaagacccagctacctggacctcttccgcaccccccggctgcggcacatcagcctgtgctgcgtggtggtgtggtttggagtgaacttctcctactacggcctgagcctggatgtgtctggcctgggcctgaatgtgtaccagacccagctgctgtttggagctgtggagctgcccagcaagctgctggtgtacctgtctgtgcgctatgccggccgccgcctgacccaggccggcaccctgctgggcacagccctggccttcggcacccggctgctggtgtccagtgacatgaagtcctggagcacagtgctggccgtgatgggcaaggccttcagcgaggccgccttcaccacagcctacctgttcaccagcgagctgtaccccaccgtgctgcggcagacaggcatgggcctgacagccctggtgggccgcctgggcggcagcctggcccccctggccgccctgctggatggagtgtggctgagcctgcccaagctgacctatggaggcatcgccctgctggccgccggcacagccctgctgctgcctgagacccggcaggcctag

SEQ ID NO: 170369 - DNA, 837 bp, synthetic construct
  misc_feature 1..837: note = Description of Artificial Sequence: Synthetic coding sequence
  source 1..837: mol_type = other DNA
atgggctttgaggagctgctggagcaggtgggcggcttcggccccttccagctgagaaatgtggccctgctggccctgccccgggtgctgctgcccctgcacttcctgctgcccatcttcctggccgctgtgcctgcccaccgctgtgccctgcccggggccccagccaacttcagccaccaggatgtgtggctggaggcccacctgccccgggagccagatggcaccctgagcagctgcctgcgctttgcctacccccaggccctgcccaacaccaccctgggggaggagcggcagagcagaggagagctggaggatgagcccgccaccgtgccctgcagccagggctgggagtatgaccacagcgagttcagcagcaccatcgccacagagagccaggtgggcatctacatcatccacctggaggtggagtgccgctggaggcagagcccctgggaggccgccggccggggcctgccctgggaggaggccgaggccgccggcctgggccgggacaaggtgtcctacagccccagctggagggagagcctgggcggcctgctgagcggcatggagtgggacctggtgtgtgagcagaagggcctgaacagagctgccagcaccttcttctttgctggggtgctggtgggcgctgtggccttcggctacctgagtgaccgcttcggcagaagaaggctgctgctggtggcctacgtgtccaccctggtgctgggcctggccagcgctgcctctgtgtcctatgtgatgtttgccatcaccaggaccctgaccggcagcgccctggccggcttcaccatcatcgtgatgcccctgtag

SEQ ID NO: 170370 - DNA, 444 bp, synthetic construct
  misc_feature 1..444: note = Description of Artificial Sequence: Synthetic coding sequence
  source 1..444: mol_type = other DNA
atggagtgggacctggtgtgtgagcagaagggcctgaacagagctgccagcaccttcttctttgctggggtgctggtgggcgctgtggccttcggctacctgagtgaccgcttcggcagaagaaggctgctgctggtggcctacgtgtccaccctggtgctgggcctggccagcgctgcctctgtgtcctatgtgatgtttgccatcaccaggaccctgaccggcagcgccctggccggcttcaccatcatcgtgatgcccctgggggaggccgagctggagtggctggatgtggagcacaggacagtggccggcgtgctgagcagcaccttctggacaggaggagtgatgctgctggccctggtgggctacctgatccgggactggcgctggctgctgctggccgtgaccctgccctgtgcccctggcatcctgagcctgtag

SEQ ID NO: 170371 - DNA, 1629 bp, synthetic construct
  misc_feature 1..1629: note = Description of Artificial Sequence: Synthetic coding sequence
  source 1..1629: mol_type = other DNA
atgaccttcagcgagatcctggacagagtgggctccatgggccacttccagttcctgcacgtggccatcctgggcctgcccatcctgaacatggccaaccacaacctgctgcagatcttcaccgctgccacccctgtgcaccactgcaggcctccccacaatgccagcacaggcccctgggtgctgcccatgggccccaacgggaagccagagcgctgcctgcgctttgtgcaccccccaaatgccagcctgcccaatgacacccagagggccatggagccctgcctggatggctgggtgtacaacagcaccaaggacagcatcgtgacagagtgggacctggtgtgcaacagcaacaagctgaaggagatggcccagagcatcttcatggccggcatcctgattggaggcctggtgctgggggacctgagtgacagatttggaagaagacccatcctgacctgcagctacctgctgctggccgccagcggcagcggggccgccttcagccccaccttccccatctacatggtgttccgcttcctgtgtggcttcggcatcagcggcatcaccctgagcaccgtcatcctgaatgtggagtgggtgcccaccaggatgagggccatcatgagcacagccctgggctactgctacaccttcggccagttcatcctgcccggcctggcctatgccatcccccagtggcgctggctgcagctgactgtgtccatccccttctttgtgttcttcctgagctcctggtggaccccagagagcatccgctggctggtgctgagcggcaagagcagcaaggccctgaagatcctgcggcgggtggccgtgttcaacgggaagaaggaggagggggagcggctgagcctggaggagctgaagctgaacctgcagaaggagatcagcctggccaaggccaagtacacagccagtgacctcttccgcatccccatgctgcggaggatgaccttctgcctgagcctggcctggtttgccactggatttgcctactacagcctggccatgggcgtggaggagtttggagtgaacctgtacatcctgcagatcatctttggaggagtggatgtgcctgccaagttcatcaccatcctgagcctgagctacctgggccgccacaccacccaggccgccgccctgctgctggccggcggggccatcctggccctgacctttgtgcccctggacctgcagacagtgaggacagtgctggccgtgtttgggaagggctgcctgagcagcagcttcagctgcctcttcctgtacaccagcgagctgtaccccaccgtcatccggcagacaggcatgggcgtgagcaacctgtggaccagggtgggctccatggtgagccccctggtgaagatcaccggggaggtgcagcccttcatccccaacatcatctacggcatcacagccctgctgggcggcagcgctgccctcttcctgcctgagaccctgaaccagcccctgcctgagaccatcgaggacctggagaactggagcctgcgggccaagaagcccaagcaggagcctgaggtggagaaggccagccagaggatccccctgcagccccacggccctggcctgggcagcagctag

SEQ ID NO: 170372 - DNA, 1629 bp, synthetic construct; identical to SEQ ID NO: 170371
  misc_feature 1..1629: note = Description of Artificial Sequence: Synthetic coding sequence
  source 1..1629: mol_type = other DNA

SEQ ID NO: 170373 - DNA, 1587 bp, synthetic construct
  misc_feature 1..1587: note = Description of Artificial Sequence: Synthetic coding sequence
  source 1..1587: mol_type = other DNA
atgaccttcagcgagatcctggacagagtgggctccatgggccacttccagttcctgcacgtggccatcctgggcctgcccatcctgaacatggccaaccactgcaggcctccccacaatgccagcacaggcccctgggtgctgcccatgggccccaacgggaagccagagcgctgcctgcgctttgtgcaccccccaaatgccagcctgcccaatgacacccagagggccatggagccctgcctggatggctgggtgtacaacagcaccaaggacagcatcgtgacagagtgggacctggtgtgcaacagcaacaagctgaaggagatggcccagagcatcttcatggccggcatcctgattggaggcctggtgctgggggacctgagtgacagatttggaagaagacccatcctgacctgcagctacctgctgctggccgccagcggcagcggggccgccttcagccccaccttccccatctacatggtgttccgcttcctgtgtggcttcggcatcagcggcatcaccctgagcaccgtcatcctgaatgtggagtgggtgcccaccaggatgagggccatcatgagcacagccctgggctactgctacaccttcggccagttcatcctgcccggcctggcctatgccatcccccagtggcgctggctgcagctgactgtgtccatccccttctttgtgttcttcctgagctcctggtggaccccagagagcatccgctggctggtgctgagcggcaagagcagcaaggccctgaagatcctgcggcgggtggccgtgttcaacgggaagaaggaggagggggagcggctgagcctggaggagctgaagctgaacctgcagaaggagatcagcctggccaaggccaagtacacagccagtgacctcttccgcatccccatgctgcggaggatgaccttctgcctgagcctggcctggtttgccactggatttgcctactacagcctggccatgggcgtggaggagtttggagtgaacctgtacatcctgcagatcatctttggaggagtggatgtgcctgccaagttcatcaccatcctgagcctgagctacctgggccgccacaccacccaggccgccgccctgctgctggccggcggggccatcctggccctgacctttgtgcccctggacctgcagacagtgaggacagtgctggccgtgtttgggaagggctgcctgagcagcagcttcagctgcctcttcctgtacaccagcgagctgtaccccaccgtcatccggcagacaggcatgggcgtgagcaacctgtggaccagggtgggctccatggtgagccccctggtgaagatcaccggggaggtgcagcccttcatccccaacatcatctacggcatcacagccctgctgggcggcagcgctgccctcttcctgcctgagaccctgaaccagcccctgcctgagaccatcgaggacctggagaactggagcctgcgggccaagaagcccaagcaggagcctgaggtggagaaggccagccagaggatccccctgcagccccacggccctggcctgggcagcagctag

SEQ ID NO: 170374 - DNA, 1653 bp, synthetic construct
  misc_feature 1..1653: note = Description of Artificial Sequence: Synthetic coding sequence
  source 1..1653: mol_type = other DNA
atggccttcagcaagctgctggagcaggccggcggcgtgggcctcttccagaccctgcaggtgctgaccttcatcctgccctgcctgatgatccccagccagatgctgctggagaacttctctgctgccatccctggccaccgctgctggacccacatgctggacaatggcagcgctgtgtccaccaacatgacccccaaggccctgctgaccatcagcatccccccaggccccaaccagggcccccaccagtgccgccgcttccggcagccccagtggcagctgctggaccccaatgccacagccacctcctggagcgaggccgacacagagccctgtgtggatggctgggtgtatgacaggagcgtcttcaccagcaccatcgtggccaagtgggacctggtgtgcagcagccagggcctgaagcccctgagccagagcatcttcatgagcggcatcctggtgggcagcttcatctggggcctgctgagctacagatttggaaggaagcccatgctgtcctggtgctgcctgcagctggccgtggccggcaccagcaccatctttgcccccacctttgtgatctactgcggcctgcgctttgtggccgccttcggcatggccggcatcttcctgagcagcctgaccctgatggtggagtggaccaccaccagccggcgggctgtgaccatgacagtggtgggctgtgccttctctgctggccaggccgccctgggcggcctggcctttgccctgcgggactggaggaccctgcagctggccgcctctgtgcccttctttgccatcagcctcatctcctggtggctgcctgagagcgcccgctggctgatcatcaagggcaagccagaccaggccctgcaggagctgaggaaggtggcccgcatcaatggccacaaggaggccaagaacctgaccatcgaggtgctgatgagctctgtgaaggaggaggtggccagcgccaaggagcccaggtctgtgctggacctcttctgtgtgcctgtgctgcgctggaggagctgtgccatgctggtggtgaacttcagcctgctgatctcctactacggcctggtgtttgacctgcagagcctgggccgggacatcttcctgctgcaggccctgtttggagctgtggacttcctgggccgggccaccacagccctgctgctgtccttcctgggccgccgcaccatccaggccggcagccaggccatggccggcctggccatcctggccaacatgctggtgccccaggacctgcagaccctgcgggtggtgtttgctgtgctgggcaagggctgcttcggcatcagcctgacctgcctgaccatctacaaggccgagctgttccccacccctgtgaggatgacagcagatggcatcctgcacacagtgggccgcctgggcgccatgatgggccccctcatcctgatgagccggcaggccctgcccctgctgccccccctgctgtatggagtcatcagcatcgccagcagcctggtggtgctcttcttcctgcctgagacccagggcctgcccctgcctgacaccatccaggacctggagagccagaagagcacagctgcccagggcaaccggcaggaggccgtgacagtggagagcaccagcctgtag

SEQ ID NO: 170375 - DNA, 1338 bp, synthetic construct
  misc_feature 1..1338: note = Description of Artificial Sequence: Synthetic coding sequence
  source 1..1338: mol_type = other DNA
atggccttcagcgagctgctggacctggtgggcggcctgggccgcttccaggtgctgcagaccatggccctgatggtgtccatcatgtggctgtgcacccagagcatgctggagaacttctctgctgctgtgcccagccaccgctgctgggcccccctgctggacaacagcacagcccaggccagcatcctgggcagcctgagccctgaggccctgctggccatcagcatccccccaggccccaaccagaggccccaccagtgccgccgcttccggcagccccagtggcagctgctggaccccaatgccacagccacctcctggagcgaggccgacacagagccctgtgtggatggctgggtgtatgacaggagcatcttcaccagcaccatcgtggccaagtggaacctggtgtgtgacagccacgccctgaagcccatggcccagagcatctacctggccggcatcctggtgggcgctgctgcctgtggccctgccagtgaccgctggctggccgagagcgcccgctggctgctgaccaccggccgcctggactggggcctgcaggagctgtggagggtggccgccatcaacgggaaaggagctgtgcaggacaccctgaccccagaggtgctgctgagcgccatgagggaggagctgtccatgggccagcccccagccagcctgggcaccctgctgaggatgcctggcctgcgcttccgcacctgcatcagcaccctgtgctggtttgccttcggcttcaccttcttcggcctggccctggacctgcaggccctgggcagcaacatcttcctgctgcagatgtttattggagtggtggacatcccagccaagatgggcgccctgctgctgctgagccacctgggcagaagacccaccctggccgccagcctgctgctggccggcctgtgcatcctggccaacaccctggtgccccatgagatgggcgccctgcggagcgccctggccgtgctgggcctgggcggcgtgggcgccgccttcacctgcatcaccatctacagcagcgagctgttccccaccgtgctgaggatgacagctgtgggcctgggccagatggccgcccggggcggggccatcctgggccccctggtgcggctgctgggcgtgcacggcccctggctgcccctgctggtgtatggaacagtgcctgtgctgagcggcctggccgccctgctgctgcctgagacccagagcctgcccctgcctgacaccatccaggatgtgcagaaccaggccgtgaagaaggccacccacggcaccctgggcaacagcgtgctgaagagcacccagttctag

SEQ ID NO: 170376 - DNA, 1662 bp, synthetic construct
  misc_feature 1..1662: note = Description of Artificial Sequence: Synthetic coding sequence
  source 1..1662: mol_type = other DNA
atggccttcagcgagctgctggacctggtgggcggcctgggccgcttccaggtgctgcagaccatggccctgatggtgtccatcatgtggctgtgcacccagagcatgctggagaacttctctgctgctgtgcccagccaccgctgctgggcccccctgctggacaacagcacagcccaggccagcatcctgggcagcctgagccctgaggccctgctggccatcagcatccccccaggccccaaccagaggccccaccagtgccgccgcttccggcagccccagtggcagctgctggaccccaatgccacagccacctcctggagcgaggccgacacagagccctgtgtggatggctgggtgtatgacaggagcatcttcaccagcaccatcgtggccaagtggaacctggtgtgtgacagccacgccctgaagcccatggcccagagcatctacctggccggcatcctggtgggcgctgctgcctgtggccctgccagtgaccgcttcggccggcggctggtgctgacctggagctacctgcagatggctgtgatgggcacagctgctgcctttgccccagccttccctgtgtactgcctcttccgcttcctgctggcctttgctgtggccggcgtgatgatgaacacaggcaccctgctgatggagtggacagctgcccgggcccggcccctggtgatgaccctgaacagcctgggcttctcctttggacatggcctgacagctgctgtggcctatggagtgcgggactggaccctgctgcagctggtggtgtctgtgcccttcttcctgtgcttcctgtacagctggtggctggccgagagcgcccgctggctgctgaccaccggccgcctggactggggcctgcaggagctgtggagggtggccgccatcaacgggaaaggagctgtgcaggacaccctgaccccagaggtgctgctgagcgccatgagggaggagctgtccatgggccagcccccagccagcctgggcaccctgctgaggatgcctggcctgcgcttccgcacctgcatcagcaccctgtgctggtttgccttcggcttcaccttcttcggcctggccctggacctgcaggccctgggcagcaacatcttcctgctgcagatgtttattggagtggtggacatcccagccaagatgggcgccctgctgctgctgagccacctgggcagaagacccaccctggccgccagcctgctgctggccggcctgtgcatcctggccaacaccctggtgccccatgagatgggcgccctgcggagcgccctggccgtgctgggcctgggcggcgtgggcgccgccttcacctgcatcaccatctacagcagcgagctgttccccaccgtgctgaggatgacagctgtgggcctgggccagatggccgcccggggcggggccatcctgggccccctggtgcggctgctgggcgtgcacggcccctggctgcccctgctggtgtatggaacagtgcctgtgctgagcggcctggccgccctgctgctgcctgagacccagagcctgcccctgcctgacaccatccaggatgtgcagaaccaggccgtgaagaaggccacccacggcaccctgggcaacagcgtgctgaagagcacccagttctag

SEQ ID NO: 170377 - DNA, 999 bp, synthetic construct
  misc_feature 1..999: note = Description of Artificial Sequence: Synthetic coding sequence
  source 1..999: mol_type = other DNA
atggagtggacagctgcccgggcccggcccctggtgatgaccctgaacagcctgggcttctcctttggccacggcctgacagctgctgtggcctacggcgtgcgggactggaccctgctgcagctggtggtgtctgtgcccttcttcctgtgcttcctgtacagctggtggctggccgagagcgcccgctggctgctgaccaccggccgcctggactggggcctgcaggagctgtggagggtggccgccatcaatggaaaaggagctgtgcaggacaccctgaccccagaggtgctgctgagcgccatgagggaggagctgtccatgggccagcccccagccagcctgggcaccctgctgaggatgcctggcctgcgcttccgcacctgcatcagcaccctgtgctggtttgccttcggcttcaccttcttcggcctggccctggacctgcaggccctgggcagcaacatcttcctgctgcagatgttcatcggcgtggtggacatcccagccaagatgggcgccctgctgctgctgagccacctgggccggcggcccaccctggccgccagcctgctgctggccggcctgtgcatcctggccaacaccctggtgccccatgagatgggcgccctgcggagcgccctggccgtgctgggcctgggcggcgtgggcgccgccttcacctgcatcaccatctacagcagcgagctgttccccaccgtgctgaggatgacagctgtgggcctgggccagatggccgcccggggcggggccatcctgggccccctggtgcggctgctgggcgtgcacggcccctggctgcccctgctggtgtatggcaccgtgcctgtgctgagcggcctggccgccctgctgctgcctgagacccagagcctgcccctgcctgacaccatccaggatgtgcagaaccaggccgtgaagaaggccacccacggcaccctgggcaacagcgtgctgaagagcacccagttctag

SEQ ID NO: 170378 - DNA, 1665 bp, synthetic construct
  misc_feature 1..1665: note = Description of Artificial Sequence: Synthetic coding sequence
  source 1..1665: mol_type = other DNA
atgcccaccgtggatgacatcctggagcaggtgggggagagcggctggttccagaagcaggccttcctgatcctgtgcctgctgtctgctgcctttgcccccatctgtgtgggcatcgtgttcctgggcttcaccccagaccaccactgccagagccctggggtggccgagctgagccagagatgtggctggagccctgctgaggagctgaactacacagtgcccggcctgggccctgctggggaggccttcctgggccagtgcagaagatatgaggtggactggaaccagagcgccctgagctgtgtggaccccctggccagcctggccaccaacagaagccacctgcccctgggcccctgccaggacggctgggtgtatgacaccccaggcagcagcatcgtgacagagttcaacctggtgtgtgccgacagctggaagctggacctcttccagagctgcctgaatgccggcttcctgtttggcagcctgggcgtgggctactttgctgacagatttggaaggaagctgtgcctgctgggcaccgtgctggtgaatgctgtgtctggagtgctgatggccttcagccccaactacatgtccatgctgctcttccggctgctgcagggcctggtgtccaagggcaactggatggccggctacaccctcatcacagaatttgtgggcagcggcagcagaagaacagtggccatcatgtaccagatggccttcaccgtgggcctggtggccctgaccggcctggcctatgccctgccccactggcgctggctgcagctggccgtgtccctgcccaccttcctgttcctgctgtactactggtgtgtgcctgagagcccccgctggctgctgagccagaagaggaacacagaggccatcaagatcatggaccacatcgcccagaagaatggcaagctgcccccagctgacctgaagatgctgagcctggaggaggatgtgacagagaagctgagccccagctttgctgacctcttccgcaccccccggctgaggaagaggaccttcatcctgatgtacctgtggttcacagacagcgtgctgtaccagggcctcatcctgcacatgggcgccaccagcggcaacctgtacctggacttcctgtacagcgccctggtggagatccctggggccttcatcgccctgatcaccatcgacagagtgggccgcatctaccccatggccatgagcaacctgctggccggggccgcctgcctggtgatgatcttcatcagcccagacctgcactggctgaacatcatcatcatgtgtgtgggccgcatgggcatcaccatcgccatccagatgatctgcctggtgaatgctgagctgtaccccacctttgtgaggaacctgggcgtgatggtgtgcagcagcctgtgtgacattggaggcatcatcacccccttcatcgtgttccggctgcgggaggtgtggcaggccctgcccctcatcctgtttgctgtgctgggcctgctggccgccggcgtgaccctgctgctgcctgagaccaagggcgtggccctgcctgagaccatgaaggatgctgagaacctgggcaggaaggccaagcccaaggagaacaccatctacctgaaggtgcagaccagcgagcccagcggcacctag

SEQ ID NO: 170379 - DNA, 1005 bp, synthetic construct
  misc_feature 1..1005: note = Description of Artificial Sequence: Synthetic coding sequence
  source 1..1005: mol_type = other DNA
atgttcttcctgctggccctgctgagcgccacctttgcccccatctacgtgggcatcgtgttcctgggcttcaccccagaccaccgctgccgcagccctggggtggccgagctgagcctgcgctgtggctggagccctgctgaggagctgaactacacagtgcccggccctggccctgctggggaggccagcccccggcagtgcagaagatatgaggtggactggaaccagagcacctttgactgtgtggaccccctggccagcctggacaccaacagaagccggctgcccctgggcccctgcagagatggctgggtgtatgagaccccaggcagcagcatcgtgacagagttcaacctggtgtgtgccaacagctggatgctggacctcttccagagctctgtgaatgtgggcttcttcatcggctccatgagcatcggctacatcgctgacagatttggaaggaagctgtgcctgctgaccaccgtgctgatcaatgctgctgctggggtgctgatggccatcagccccacctacacctggatgctgatcttccgcctcatccagggcctggtgtccaaggccggctggctgattggctacatcctgatcacagaatttgtgggccgccgctacagaagaacagtgggcatcttctaccaggtggcctacacagtgggcctgctggtgctggccggcgtggcctatgccctgccccactggcgctggctgcagttcaccgtgtccctgcccaacttcttcttcctgctgtactactggtgcatccctgagagcccccgctggctgatcagccagaacaagaatgctgaggccatgaggatcatcaagcacatcgccaagaagaatggcaagagcctgcctgccagcctgcagaggctgcggctggaggaggagaccgggaagaagctgaaccccagcttcctggacctggtgaggaccccccagatcaggaagcacaccatgatcctgatgtacaactggtag

SEQ ID NO: 170380 - DNA, 1668 bp, synthetic construct
  misc_feature 1..1668: note = Description of Artificial Sequence: Synthetic coding sequence
  source 1..1668: mol_type = other DNA
atgcccaccaccgtggatgatgtgctggagcacggcggggagttccacttcttccagaagcagatgttcttcctgctggccctgctgagcgccacctttgcccccatctacgtgggcatcgtgttcctgggcttcaccccagaccaccgctgccgcagccctggggtggccgagctgagcctgcgctgtggctggagccctgctgaggagctgaactacacagtgcccggccctggccctgctggggaggccagcccccggcagtgccgccgctatgaggtggactggaaccagagcacctttgactgtgtggaccccctggccagcctggacaccaacagaagccggctgcccctgggcccctgcagagatggctgggtgtatgagaccccaggcagcagcatcgtgacagagttcaacctggtgtgtgccaacagctggatgctggacctcttccagagctctgtgaatgtgggcttcttcatcggctccatgagcatcggctacatcgctgaccgcttcggcaggaagctgtgcctgctgaccaccgtgctgatcaatgctgctgctggggtgctgatggccatcagccccacctacacctggatgctgatcttccgcctcatccagggcctggtgtccaaggccggctggctgattggctacatcctgatcacagaatttgtgggccgccgctacagaagaacagtgggcatcttctaccaggtggcctacacagtgggcctgctggtgctggccggcgtggcctatgccctgccccactggcgctggctgcagttcaccgtgtccctgcccaacttcttcttcctgctgtactactggtgcatccctgagagcccccgctggctgatcagccagaacaagaatgctgaggccatgaggatcatcaagcacatcgccaagaagaatggcaagagcctgcctgccagcctgcagaggctgcggctggaggaggagaccgggaagaagctgaaccccagcttcctggacctggtgaggaccccccagatcaggaagcacaccatgatcctgatgtacaactggttcaccagctctgtgctgtaccagggcctcatcatgcacatgggcctggccggggacaacatctacctggacttcttctacagcgccctggtggagttccctgctgccttcatgatcatcctgaccatcgacagaattggaagacgctacccctgggccgccagcaacatggtggccggggccgcctgcctggcctctgtgttcatccctggggacctgcagtggctgaagatcatcatcagctgcctgggccgcatgggcatcaccatggcctatgaaattgtgtgcctggtgaatgctgagctgtaccccaccttcatccggaacctgggcgtgcacatctgcagctccatgtgtgacatcggcggcatcatcacccccttcctggtgtaccgcctgaccaacatctggctggagctgcccctgatggtgtttggagtgctgggcctggtggccggcggcctggtgctgctgctgcctgagaccaagggcaaggccctgcctgagaccatcgaggaggccgagaacatgcagaggcccaggaagaacaaggagaagatgatctacctgcaggtgcagaagctggacatccccctgaactag

SEQ ID NO: 170381 - DNA, 1632 bp, synthetic construct
  misc_feature 1..1632: note = Description of Artificial Sequence: Synthetic coding sequence
  source 1..1632: mol_type = other DNA
atgaggaccctgcatgctgtgagccacccctacagcaacagcatgaggttccagagggtgctgtacttcatctgtgccttccagaacatcagctgtggcatccactacctggcctctgtgttcatgggcgtgaccccccaccacgtgtgccggcccccaggcaacctgcagaatggagagatctgggagctgagccgctgcagcaggaacaagcgggagaacaccagcagcctgggctatgagtacacaggcagcaagaaggagttcccctgtgtggatggctacatctatgaccagaacacctggaagagcacagctgtgacccagtggaacctggtgtgtgacaggaagtggctggccatgctgatccagcccctcttcatgtttggagtgctgctgggctctgtgaccttcggctacttcagtgaccggctgggcagaagagtggtgctgtgggccaccagcagctccatgttcctgtttggaattgctgctgcctttgctgtggactactacaccttcatggccgcccgcttcttcctggccatggtggccagcggctacctggtggtgggctttgtgtatgtgatggagttcatcggcatgaagagcaggacctgggcctctgtgcacctgcacagcttctttgctgtgggcaccctgctggtggccctgaccggctacctggtgaggacctggtggctgtaccagatgatcctgagcacagtgacagtgcccttcatcctgtgctgctgggtgctgcctgagacccccttctggctgctgtctgagggccgctatgaggaggcccagaagatcgtggacatcatggccaagtggaacagagccagcagctgcaagctgtctgagctgctgagcctggacctgcagggccctgtgagcaacagccccacagaggtgcagaagcacaacctgagctacctgttctacaactggagcatcaccaagaggaccctgactgtgtggctgatctggttcaccggcagcctgggcttctacagcttcagcctgaacagcgtgaacctgggcggcaatgagtacctgaacctcttcctgctgggcgtggtggagatcccagcctacacctttgtgtgcatcgccatggacaaggtgggccgcaggacagtgctggcctacagcctcttctgcagcgccctggcctgtggggtggtgatggtgatcccccagaagcactacatcctgggcgtggtgacagccatggtgggcaagtttgccatcggggccgccttcggcctcatctacctgtacacagctgagctgtaccccaccatcgtgcgcagcctggccgtgggcagcggctccatggtgtgccgcctggccagcatcctggcccccttctctgtggacctgagcagcatctggatcttcatcccccagctgtttgtgggcaccatggccctgctgtctggagtgctgaccctgaagctgcctgagaccctgggcaagaggctggccaccacctgggaggaggccgccaagctggagagtgaaaatgaaagcaagagcagcaagctgctgctgaccaccaacaacagcggcctggagaagacagaggccatcaccccccgggacagcggcctgggggagtag

SEQ ID NO: 170382 - DNA, 1734 bp, synthetic construct
  misc_feature 1..1734: note = Description of Artificial Sequence: Synthetic coding sequence
  source 1..1734: mol_type = other DNA
atgggcagccgccactttgagggcatctatgaccacgtgggccacttcggccgcttccagagggtgctgtacttcatctgtgccttccagaacatcagctgtggcatccactacctggcctctgtgttcatgggcgtgaccccccaccacgtgtgccggcccccaggaaatgtgtcccaggtggtgttccacaaccacagcaactggagcctggaggacaccggggccctgctgagcagcggccagaaggactatgtgacagtgcagctgcagaatggagagatctgggagctgagccgctgcagcaggaacaagcgggagaacaccagcagcctgggctatgagtacacaggcagcaagaaggagttcccctgtgtggatggctacatctatgaccagaacacctggaagagcacagctgtgacccagtggaacctggtgtgtgacaggaagtggctggccatgctgatccagcccctcttcatgtttggagtgctgctgggctctgtgaccttcggctacttcagtgaccggctgggcagaagagtggtgctgtgggccaccagcagctccatgttcctgtttggaattgctgctgcctttgctgtggactactacaccttcatggccgcccgcttcttcctggccatggtggccagcggctacctggtggtgggctttgtgtatgtgatggagttcatcggcatgaagagcaggacctgggcctctgtgcacctgcacagcttctttgctgtgggcaccctgctggtggccctgaccggctacctggtgaggacctggtggctgtaccagatgatcctgagcacagtgacagtgcccttcatcctgtgctgctgggtgctgcctgagacccccttctggctgctgtctgagggccgctatgaggaggcccagaagatcgtggacatcatggccaagtggaacagagccagcagctgcaagctgtctgagctgctgagcctggacctgcagggccctgtgagcaacagccccacagaggtgcagaagcacaacctgagctacctgttctacaactggagcatcaccaagaggaccctgactgtgtggctgatctggttcaccggcagcctgggcttctacagcttcagcctgaacagcgtgaacctgggcggcaatgagtacctgaacctcttcctgctgggcgtggtggagatcccagcctacacctttgtgtgcatcgccatggacaaggtgggccgcaggacagtgctggcctacagcctcttctgcagcgccctggcctgtggggtggtgatggtgatcccccagaagcactacatcctgggcgtggtgacagccatggtgggcaagtttgccatcggggccgccttcggcctcatctacctgtacacagctgagctgtaccccaccatcgtgcgcagcctggccgtgggcagcggctccatggtgtgccgcctggccagcatcctggcccccttctctgtggacctgagcagcatctggatcttcatcccccagctgtttgtgggcaccatggccctgctgtctggagtgctgaccctgaagctgcctgagaccctgggcaagaggctggccaccacctgggaggaggccgccaagctggagagtgaaaatgaaagcaagagcagcaagctgctgctgaccaccaacaacagcggcctggagaagacagaggccatcaccccccgggacagcggcctgggggagtag

SEQ ID NO: 170383 - DNA, 525 bp, synthetic construct
  misc_feature 1..525: note = Description of Artificial Sequence: Synthetic coding sequence
  source 1..525: mol_type = other DNA
atgggcgtgaccccccaccacgtgtgcaggcctcctggaaatgtgtcccaggtggtgttccacaaccacagcaactggagcctggaggacacaggagccctgctgagcagcggccagaaggactatgtgacagtgcagctgcagaatggagagatctgggagctgagccgctgcagcaggaacaagcgggagaacaccagcagcctgggctatgagtacacaggcagcaagaaggagttcccctgtgtggatggctacatctatgaccagaacacctggaagagcacagctgtgacccagtggaacctggtgtgtgacaggaagtggctggccatgctgatccagcccctcttcatgtttggagtgctgctgggctctgtgaccttcggctacttcagtgaccggctgggccggcgggtggtgctgtgggccaccagcagctccatgttcctgtttggaattgctgctgcctttgctgtggactactacaccttcatggccgcccgcttcttcctggccatgtag

SEQ ID NO: 170384 - DNA, 804 bp, synthetic construct
  misc_feature 1..804: note = Description of Artificial Sequence: Synthetic coding sequence
  source 1..804: mol_type = other DNA
atgtctgctggcccccaggccatgctgggcagaagagtggtgctgtgggccaccagcagctccatgttcctgtttggaattgctgctgcctttgctgtggactactacaccttcatggccgcccgcttcttcctggccatggtggccagcggctacctggtggtgggctttgtgtatgtgatggagttcatcggcatgaagagcaggacctgggcctctgtgcacctgcacagcttctttgctgtgggcaccctgctggtggccctgaccggctacctggtgaggacctggtggctgtaccagatgatcctgagcacagtgacagtgcccttcatcctgtgctgctgggtgctgcctgagacccccttctggctgctgtctgagggccgctatgaggaggcccagaagatcgtggacatcatggccaagtggaacagagccagcagctgcaagctgtctgagctgctgagcctggacctgcagggccctgtgagcaacagccccacagaggtgcagaagcacaacctgagctacctgttctacaactggagcatcaccaagaggaccctgactgtgtggctgatctggttcaccggcagcctgggcttctacagcttcagcctgaacagcgtgaacctgggcggcaatgagtacctgaacctcttcctgctgggcgtggtggagatcccagcctacacctttgtgtgcatcgccatggacaaggtgggccgcaggacagtgctggcctacagcctcttctgcagcgccctggcctgtggggtggtgatggtgatcccccagtag

SEQ ID NO: 170385 - DNA, 1056 bp, synthetic construct
  misc_feature 1..1056: note = Description of Artificial Sequence: Synthetic coding sequence
  source 1..1056: mol_type = other DNA
atgggcgtgaccccccaccacgtgtgcaggcctcctggaaatgtgtcccaggtggtgttccacaaccacagcaactggagcctggaggacacaggagccctgctgagcagcggccagaaggactatgtgacagtgcagctgcagaatggagagatctgggagctgagccgctgcagcaggaacaagcgggagaacaccagcagcctgggctatgagtacacaggcagcaagaaggagttcccctgtgtggatggctacatctatgaccagaacacctggaagagcacagctgtgacccagtggaacctggtgtgtgacaggaagtggctggccatgctgatccagcccctcttcatgtttggagtgctgctgggctctgtgaccttcggctacttcagtgaccggctgggccggcgggtggtgctgtgggccaccagcagctccatgttcctgtttggaattgctgctgcctttgctgtggactactacaccttcatggccgcccgcttcttcctggccatggtggccagcggctacctggtggtgggctttgtgtatgtgatggagttcatcggcatgaagagcaggacctgggcctctgtgcacctgcacagcttctttgctgtgggcaccctgctggtggccctgaccggctacctggtgaggacctggtggctgtaccagatgatcctgagcacagtgacagtgcccttcatcctgtgctgctgggtgctgcctgagacccccttctggctgctgtctgagggccgctatgaggaggcccagaagatcgtggacatcatggccaagtggaacagagccagcagctgcaagctgtctgagctgctgagcctggacctgcagggccctgtgagcaacagccccacagaggtgcagaagcacaacctgagctacctgttctacaactggagcatcaccaagaggaccctgactgtgtggctgatctggttcaccggcagcctgggcttctacagcttcagcctgaacagcgtgaacctgggcggcaatgagtacctgaacctcttcctgctgtag

SEQ ID NO: 170386 - DNA, 1548 bp, synthetic construct
  misc_feature 1..1548: note = Description of Artificial Sequence: Synthetic coding sequence
  source 1..1548: mol_type = other DNA
atgggcagccgccactttgagggcatctatgaccacgtgggccacttcggccgcttccagagggtgctgtacttcatctgtgccttccagaacatcagctgtggcatccactacctggcctctgtgttcatgggcgtgaccccccaccacgtgtgccggcccccaggaaatgtgtcccaggtggtgttccacaaccacagcaactggagcctggaggacaccggggccctgctgagcagcggccagaaggactatgtgacagtgcagctgcagaatggagagatctgggagctgagccgctgcagcaggaacaagcgggagaacaccagcagcctgggctatgagtacacaggcagcaagaaggagttcccctgtgtggatggctacatctatgaccagaacacctggaagagcacagctgtgacccagtggaacctggtgtgtgacaggaagtggctggccatgctgatccagcccctcttcatgtttggagtgctgctgggctctgtgaccttcggctacttcagtgaccggctgggcagaagagtggtgctgtgggccaccagcagctccatgttcctgtttggaattgctgctgcctttgctgtggactactacaccttcatggccgcccgcttcttcctggccatggtggccagcggctacctggtggtgggctttgtgtatgtgatggagttcatcggcatgaagagcaggacctgggcctctgtgcacctgcacagcttctttgctgtgggcaccctgctggtggccctgaccggctacctggtgaggacctggtggctgtaccagatgatcctgagcacagtgacagtgcccttcatcctgtgctgctgggtgctgcctgagacccccttctggctgctgtctgagggccgctatgaggaggcccagaagatcgtggacatcatggccaagtggaacagagccagcagctgcaagctgtctgagctgctgagcctggacctgcagggccctgtgagcaacagccccacagaggtgcagaagcacaacctgagctacctgttctacaactggagcatcaccaagaggaccctgactgtgtggctgatctggttcaccggcagcctgggcttctacagcttcagcctgaacagcgtgaacctgggcggcaatgagtacctgaacctcttcctgctgggcgtggtggagatcccagcctacacctttgtgtgcatcgccatggacaaggtgggccgcaggacagtgctggcctacagcctcttctgcagcgccctggcctgtggggtggtgatggtgatcccccagaagcactacatcctgggcgtggtgacagccatggtgggcaagtttgccatcggggccgccttcggcctcatctacctgtacacagctgagctgtaccccaccatcgtgcgcagcctggccgtgggcagcggctccatggtgtgccgcctggccagcatcctggcccccttctctgtggacctgagcagcatctggatcttcatcccccagctgctgggccagcacctgcaggagtag

SEQ ID NO: 170387 - DNA, 1299 bp, synthetic construct
  misc_feature 1..1299: note = Description of Artificial Sequence: Synthetic coding sequence
  source 1..1299: mol_type = other DNA
gactatgtgacagtgcagctgcagaatggagagatctgggagctgagccgctgcagcaggaacaagcgggagaacaccagcagcctgggctatgagtacacaggcagcaagaaggagttcccctgtgtggatggctacatctatgaccagaacacctggaagagcacagctgtgacccagtggaacctggtgtgtgacaggaagtggctggccatgctgatccagcccctcttcatgtttggagtgctgctgggctctgtgaccttcggctacttcagtgaccggctgggccggcgggtggtgctgtgggccaccagcagctccatgttcctgtttggaattgctgctgcctttgctgtggactactacaccttcatggccgcccgcttcttcctggccatggtggccagcggctacctggtggtgggctttgtgtatgtgatggagttcatcggcatgaagagcaggacctgggcctctgtgcacctgcacagcttctttgctgtgggcaccctgctggtggccctgaccggctacctggtgaggacctggtggctgtaccagatgatcctgagcacagtgacagtgcccttcatcctgtgctgctgggtgctgcctgagacccccttctggctgctgtctgagggccgctatgaggaggcccagaagatcgtggacatcatggccaagtggaacagagccagcagctgcaagctgtctgagctgctgagcctggacctgcagggccctgtgagcaacagccccacagaggtgcagaagcacaacctgagctacctgttctacaactggagcatcaccaagaggaccctgactgtgtggctgatctggttcaccggcagcctgggcttctacagcttcagcctgaacagcgtgaacctgggcggcaatgagtacctgaacctcttcctgctgggcgtggtggagatcccagcctacacctttgtgtgcatcgccatggacaaggtgggcagaagaacagtgctggcctacagcctcttctgcagcgccctggcctgtggggtggtgatggtgatcccccagaagcactacatcctgggcgtggtgacagccatggtgggcaagtttgccatcggggccgccttcggcctcatctacctgtacacagctgagctgtaccccaccatcgtgcgcagcctggccgtgggcagcggctccatggtgtgccgcctggccagcatcctggcccccttctctgtggacctgagcagcatctggatcttcatcccccagctgctgggccagcacctgcaggagtag

SEQ ID NO: 170388 - DNA, 600 bp, synthetic construct
  misc_feature 1..600: note = Description of Artificial Sequence: Synthetic coding sequence
  source 1..600: mol_type = other DNA
atgggcagccgccactttgagggcatctatgaccacgtgggccacttcggccgcttccagagggtgctgtacttcatctgtgccttccagaacatcagctgtggcatccactacctggcctctgtgttcatgggcgtgaccccccaccacgtgtgccggcccccaggaaatgtgtcccaggtggtgttccacaaccacagcaactggagcctggaggacaccggggccctgctgagcagcggccagaaggactatgtgacagtgcagctgcagaatggagagatctgggagctgagccgctgcagcaggaacaagcgggagaacaccagcagcctgggctatgagtacacaggcagcaagaaggagttcccctgtgtggatggctacatctatgaccagaacacctggaagagcacagctgtgacccagtggaacctggtgtgtgacaggaagtggctggccatgctgatccagcccctcttcatgtttggagtgctgctgggctctgtgaccttcggctacttcagtgacagagtgggcttcctgacagcctggtacaagaccagcggcttccccaccagcagcgccccacccctgtag

SEQ ID NO: 170389 - DNA, 1674 bp, synthetic construct
  misc_feature 1..1674: note = Description of Artificial Sequence: Synthetic coding sequence
  source 1..1674: mol_type = other DNA
atgagggactatgatgaggtgacagccttcctgggggagtggggccccttccagaggctcatcttcttcctgctgagcgccagcatcatccccaacggcttcaccggcctgagctctgtgttcctgattgccaccccagagcaccgctgccgggtgcctgatgctgccaacctgagcagcgcctggaggaaccacacagtgcccctgcggctgagagatggccgggaggtgccccacagctgccgccgctaccgcctggccaccatcgccaacttcagcgccctgggcctggagcccggcagagatgtggacctgggccagctggagcaggagagctgcctggatggctgggagttcagccaggatgtgtacctgagcaccatcgtgacagagtggaacctggtgtgtgaagatgactggaaggcccccctgaccatcagcctcttctttgtgggcgtgctgctgggcagcttcatcagcggccagctgagtgacagatttggaaggaagaatgtgctgtttgtgaccatgggcatgcagacaggcttctccttcctgcagatcttcagcaagaactttgagatgtttgtggtgctgtttgtgctggtgggcatgggccagatcagcaactacgtggccgcctttgtgctgggcacagagatcctgggcaagtctgtgcgcatcatcttcagcaccctgggcgtgtgcatcttctacgccttcggctacatggtgctgcccctgtttgcctacttcatccgggactggaggatgctgctggtggccctgaccatgcctggggtgctgtgtgtggccctgtggtggttcatccctgagagcccccgctggctgatcagccagggccgctttgaggaggccgaggtgatcatcaggaaggccgccaaggccaacggcatcgtggtgcccagcaccatctttgaccccagcgagctgcaggacctgagcagcaagaagcagcagagccacaacatcctggacctgctgcggacctggaacatccgcatggtgaccatcatgagcatcatgctgtggatgaccatctctgtgggctacttcggcctgagcctggacacccccaacctgcatggagacatctttgtgaactgcttcctgagcgccatggtggaggtgcctgcctacgtgctggcctggctgctgctgcagtacctgccccggcgctacagcatggccacagccctcttcctgggcggctctgtgctgctcttcatgcagctggtgcccccagacctgtactacctggccaccgtgctggtgatggtgggcaagtttggagtgacagctgccttctccatggtgtatgtgtacacagctgagctgtaccccaccgtggtgaggaacatgggcgtgggcgtgagcagcacagccagccggctgggcagcatcctgagcccctactttgtgtacctgggcgcctatgaccgcttcctgccctacatcctgatgggcagcctgaccatcctgacagccatcctgaccctcttcctgcctgagagctttggcacccccctgcctgacaccatcgaccagatgctgcgggtgaagggcatgaagcacaggaagacccccagccacaccaggatgctgaaggatggccaggagcggcccaccatcctgaagagcacagccttctag

SEQ ID NO: 170390 - DNA, 1746 bp, synthetic construct
  misc_feature 1..1746: note = Description of Artificial Sequence: Synthetic coding sequence
  source 1..1746: mol_type = other DNA
atgagggactatgatgaggtgacagccttcctgggggagtggggccccttccagaggctcatcttcttcctgctgagcgccagcatcatccccaacggcttcaccggcctgagctctgtgttcctgattgccaccccagagcaccgctgccgggtgcctgatgctgccaacctgagcagcgcctggaggaaccacacagtgcccctgcggctgagagatggccgggaggtgccccacagctgccgccgctaccgcctggccaccatcgccaacttcagcgccctgggcctggagcccggcagagatgtggacctgggccagctggagcaggagagctgcctggatggctgggagttcagccaggatgtgtacctgagcaccatcgtgacagagcaggacagcggggcctacaatgccatgaagaacaggatgggcaagaagccagccctgtgcctgcctgcccagtggaacctggtgtgtgaagatgactggaaggcccccctgaccatcagcctcttctttgtgggcgtgctgctgggcagcttcatcagcggccagctgagtgacagatttggaaggaagaatgtgctgtttgtgaccatgggcatgcagacaggcttctccttcctgcagatcttcagcaagaactttgagatgtttgtggtgctgtttgtgctggtgggcatgggccagatcagcaactacgtggccgcctttgtgctgggcacagagatcctgggcaagtctgtgcgcatcatcttcagcaccctgggcgtgtgcatcttctacgccttcggctacatggtgctgcccctgtttgcctacttcatccgggactggaggatgctgctggtggccctgaccatgcctggggtgctgtgtgtggccctgtggtggttcatccctgagagcccccgctggctgatcagccagggccgctttgaggaggccgaggtgatcatcaggaaggccgccaaggccaacggcatcgtggtgcccagcaccatctttgaccccagcgagctgcaggacctgagcagcaagaagcagcagagccacaacatcctggacctgctgcggacctggaacatccgcatggtgaccatcatgagcatcatgctgtggatgaccatctctgtgggctacttcggcctgagcctggacacccccaacctgcatggagacatctttgtgaactgcttcctgagcgccatggtggaggtgcctgcctacgtgctggcctggctgctgctgcagtacctgccccggcgctacagcatggccacagccctcttcctgggcggctctgtgctgctcttcatgcagctggtgcccccagacctgtactacctggccaccgtgctggtgatggtgggcaagtttggagtgacagctgccttctccatggtgtatgtgtacacagctgagctgtaccccaccgtggtgaggaacatgggcgtgggcgtgagcagcacagccagccggctgggcagcatcctgagcccctactttgtgtacctgggcgcctatgaccgcttcctgccctacatcctgatgggcagcctgaccatcctgacagccatcctgaccctcttcctgcctgagagctttggcacccccctgcctgacaccatcgaccagatgctgcgggtgaagggcatgaagcacaggaagacccccagccacaccaggatgctgaaggatggccaggagcggcccaccatcctgaagagcacagccttctag

SEQ ID NO: 170391 - DNA, 1656 bp, synthetic construct
  misc_feature 1..1656: note = Description of Artificial Sequence: Synthetic coding sequence
  source 1..1656: mol_type = other DNA
atgagggactatgatgaagtcatcgccttcctgggggagtggggccccttccagaggctcatcttcttcctgctgagcgccagcatcatccccaacggcttcaacggcatgtctgtggtgttcctggccggcaccccagagcaccgctgccgggtgcctgatgctgccaacctgagcagcgcctggaggaacaacagcgtgcccctgcggctgagagatggccgggaggtgccccacagctgcagccgctaccgcctggccaccatcgccaacttcagcgccctgggcctggagcccggcagagatgtggacctgggccagctggagcaggagagctgcctggatggctgggagttcagccaggatgtgtacctgagcacagtggtgacagagtggaacctggtgtgtgaggacaactggaaggtgcccctgaccaccagcctcttctttgtgggcgtgctgctgggcagctttgtgtctggccagctgagtgacagatttggaaggaagaatgtgctgtttgccaccatggctgtgcagacaggcttctccttcctgcagatcttcagcatctcctgggagatgttcaccgtgctcttcgtcatcgtgggcatgggccagatcagcaactacgtggtggccttcatcctgggcacagagatcctgggcaagtctgtgcgcatcatcttcagcaccctgggcgtgtgcaccttctttgctgtgggctacatgctgctgcccctgtttgcctacttcatccgggactggaggatgctgctgctggccctgactgtgcctggggtgctgtgtgtgcccctgtggtggttcatccctgagagcccccgctggctgatcagccagaggcgcttccgggaggccgaggacatcatccagaaggccgccaagatgaacaacattgctgtgcctgctgtgatctttgattctgtggaggagctgaaccccctgaagcagcagaaggccttcatcctggacctcttccgcaccaggaacatcgccatcatgaccatcatgagcctgctgctgtggatgctgacctctgtgggctactttgccctgagcctggatgcccccaacctgcatggagatgcctacctgaactgcttcctgagcgccctgattgagatcccagcctacatcacagcctggctgctgctgcggaccctgccccggcgctacatcatcgctgctgtgctcttctggggcggcggcgtgctgctcttcatccagctggtgcctgtggactactacttcctgagcatcggcctggtgatgctgggcaagtttggcatcaccagcgccttctccatgctgtatgtgttcaccgctgagctgtaccccaccctggtgaggaacatggctgtgggcgtgaccagcacagccagccgggtgggcagcatcatcgccccctactttgtgtacctgggcgcctacaacaggatgctgccctacatcgtgatgggcagcctgactgtgctgattggcatcctgaccctcttcttccctgagagcctgggcatgaccctgcctgagaccctggagcagatgcagaaggtgaagtggttccgcagcggcaagaagacccgggacagcatggagacagaggagaaccccaaggtgctgatcacagccttctag

SEQ ID NO: 170392 - DNA, 1656 bp, synthetic construct
  misc_feature 1..1656: note = Description of Artificial Sequence: Synthetic coding sequence
  source 1..1656: mol_type = other DNA
atgggctttgatgtgctgctggaccaggtgggcggcatgggccgcttccagatctgcctgattgccttcttctgcatcaccaacatcctgctcttccccaacatcgtgctggagaacttcaccgccttcacccccagccaccgctgctgggtgcccctgctggacaatgacacagtgtctgacaatgacaccggcaccctgagcaaggatgacctgctgcgcatcagcatccccctggacagcaacctgcggccccagaagtgccagcgcttcatccacccccagtggcagctgctgcacctgaatggcaccttccccaacaccaatgaaccagacacagagccctgtgtggatggctgggtgtatgacaggagcagcttcctgagcaccatcgtgacagagtgggacctggtgtgtgagagccagagcctgaagtccatggtgcagagcctcttcatggccggcagcctgctgggcggcctcatctacggccacctgagtgacagagtgggcaggaagatcatctgcaagctgtgcttcctgcagctggccatcagcaacacctgtgccgcctttgcccccaccttcctggtgtactgcatcctgcgcttcctggccggcttcagcaccatgaccatcctgggcaacaccttcatcctgagcctggagtggaccctgcccaggagccgctccatgaccatcatggtgctgctgtgcagctacagcgtgggccagatgctgctgggcggcctggcctttgccatccaggactggcacatcctgcagctgactgtgtccacccccatcatcgtgctcttcctgagctcctggaagatggtggagagcgcccgctggctgatcatcaacaaccagctggatgagggcctgaaggagctgcggcgggtggcccacatcaacgggaagaagaacacagaggagaccctgaccacagagctggtgcgcagcaccatgaagaaggagctggatgctgtgcgcatcaagaccagcatcttcagcctcttccgggcccccaagctgaggatgagggtgtttggcctgtgctttgtgcgctttgccatcaccgtgcccttctacggcctcatcctgaacctgcagcacctgggcagcaatgtgtccctcttccagatcctgtgtggggctgtgaccttcaccgcccgctgtgtgtccctgctgaccctgaaccacatgggccgccgcatcagccagatcctcttcaccttccctgtgggcctcttcatcctggtgaacaccttcctgccccaggagatgcagatcctgcgggtggtgctggccaccctgggcatcggctctgtgtctgctgccagcaacagcgcctctgtgcaccacaatgagctggtgcccaccatcctgcggagcacagtggccggcatcaatgctgtgtctggccgcactggagctgccctggcccccctgctgatgaccctgatggcctacagcccccacctgccctggatctcctatggagtcttccccatcctggccgtgcctgtgatcctgctgctgcctgagacccgggacctgcccctgcccaacaccatccaggatgtggagaatgagaaggacagcaggaacatcaagcaggaggacacctgcatgaaggtgacccagttctag

SEQ ID NO: 170393 - DNA, 738 bp, synthetic construct
  misc_feature 1..738: note = Description of Artificial Sequence: Synthetic coding sequence
  source 1..738: mol_type = other DNA
atggaggtggaggaggccttccaggccgtgggggagatgggcatctaccagatgtacctgtgcttcctgctggccgtgctgctgcagctgtatgtggccacagaggccatcctgattgccctggtgggcgccacccccagctaccactgggacctggccgagctgctgcccaaccagagccacggcaaccagagcgctggggaggaccaggccttcggggactggctgctgacagccaacggcagcgagatccacaagcacgtgcacttcagcagcagcttcaccagcatcgccagcgagtggttcctgattgccaacagaagctacaaggtgtctgctgccagcagcttcttcttcagcggcgtgtttgtgggcgtcatcagctttggccagctgagtgaccgcttcggcaggaagaaggtgtacctgaccggctttgccctggacatcctgtttgccatcgccaacggcttcagccccagctatgagttctttgctgtgacccgcttcctggtgggcatgatgaatggaggcatgagcctggtggcctttgtgctgctgaatgaatgtgtgggcacagcctactgggccctggccggcagcatcggcggcctcttctttgctgtgggcatcgcccagtatgccctgctgggctacttcatccgctcctggaggaccctggccatcctggtgaacctgcagggcaccgtggtgttcctgctgagcctggtggactag

SEQ ID NO: 170394 - DNA, 1644 bp, synthetic construct
  misc_feature 1..1644: note = Description of Artificial Sequence: Synthetic coding sequence
  source 1..1644: mol_type = other DNA
atggaggtggaggaggccttccaggccgtgggggagatgggcatctaccagatgtacctgtgcttcctgctggccgtgctgctgcagctgtatgtggccacagaggccatcctgattgccctggtgggcgccacccccagctaccactgggacctggccgagctgctgcccaaccagagccacggcaaccagagcgctggggaggaccaggccttcggggactggctgctgacagccaacggcagcgagatccacaagcacgtgcacttcagcagcagcttcaccagcatcgccagcgagtggttcctgattgccaacagaagctacaaggtgtctgctgccagcagcttcttcttcagcggcgtgtttgtgggcgtcatcagctttggccagctgagtgaccgcttcggcaggaagaaggtgtacctgaccggctttgccctggacatcctgtttgccatcgccaacggcttcagccccagctatgagttctttgctgtgacccgcttcctggtgggcatgatgaatggaggcatgagcctggtggcctttgtgctgctgaatgaatgtgtgggcacagcctactgggccctggccggcagcatcggcggcctcttctttgctgtgggcatcgcccagtatgccctgctgggctacttcatccgctcctggaggaccctggccatcctggtgaacctgcagggcaccgtggtgttcctgctgagcctcttcatccctgagagcccccgctggctgtacagccagggccgcctgtctgaggccgaggaggccctgtacctgattgccaagaggaacaggaagctgaagtgcaccttcagcctgacccacccagccaacagaagctgccgggagaccggcagcttcctggacctcttccgctacagagtgctgctgggccacaccctcatcctgatgttcatctggtttgtgtgcagcctggtgtactacggcctgaccctgtctgctggggacctgggcggcagcatctatgccaacctggccctgagcggcctcatcgagatccccagctaccccctgtgcatctacctgatcaaccagaagtggtttggaaggaagaggaccctgagcgccttcctgtgcctgggcggcctggcctgcctgattgtgatgttcctgcctgagaagaaggacaccggggtgtttgctgtggtgaacagccacagcctgagcctgctgggcaagctgaccatctctgctgccttcaacatcgtgtacatctacaccagcgagctgtaccccaccgtcatcagaaatgtgggcctgggcacctgcagcatgttcagccgggtgggcggcatcatcgcccccttcatccccagcctgaagtatgtgcagtggagcctgcccttcatcgtgtttggagccaccggcctgaccagcggcctgctgagcctgctgctgcctgagaccctgaacagccccctgctggagaccttcagtgacctgcaggtgtacagctaccgccgcctgggggaggaggccctgagcctgcaggccctggacccccagcagtgtgtggacaaggagagcagcctgggcagcgagagcgaggaggaggaggagttctatgatgctgatgaggagacccagatgatcaagtag

SEQ ID NO: 170395 - DNA, 1008 bp, synthetic construct
  misc_feature 1..1008: note = Description of Artificial Sequence: Synthetic coding sequence
  source 1..1008: mol_type = other DNA
atgcctgctgtgctgggctttgagggcagcgccaacaagattggagtgggcgtggtgagagatggcaaggtgctggccaaccccaggaggacctacgtgaccccacctggcaccggcttcctgcccggggacacagcccggcaccacagagctgtgatcctggacctgctgcaggaggccctgacagagagcggcctgaccagccaggacatcgactgcatcgcctacaccaagggccctggcatgggcgcccccctggtgtctgtggccgtggtggccaggacagtggcccagctgtggaacaagcccctggtgggcgtgaaccactgcatcggccacatcgagatgggccgcctcatcactggagccaccagccccaccgtgctgtatgtgtctgggggcaacacccaggtgattgcctacagcgagcaccgctaccgcatctttggagagaccattgatattgctgtgggcaactgcctggacagatttgcccgggtgctgaagatcagcaatgaccccagccctggctacaacatcgagcagatggccaagaggggcaagaagctggtggagctgccctacacagtgaagggcatggatgtgtccttcagcggcatcctgtccttcattgaagatgtggcccacaggatgctggccactggagaatgtaccccagaggacctgtgcttcagcctgcaggagaccgtgtttgccatgctggtggagatcacagagcgggccatggcccactgcggcagccaggaggccctgattgtgggcggcgtgggctgcaatgtgcggctgcaggagatgatggccaccatgtgccaggagcggggggcccggctgtttgccacagatgagcgcttctgcatcgacaatggagccatgattgcccaggccggctgggagatgttccgggccggccacaggacccccctgagtgacagcggcgtgacccagcgctacagaacagatgaggtggaggtgacctggagggactag

SEQ ID NO: 170396 - DNA, 1563 bp, synthetic construct
  misc_feature 1..1563: note = Description of Artificial Sequence: Synthetic coding sequence
  source 1..1563: mol_type = other DNA
atggccagtgaccccatcttcaccctggccccacccctgcactgccactatggagccttccccccaaatgccagcggctgggagcagcccccaaatgccagcggcgtgtctgtggccagcgctgccctggccgccagcgctgccagccgggtggccaccagcacagaccccagctgcagcggctttgcccccccagacttcaaccactgcctgaaggactgggactacaacggcctgcctgtgctgaccaccaatgccatcggccagtgggacctggtgtgtgacctgggctggcaggtgatcctggagcagatcctcttcatcctgggctttgccagcggctacctgttcctgggctacccagctgacagatttggaagaagaggcatcgtgctgctgaccctgggcctggtgggcccctgtggggtgggcggcgctgctgctggcagcagcactggagtgatggccctgcgcttcctgctgggcttcctgctggccggcgtggacctgggcgtgtacctgatgaggctggagctgtgtgaccccacccagaggctgcgggtggccctggccggggagctggtgggcgtgggcggccacttcctgttcctgggcctggccctggtgtccaaggactggaggttcctgcagaggatgatcacagccccctgcatcctcttcctgttctacggctggccaggcctcttcctggagagcgcccgctggctgattgtgaagaggcagatcgaggaggcccagagcgtgctgcgcatcctggccgagaggaaccggccccacggccagatgctgggggaggaggcccaggaggccctgcaggacctggagaacacctgccccctgcctgccaccagcagcttctcctttgccagcctgctgaactacagaaacatctggaagaacctgctgatcctgggcttcaccaacttcatcgcccacgccatccgccactgctaccagcctgtgggcggcggcggcagccccagcgacttctacctgtgcagcctgctggccagcggcacagctgccctggcctgtgtgttcctgggcgtgacagtggaccgcttcggccggcggggcatcctgctgctgtccatgaccctgactggaattgccagcctggtgctgctgggcctgtgggactacctgaatgaggccgccatcaccaccttctctgtgctgggcctcttcagcagccaggccgccgccatcctgagcaccctgctggccgctgaggtgatccccaccaccgtgcggggccggggcctgggcctcatcatggccctgggcgccctgggcggcctgagcggccctgcccagaggctgcacatgggccacggggccttcctgcagcacgtggtgctggccgcctgtgccctgctgtgcatcctgagcatcatgctgctgcctgagaccaagaggaagctgctgcctgaggtgctgagagatggagagctgtgccggcggcccagcctgctgcggcagcccccacccacccgctgtgaccacgtgcccctgctggccacccccaacccagccctgtag

SEQ ID NO: 170397 - DNA, 1617 bp, synthetic construct
  misc_feature 1..1617: note = Description of Artificial Sequence: Synthetic coding sequence
  source 1..1617: mol_type = other DNA
atggccagtgaccccatcttcaccctggccccacccctgcactgccactatggagccttccccccaaatgccagcggctgggagcagcccccaaatgccagcggcgtgtctgtggccagcgctgccctggccgccagcgctgccagccgggtggccaccagcacagaccccagctgcagcggctttgcccccccagacttcaaccactgcctgaaggactgggactacaacggcctgcctgtgctgaccaccaatgccatcggccagtgggacctggtgtgtgacctgggctggcaggtgatcctggagcagatcctcttcatcctgggctttgccagcggctacctgttcctgggctacccagctgacagatttggaagaagaggcatcgtgctgctgaccctgggcctggtgggcccctgtggggtgggcggcgctgctgctggcagcagcactggagtgatggccctgcgcttcctgctgggcttcctgctggccggcgtggacctgggcgtgtacctgatgaggctggagctgtgtgaccccacccagaggctgcgggtggccctggccggggagctggtgggcgtgggcggccacttcctgttcctgggcctggccctggtgtccaaggactggaggttcctgcagaggatgatcacagccccctgcatcctcttcctgttctacggctggccaggcctcttcctggagagcgcccgctggctgattgtgaagaggcagatcgaggaggcccagagcgtgctgcgcatcctggccgagaggaaccggccccacggccagatgctgggggaggaggcccaggaggccctgcaggacctggagaacacctgccccctgcctgccaccagcagcttctcctttgccagcctgctgaactacagaaacatctggaagaacctgctgatcctgggcttcaccaacttcatcgcccacgccatccgccactgctaccagcctgtgggcggcggcggcagccccagcgacttctacctgtgcagcctgctggccagcggcacagctgccctggcctgtgtgttcctgggcgtgacagtggaccgcttcggccggcggggcatcctgctgctgtccatgaccctgactggaattgccagcctggtgctgctgggcctgtgggactgtgagcaccccatcttccccaccgtgtgggcccagcagggcaaccccaacagagacctgaatgaggccgccatcaccaccttctctgtgctgggcctcttcagcagccaggccgccgccatcctgagcaccctgctggccgctgaggtgatccccaccaccgtgcggggccggggcctgggcctcatcatggccctgggcgccctgggcggcctgagcggccctgcccagaggctgcacatgggccacggggccttcctgcagcacgtggtgctggccgcctgtgccctgctgtgcatcctgagcatcatgctgctgcctgagaccaagaggaagctgctgcctgaggtgctgagagatggagagctgtgccggcggcccagcctgctgcggcagcccccacccacccgctgtgaccacgtgcccctgctggccacccccaacccagccctgtag

SEQ ID NO: 170398 - DNA, 1086 bp, synthetic construct
  misc_feature 1..1086: note = Description of Artificial Sequence: Synthetic coding sequence
  source 1..1086: mol_type = other DNA
atggccatcgacagaagaagagaagctgctgggggcggccctggccggcagcctgccccagcagaagaaaatggcagcctgcccccaggagatgctgctgccagcgcccccctgggcggccgggccggccctgggggcggcgctgagatccagcccctgccccccctgcaccctgggggcggcccccaccccagctgctgcagcgctgctgctgcccccagcctgctgctgctggactatgatggctctgtgctgcccttcctgggcggcctgggcggcggctaccagaagaccctggtgctgctgacctggatcccagccctcttcatcggcttcagccagttcagtgacagcttcctgctggaccagcccaacttctggtgcagaggagctggaaaaggaacagagctggccggcgtgaccaccaccggccggggcggggacatgggcaactggaccagcctgcccaccaccccatttgccacagccccctgggaggccgccggcaacagaagcaacagcagtggagcagatggaggagacaccccacccctgcccagccccccagacaagggggacaatgccagcaactgtgactgccgggcctgggactatggcatccgggccggcctggtgcagaatgtggtgtccaagtgggacctggtgtgtgacaatgcctggaaggtgcacatcgccaagttcagcctgctggtgggcctcatcttcggctacctgatcaccggctgcatcgctgactgggtgggccggcggcctgtgctgctcttcagcatcatcttcatcctgatcttcggcctgactgtggccctgtctgtgaatgtgaccatgttcagcaccctgcgcttctttgagggcttctgcctggccggcatcatcctgaccctgtatgccctgcgcatcgagctgtgccccccaggcaagcgcttcatgatcaccatggtggccagctttgtggccatggccggccagttcctgatgcctggcctggccgccctgtgccgggactggcaggtgctgcaggccctgatcatctgccccttcctgctgatgctgctgtactggagctag

SEQ ID NO: 170399 - DNA, 1218 bp, synthetic construct
  misc_feature 1..1218: note = Description of Artificial Sequence: Synthetic coding sequence
  source 1..1218: mol_type = other DNA
atgttcagcaccctgcgcttctttgagggcttctgcctggccggcatcatcctgaccctgtatgccctgagaattgagctgtgccccccaggcaagcgcttcatgatcaccatggtggccagctttgtggccatggccggccagttcctgatgcctggcctggccgccctgtgccgggactggcaggtgctgcaggccctgatcatctgccccttcctgctgatgctgctgtactggagcatcttccctgagagcctgcgctggctgatggccacccagcagtttgaaagtgccaagaggctcatcctgcacttcacccagaagaacaggatgaaccctgagggggacatcaagggcgtcatccctgagctggagaaggagctgagccggcggcccaagaaggtgtgcatcgtgaaggtggtgggcaccaggaacctgtggaagaacatcgtggtgctgtgtgtgaacagcctgaccggctacggcatccaccactgctttgcccgctccatgatgggccacgaggtgaaggtgcccctgctggagaacttctacgccgactactacaccacagccagcatcgccctggtgtcctgcctggccatgtgtgtggtggtgcgcttcctgggcagaagaggaggcctgctgctcttcatgatcctgacagccctggccagcctgctgcagctgggcctgctgaacctgattggcaagtacagccagcacccagattctggcatgtctgacagcgtgaaggacaagttcagcatcgccttcagcatcgtgggcatgtttgccagccatgctgtgggcagcctgagcgtcttcttctgtgccgagatcacccccaccgtcatccgctgtggcggcctgggcctggtgctggccagcgctggcttcggcatgctgacagcccccatcatcgagctgcacaaccagaagggctacttcctgcaccacatcatctttgcctgctgcaccctcatctgcatcatctgcatcctgctgctgcctgagagccgggaccagaacctgcctgagaacatcagcaatggagagcactacacccggcagcccctgctgccccacaagaagggggagcagcccctgctgctgaccaatgctgagctgaaggactacagcggcctgcatgatgctgctgctgctggggacaccctgcctgagggcgccacagccaacggcatgaaggccatgtag

SEQ ID NO: 170400 - DNA, 2061 bp, synthetic construct
  misc_feature 1..2061: note = Description of Artificial Sequence: Synthetic coding sequence
  source 1..2061: mol_type = other DNA
atggccatcgacagaagaagagaagctgctgggggcggccctggccggcagcctgccccagcagaagaaaatggcagcctgcccccaggagatgctgctgccagcgcccccctgggcggccgggccggccctgggggcggcgctgagatccagcccctgccccccctgcaccctgggggcggcccccaccccagctgctgcagcgctgctgctgcccccagcctgctgctgctggactatgatggctctgtgctgcccttcctgggcggcctgggcggcggctaccagaagaccctggtgctgctgacctggatcccagccctcttcatcggcttcagccagttcagtgacagcttcctgctggaccagcccaacttctggtgcagaggagctggaaaaggaacagagctggccggcgtgaccaccaccggccggggcggggacatgggcaactggaccagcctgcccaccaccccatttgccacagccccctgggaggccgccggcaacagaagcaacagcagtggagcagatggaggagacaccccacccctgcccagccccccagacaagggggacaatgccagcaactgtgactgccgggcctgggactatggcatccgggccggcctggtgcagaatgtggtgtccaagtgggacctggtgtgtgacaatgcctggaaggtgcacatcgccaagttcagcctgctggtgggcctcatcttcggctacctgatcaccggctgcatcgctgactgggtgggccggcggcctgtgctgctcttcagcatcatcttcatcctgatcttcggcctgactgtggccctgtctgtgaatgtgaccatgttcagcaccctgcgcttctttgagggcttctgcctggccggcatcatcctgaccctgtatgccctgcgcatcgagctgtgccccccaggcaagcgcttcatgatcaccatggtggccagctttgtggccatggccggccagttcctgatgcctggcctggccgccctgtgccgggactggcaggtgctgcaggccctgatcatctgccccttcctgctgatgctgctgtactggagcatcttccctgagagcctgcgctggctgatggccacccagcagtttgagagcgccaagaggctcatcctgcacttcacccagaagaacaggatgaaccctgagggggacatcaagggcgtcatccctgagctggagaaggagctgagcagaagacccaagaaggtgtgcatcgtgaaggtggtgggcaccaggaacctgtggaagaacatcgtggtgctgtgtgtgaacagcctgaccggctacggcatccaccactgctttgcccgctccatgatgggccacgaggtgaaggtgcccctgctggagaacttctatgctgactactacaccacagccagcatcgccctggtgtcctgcctggccatgtgtgtggtggtgcgcttcctgggccggcggggcggcctgctgctcttcatgatcctgacagccctggccagcctgctgcagctgggcctgctgaacctgattggcaagtacagccagcacccagacagcggcatgtctgattctgtgaaggacaagttcagcatcgccttcagcatcgtgggcatgtttgccagccatgctgtgggcagcctgtctgtgttcttctgtgccgagatcacccccaccgtcatccgctgtggcggcctgggcctggtgctggccagcgctggcttcggcatgctgacagcccccatcatcgagctgcacaaccagaagggctacttcctgcaccacatcatctttgcctgctgcaccctcatctgcatcatctgcatcctgctgctgcctgagagccgggaccagaacctgcctgagaacatcagcaatggagagcactacacccggcagcccctgctgccccacaagaagggggagcagcccctgctgctgaccaatgctgagctgaaggactacagcggcctgcatgatgctgctgctgctggggacaccctgcctgagggcgccacagccaacggcatgaaggccatgtag

SEQ ID NO: 170401 - DNA, 1218 bp, synthetic construct; identical to SEQ ID NO: 170399
  misc_feature 1..1218: note = Description of Artificial Sequence: Synthetic coding sequence
  source 1..1218: mol_type = other DNA

SEQ ID NO: 170402 - DNA, 969 bp, synthetic construct
  misc_feature 1..969: note = Description of Artificial Sequence: Synthetic coding sequence
  source 1..969: mol_type = other DNA
atgggctttgatgtgctgctggaccaggtgggcggcatgggccgcttccagatctgcctgattgccttcttctgcatcaccaacatcctgctcttccccaacatcgtgctggagaacttcaccgccttcacccccagccaccgctgctgggtgcccctgctggacaatgacacagtgtctgacaatgacaccggcaccctgagcaaggatgacctgctgcgcatcagcatccccctggacagcaacctgcggccccagaagtgccagcgcttcatccacccccagtggcagctgctgcacctgaatggcaccttccccaacaccaatgaaccagacacagagccctgtgtggatggctgggtgtatgacaggagcagcttcctgagcaccatcgtgacagagtgggacctggtgtgtgagagccagagcctgaagtccatggtgcagagcctcttcatggccggcagcctgctgggcggcctcatctacggccacctgagtgacagagtgggcaggaagatcatctgcaagctgtgcttcctgcagctggccatcagcaacacctgtgccgcctttgcccccaccttcctggtgtactgcatcctgcgcttcctggccggcttcagcaccatgaccatcctgggcaacaccttcatcctgagcctggagtggaccctgcccaggagccgctccatgaccatcatggtgctgctgtgcagctacagcgtgggccagatgctgctgggcggcctggcctttgccatccaggactggcacatcctgcagctgactgtgtccacccccatcatcgtgctcttcctgagctcctggtatgagcagagcccccacagcctgcctgtgtctgaggccatggtggacatcgagaggaagatcctgaccccaggcatctgcagcgtgtctggcctggtgctgagccatgatgtgcacagcacctactgtgtgacctag

SEQ ID NO: 170403 - DNA, 780 bp, synthetic construct
  misc_feature 1..780: note = Description of Artificial Sequence: Synthetic coding sequence
  source 1..780: mol_type = other DNA
atgagggcccaggaggacctggagggccgcacccagcacgagaccacccgggaccccagcacccccctgcccacagagcccaagtttgacatgctgtacaagattgaagatgtgcccccctggtacctgtgcatcctgctgggcttccagcactacctgacctgcttcagcggcaccatcgctgtgcccttcctgctggccgaggccctgtgtgtgggccatgaccagcacatggtgtcccagctgattggcaccatcttcacctgtgtgggcatgttctgcaccctgtttggcatgatcacagctgtgggcctgagcaacctgcagtttgtggacatgaacagcagcaggaacctgtttgtgctgggcttctccatgttcttcggcctgaccctgcccaactacctggagagcaaccctggggccatcaacacaggcatcctggaggtggaccagatcctgattgtgctgctgaccacagagatgtttgtgggcggctgcctggccttcatcctggacaacacagtgcccggcagccctgaggagcggggcctcatccagtggaaggccggggcccacgccaacagcgacatgagcagcagcctgaagagctatgacttccccatcggcatgggcatcgtgaagaggatcaccttcctgaagtacatccccatctgccctgtgttcaagggcttcagcagcagcagcaaggaccagatcgccatccctgaggacaccccagagaacacagaaacagcctctgtgtgcaccaaggtgtag

SEQ ID NO: 170404 - DNA, 1797 bp, synthetic construct
  misc_feature 1..1797: note = Description of Artificial Sequence: Synthetic coding sequence
  source 1..1797: mol_type = other DNA
atgagggcccaggaggacctggagggccgcacccagcacgagaccacccgggaccccagcacccccctgcccacagagcccaagtttgacatgctgtacaagattgaagatgtgcccccctggtacctgtgcatcctgctgggcttccagcactacctgacctgcttcagcggcaccatcgctgtgcccttcctgctggccgaggccctgtgtgtgggccatgaccagcacatggtgtcccagctgattggcaccatcttcacctgtgtgggcatcaccaccctcatccagaccaccgtgggcatccggctgcccctcttccaggccagcgcctttgccttcctggtgcctgccaaggccatcctggccctggagcgctggaagtgccccccagaggaggagatctacggcaactggagcctgcccctgaacaccagccacatctggcacccccgcatccgggaggtgcagggcgccatcatggtgtcctctgtggtggaggtggtgattggcctgctgggcctgcccggggccctgctgaactacatcggccccctgactgtgacccccaccgtgtccctgattggcctgagcgtcttccaggccgccggggacagagctggcagccactggggcatcagcgcctgcagcatcctgctgatcatcctcttcagccagtacctgaggaacctgaccttcctgctgcctgtgtaccgctggggcaagggcctgaccctgctgcgcatccagatcttcaagatgttccccatcatgctggccatcatgacagtgtggctgctgtgctacgtgctgaccctgacagatgtgctgcccacagaccccaaggcctacggcttccaggccaggacagatgcccggggggacatcatggccatcgccccctggatccgcatcccctacccctgccagtggggcctgcccaccgtgacagctgctgctgtgctgggcatgttcagcgccaccctggccggcatcatcgagagcatcggggactactatgcctgtgcccggctggccggggcccctcctcctcctgtgcacgccatcaacagaggcatcttcacagagggcatctgctgcatcatcgccggcctgctgggcactggaaatggcagcaccagcagcagccccaacatcggcgtgctgggcatcaccaaggtgggcagcagaagagtggtgcagtacggggccgccatcatgctggtgctgggcaccatcggcaagttcaccgccctcttcagcagcctgcctgaccccatcctgggcggcatgttctgcaccctgtttggcatgatcacagctgtgggcctgagcaacctgcagtttgtggacatgaacagcagcaggaacctgtttgtgctgggcttctccatgttcttcggcctgaccctgcccaactacctggagagcaaccctggggccatcaacacaggcatcctggaggtggaccagatcctgattgtgctgctgaccacagagatgtttgtgggcggctgcctggccttcatcctggacaacacagtgcccggcagccctgaggagcggggcctcatccagtggaaggccggggcccacgccaacagcgacatgagcagcagcctgaagagctatgacttccccatcggcatgggcatcgtgaagaggatcaccttcctgaagtacatccccatctgccctgtgttcaagggcttcagcagcagcagcaaggaccagatcgccatccctgaggacaccccagaaaatacagaaacagcctctgtgtgcaccaaggtgtag

SEQ ID NO: 170405 - DNA, 1809 bp, synthetic construct
  misc_feature 1..1809: note = Description of Artificial Sequence: Synthetic coding sequence
  source 1..1809: mol_type = other DNA
atgagggcccaggaggacctggagggccgcacccagcacgagaccacccgggaccccagcacccccctgcccacagagcccaagtttgacatgctgtacaagattgaagatgtgcccccctggtacctgtgcatcctgctgggcttccagcactacctgacctgcttcagcggcaccatcgctgtgcccttcctgctggccgaggccctgtgtgtgggccatgaccagcacatggtgtcccagctgattggcaccatcttcacctgtgtgggcatcaccaccctcatccagaccaccgtgggcatccggctgcccctcttccaggccagcgcctttgccttcctggtgcctgccaaggccatcctggccctggagcgctggaagtgccccccagaggaggagatctacggcaactggagcctgcccctgaacaccagccacatctggcacccccgcatccgggaggtgggcctgcacgtgcagggcgccatcatggtgtcctctgtggtggaggtggtgattggcctgctgggcctgcccggggccctgctgaactacatcggccccctgactgtgacccccaccgtgtccctgattggcctgagcgtcttccaggccgccggggacagagctggcagccactggggcatcagcgcctgcagcatcctgctgatcatcctcttcagccagtacctgaggaacctgaccttcctgctgcctgtgtaccgctggggcaagggcctgaccctgctgcgcatccagatcttcaagatgttccccatcatgctggccatcatgacagtgtggctgctgtgctacgtgctgaccctgacagatgtgctgcccacagaccccaaggcctacggcttccaggccaggacagatgcccggggggacatcatggccatcgccccctggatccgcatcccctacccctgccagtggggcctgcccaccgtgacagctgctgctgtgctgggcatgttcagcgccaccctggccggcatcatcgagagcatcggggactactatgcctgtgcccggctggccggggcccctcctcctcctgtgcacgccatcaacagaggcatcttcacagagggcatctgctgcatcatcgccggcctgctgggcactggaaatggcagcaccagcagcagccccaacatcggcgtgctgggcatcaccaaggtgggcagcagaagagtggtgcagtacggggccgccatcatgctggtgctgggcaccatcggcaagttcaccgccctcttcagcagcctgcctgaccccatcctgggcggcatgttctgcaccctgtttggcatgatcacagctgtgggcctgagcaacctgcagtttgtggacatgaacagcagcaggaacctgtttgtgctgggcttctccatgttcttcggcctgaccctgcccaactacctggagagcaaccctggggccatcaacacaggcatcctggaggtggaccagatcctgattgtgctgctgaccacagagatgtttgtgggcggctgcctggccttcatcctggacaacacagtgcccggcagccctgaggagcggggcctcatccagtggaaggccggggcccacgccaacagcgacatgagcagcagcctgaagagctatgacttccccatcggcatgggcatcgtgaagaggatcaccttcctgaagtacatccccatctgccctgtgttcaagggcttcagcagcagcagcaaggaccagatcgccatccctgaggacaccccagaaaatacagaaacagcctctgtgtgcaccaaggtgtag

SEQ ID NO: 170406 - DNA, 1179 bp, synthetic construct
  misc_feature 1..1179: note = Description of Artificial Sequence: Synthetic coding sequence
  source 1..1179: mol_type = other DNA
atgagggcccaggaggacctggagggccgcacccagcacgagaccacccgggaccccagcacccccctgcccacagagcccaagtttgacatgctgtacaagattgaagatgtgcccccctggtacctgtgcatcctgctgggcttccagcactacctgacctgcttcagcggcaccatcgctgtgcccttcctgctggccgaggccctgtgtgtgggccatgaccagcacatggtgtcccagctgattggcaccatcttcacctgtgtgggcatcaccaccctcatccagaccaccgtgggcatccggctgcccctcttccaggccagcgcctttgccttcctggtgcctgccaaggccatcctggccctggagcgctggaagtgccccccagaggaggagatctacggcaactggagcctgcccctgaacaccagccacatctggcacccccgcatccgggaggtgggcctgcacgtgtccattgaggaggccggcggctacatgggcgtgcgggtggccgctgagtttggagacctgcggcgctggagccgcagctttgtgcctgccagcagcagccaggtgcagggcgccatcatggtgtcctctgtggtggaggtggtgattggcctgctgggcctgcccggggccctgctgaactacatcggccccctgactgtgacccccaccgtgtccctcatcggcctgtctgtgttccaggccgccggggaccgggccggcagccactggggcatcagcgcctgcagcatcctgctgatcatcctcttcagccagtacctgaggaacctgaccttcctgctgccctgtgcccagcagagcgcccccctgtggcaggccagcctgagccccagcgagatcaccacccctgtgcctgcctggctggtgcaccaccccctgcagtacatgctgagcactggagccagcagccccaaggcctttgctgccagcagccggggctactgggcccgggccaccggcccccccaggcctgtgcccaccctggcctcctgggagctgccccgctgggccgccggggcctggtgcagcatggtgcggctgagctgctggagctgggcccccagcgccagcagccggcccagcagccccaggagcctgacccccagctggggcgcctgcagcgccctgagcctggcctag

SEQ ID NO: 170407 - DNA, 1953 bp, synthetic construct
  misc_feature 1..1953: note = Description of Artificial Sequence: Synthetic coding sequence
  source 1..1953: mol_type = other DNA
atgatgggcatcggcaagaacaccaccagcaagtccatggaggccggcagcagcacagagggcaagtatgaagatgaggccaagcacccagccttcttcaccctgcctgtggtgatcaatggaggagccaccagcagcggggagcaggacaatgaagacacagagctgatggccatctacaccacagaaaatggaattgctgagaagagcagcctggccgagaccctggacagcacaggcagcctggacccccagaggagtgacatgatctacaccattgaagatgtgcccccctggtacctgtgcatcttcctgggcctgcagcactacctgacctgcttcagcggcaccatcgctgtgcccttcctgctggctgatgccatgtgtgtgggctatgaccagtgggccaccagccagctgattggcaccatcttcttctgtgtgggcatcaccaccctgctgcagaccaccttcggctgccgcctgcccctcttccaggccagcgcctttgccttcctggccccagcccgggccatcctgagcctggacaagtggaagtgcaacaccacagatgtgtctgtggccaacggcacagctgagctgctgcacacagagcacatctggtacccccgcatccgggagatccagggcgccatcatcatgagcagcctgattgaggtggtgattggcctgctgggcctgcccggggccctgctgaagtacatcggccccctgaccatcacccccaccgtggccctgattggcctgagcggcttccaggccgccggggagcgggccggcaagcactggggcatcgccatgctgaccatcttcctggtgctgctcttcagccagtatgccagaaatgtgaagttccccctgcccatctacaagagcaagaagggctggacagcctacaagctgcagctgttcaagatgttccccatcatcctggccatcctggtgtcctggctgctgtgcttcatcttcaccgtgacagatgtgtttcctccagacagcaccaagtatggcttctacgccaggacagatgcccggcagggcgtgctgctggtggccccctggttcaaggtgccctaccccttccagtggggcctgcccaccgtgtctgctgctggggtgattggcatgctgtctgctgtggtggccagcatcatcgagagcattggagactactatgcctgtgcccggctgagctgtgcccctcctccacccatccacgccatcaacagaggcatctttgtggagggcctgagctgtgtgctggatggcatcttcggcactggaaatggcagcaccagcagcagccccaacattggagtgctgggcatcaccaaggtgggcagccggcgggtcatccagtgtggggccgccctgatgctggccctgggcatgattggcaagttcagcgccctgtttgccagcctgcctgaccctgtgctgggcgccctcttctgcaccctgtttggcatgatcacagctgtgggcctgagcaacctgcagttcatcgacctgaacagcagcaggaacctgtttgtgctgggcttcagcatcttcttcggcctggtgctgcccagctacctgcggcagaaccccctggtgacaggcatcaccggcatcgaccaggtgctgaatgtgctgctgaccacagccatgtttgtgggcggctgtgtggccttcatcctggacaacaccatccctggcaccccagaggagcggggcatcaggaagtggaagaagggcgtgggcaagggcaacaagagcctggatggcatggagagctacaacctgcccttcggcatgaacatcatcaagaagtaccgctgcttctcctacctgcccatcagccccacctttgtgggctacacctggaagggcctgaggaagagtgacaacagccgcagcagtgatgaggacagccaggccactggatag

SEQ ID NO: 170408 - DNA, 1953 bp, synthetic construct; identical to SEQ ID NO: 170407
  misc_feature 1..1953: note = Description of Artificial Sequence: Synthetic coding sequence
  source 1..1953: mol_type = other DNA

SEQ ID NO: 170409 - DNA, 915 bp, synthetic construct
  misc_feature 1..915: note = Description of Artificial Sequence: Synthetic coding sequence
  source 1..915: mol_type = other DNA
tgaggatatgaccagtgggccaccagccagctgattggcaccatcttcttctgtgtgggcatcaccaccctgctgcagaccaccttcggctgcaggaccatcttcctggtgctgctcttcagccagtatgccagaaatgtgaagttccccctgcccatctacaagagcaagaagggctggacagcctacaagctgcagctgttcaagatgttccccatcatcctggccatcctggtgtcctggctgctgtgcttcatcttcaccgtgacagatgtgttccccccagacagcaccaagtatggcttctacgccaggacagatgcccggcagggcgtgctgctggtggccccctggttcaaggtgccctaccccttccagtggggcctgcccaccgtgtctgctgctggggtcatcggcatgctgtctgctgtggtggccagcatcatcgagagcatcggggactactatgcctgtgcccggctgagctgtgcccctcctccacccatccacgccatcaacagaggcatctttgtggagggcctgagctgtgtgctggatggcatctttggaactggaaatggcagcaccagcagcagccccaacatcggcgtgctgggcatcaccaaggtgggcagcagaagagtcatccagtgtggggccgccctgatgctggccctgggcatgattggcaagttcagcgccctgtttgccagcctgcctgaccctgtgctgggcgccctcttctgcaccctgtttggcatgatcacagctgtgggcctgagcaacctgcagttcatcgacctgaacagcagcaggaacctgtttgtgctgggcttcagcatcttcttcggcctggtgctgcccagctacctgcggcagaaccccctggtgacaggcatcactggaattgattag

SEQ ID NO: 170410 - DNA, 1611 bp, synthetic construct
  misc_feature 1..1611: note = Description of Artificial Sequence: Synthetic coding sequence
  source 1..1611: mol_type = other DNA
atgatgggcatcggcaagaacaccaccagcaagtccatggaggccggcagcagcacagagggcaagtatgaagatgaggccaagcacccagccttcttcaccctgcctgtggtgatcaatggaggagccaccagcagcggggagcaggacaatgaagacacagagctgatggccatctacaccacagaaaatggaattgctgagaagagcagcctggccgagaccctggacagcacaggcagcctggacccccagaggagtgacatgatctacaccattgaagatgtgcccccctggtacctgtgcatcttcctgggcctgcagcactacctgacctgcttcagcggcaccatcgctgtgcccttcctgctggctgatgccatgtgtgtgggctatgaccagtgggccaccagccagctgattggcaccatcttcttctgtgtgggcatcaccaccctgctgcagaccaccttcggctgcaggaccatcttcctggtgctgctcttcagccagtatgccagaaatgtgaagttccccctgcccatctacaagagcaagaagggctggacagcctacaagctgcagctgttcaagatgttccccatcatcctggccatcctggtgtcctggctgctgtgcttcatcttcaccgtgacagatgtgtttcctccagacagcaccaagtatggcttctacgccaggacagatgcccggcagggcgtgctgctggtggccccctggttcaaggtgccctaccccttccagtggggcctgcccaccgtgtctgctgctggggtgattggcatgctgtctgctgtggtggccagcatcatcgagagcattggagactactatgcctgtgcccggctgagctgtgcccctcctccacccatccacgccatcaacagaggcatctttgtggagggcctgagctgtgtgctggatggcatcttcggcactggaaatggcagcaccagcagcagccccaacattggagtgctgggcatcaccaaggtgggcagccggcgggtcatccagtgtggggccgccctgatgctggccctgggcatgattggcaagttcagcgccctgtttgccagcctgcctgaccctgtgctgggcgccctcttctgcaccctgtttggcatgatcacagctgtgggcctgagcaacctgcagttcatcgacctgaacagcagcaggaacctgtttgtgctgggcttcagcatcttcttcggcctggtgctgcccagctacctgcggcagaaccccctggtgacaggcatcaccggcatcgaccaggtgctgaatgtgctgctgaccacagccatgtttgtgggcggctgtgtggccttcatcctggacaacaccatccctggcaccccagaggagcggggcatcaggaagtggaagaagggcgtgggcaagggcaacaagagcctggatggcatggagagctacaacctgcccttcggcatgaacatcatcaagaagtaccgctgcttctcctacctgcccatcagccccacctttgtgggctacacctggaagggcctgaggaagagtgacaacagccgcagcagtgatgaggacagccaggccactggatag

SEQ ID NO: 170411 - DNA, 3300 bp, synthetic construct
  misc_feature 1..3300: note = Description of Artificial Sequence: Synthetic coding sequence
  source 1..3300: mol_type = other DNA
atgggcaagctgatccgcatgggcccccaggagcgctggctgctgcggaccaagaggctgcactggagccggctgctcttcctgctgggcatgctgatcatcggcagcacctaccagcacctgcggcggccccggggcctgagcagcctgtgggccgctgtgagcagccaccagcccatcaagctggccagccgggacctgagcagcgaggagatgatgatgatgagcagcagccccagcaagcccagcagcgagatgggcggcaagatgctggtgccccaggcctctgtgggcagtgatgaggccaccctgtccatgacagtggagaacatccccagcatgcccaagaggacagccaagatgatccccaccaccaccaagaacaactacagccccacagctgctggaacagaaagaaggaaggaggacacccccaccagcagcaggaccctgacctactacaccagcaccagcagccggcagatcgtgaagaagtacacccccaccccaagaggagagatgaagagctacagccccacccaggtgcgggagaaggtgaagtacacccccagcccccggggcagaagagtgggcacctacgtgcccagcaccttcatgaccatggagaccagccacgccatcacccccaggaccaccgtgaaggacagcgacatcacagccacctacaagatcctggagaccaacagcctgaagaggatcatggaggagaccacccccaccaccctgaagggcatgtttgacagcacccccaccttcctgacccatgaggtggaggccaacgtgctgaccagccccaggtctgtgatggagaagaacaacctcttccccccaagaagagtggagagcaacagcagcgcccacccctggggcctggtgggcaagagcaaccccaagaccccccagggcaccgtgctgctgcacaccccagccaccagcgagggccaggtgaccatcagcaccatgacaggcagcagccctgctgagaccaaggccttcaccgctgcctggagcctgaggaaccccagccccaggacctctgtgtctgccatcaagacagccccagccatcgtgtggaggctggccaagaagcccagcacagcccccagcaccagcaccacccccaccgtgcgggccaagctgaccatgcaggtgcaccactgtgtggtggtgaagcccaccccagccatgctgaccacccccagccccagcctgaccacagccctgctgcctgaggagctgagccccagccccagcgtgctgccccccagcctgcctgacctgcaccccaagggggagtaccccccagacctcttctctgtggaggagcggcggcagggctgggtggtgctgcacgtgtttggcatgatgtatgtgtttgtggccctggccatcgtgtgtgatgagtactttgtgcctgccctgggcgtcatcacagacaagctgcagatcagtgaagatgtggccggggccaccttcatggccgccggcggcagcgcccctgagctgttcaccagcctcatcggggtcttcatcagccacagcaatgtgggcatcggcaccatcgtgggcagcgctgtgttcaacatcctcttcgtcatcggcacctgcagcctcttcagccgggagatcctgaacctgacctggtggcccctcttcagagatgtgtccttctacatcctggacctgatcatgctgatcctcttcttcctggacagcctgattgcctggtgggagagcctgctgctgctgctggcctatgccttctacgtgttcaccatgaagtggaacaagcacatcgaggtgtgggtgaaggagcagctgagccggcggcctgtggccaaggtgatggccctggaggacctgagcaagccaggagatggagccatcgctgtggatgagctgcaggacaacaagaagctgaagctgcccagcctgctgacccggggcagcagcagcaccagcctgcacaacagcaccatccgcagcaccatctaccagctgatgctgcacagcctggaccccctgcgggaggtgcggctggccaaggagaaggaggaggagagcctgaaccagggcgcccgggcccagccccaggccaaggccgagagcaagccagaggaggaggagcccgccaagctgcctgctgtgacagtgaccccagcccctgtgcctgacatcaagggggaccagaaggaaaatcctgggggccaggaggatgtggccgaggccgagagcactggagagatgcctggagaggagggggagacagctggggagggggagacagaggagaagtctggaggagagacccagcctgagggggagggggagacagagacccagggcaagggggaggagtgtgaagatgaaaatgaggccgagggcaaaggagacaatgaaggagaagatgaaggagagatccacgcagaagatggagagatgaagggaaatgaaggagaaacagagagccaggagctgtctgctgagaaccacggggaggccaagaatgatgagaagggcgtggaggatggcggcggcagtgatggaggagacagcgaggaggaggaggaggaggaggaggagcaggaggaggaggaggaggaggaggagcaggaggaggaggaggaggaggaggaggaggaggaggagaagggaaatgaggagcccctgagcctggactggccagagacccggcagaagcaggccatctacctgttcctgctgcccatcgtgttccccctgtggctgactgtgcctgatgtgcggcggcaggagagcaggaagttctttgtgttcaccttcctgggcagcatcatgtggatcgccatgttctcctacctgatggtgtggtgggcccaccaggtgggggagaccatcggcatcagcgaggagatcatgggcctgaccatcctggccgccggcaccagcatcccagacctgatcaccagcgtcatcgtggccaggaagggcctgggggacatggctgtgagcagctctgtgggcagcaacatctttgacatcaccgtgggcctgcctgtgccctggctgctcttcagcctcatcaatggcctgcagcctgtgcctgtgagcagcaatggcctcttctgtgccatcgtgctgctcttcctgatgctgctcttcgtcatcagcagcatcgccagctgcaagtggaggatgaacaagatcctgggcttcaccatgttcctgctgtactttgtgttcctgatcatctctgtgatgctggaggaccgcatcatcagctgccctgtgtctgtgtag

SEQ ID NO: 170412 - DNA, 3246 bp, synthetic construct
  misc_feature 1..3246: note = Description of Artificial Sequence: Synthetic coding sequence
  source 1..3246: mol_type = other DNA
atgggcaagctgatccgcatgggcccccaggagcgctggctgctgcggaccaagaggctgcactggagccggctgctcttcctgctgggcatgctgatcatcggcagcacctaccagcacctgcggcggccccggggcctgagcagcctgtgggccgctgtgagcagccaccagcccatcaagctggccagccgggacctgagcagcgaggagatgatgatgatgagcagcagccccagcaagcccagcagcgagatgggcggcaagatgctggtgccccaggcctctgtgggcagtgatgaggccaccctgtccatgacagtggagaacatccccagcatgcccaagaggacagccaagatgatccccaccaccaccaagaacaactacagccccacagctgctggaacagaaagaaggaaggaggacacccccaccagcagcaggaccctgacctactacaccagcaccagcagccggcagatcgtgaagaagtacacccccaccccaagaggagagatgaagagctacagccccacccaggtgcgggagaaggtgaagtacacccccagcccccggggcagaagagtgggcacctacgtgcccagcaccttcatgaccatggagaccagccacgccatcacccccaggaccaccgtgaaggacagcgacatcacagccacctacaagatcctggagaccaacagcctgaagaggatcatggaggagaccacccccaccaccctgaagggcatgtttgacagcacccccaccttcctgacccatgaggtggaggccaacgtgctgaccagccccaggtctgtgatggagaagaacaacctcttccccccaagaagagtggagagcaacagcagcgcccacccctggggcctggtgggcaagagcaaccccaagaccccccagggcaccgtgctgctgcacaccccagccaccagcgagggccaggtgaccatcagcaccatgacaggcagcagccctgctgagaccaaggccttcaccgctgcctggagcctgaggaaccccagccccaggacctctgtgtctgccatcaagacagccccagccatcgtgtggaggctggccaagaagcccagcacagcccccagcaccagcaccacccccaccgtgcgggccaagctgaccatgcaggtgcaccactgtgtggtggtgaagcccaccccagccatgctgaccacccccagccccagcctgaccacagccctgctgcctgaggagctgagccccagccccagcgtgctgccccccagcctgcctgacctgcaccccaagggggagtaccccccagacctcttctctgtggaggagcggcggcagggctgggtggtgctgcacgtgtttggcatgatgtatgtgtttgtggccctggccatcgtgtgtgatgagtactttgtgcctgccctgggcgtcatcacagacaagctgcagatcagtgaagatgtggccggggccaccttcatggccgccggcggcagcgcccctgagctgttcaccagcctcatcggggtcttcatcagccacagcaatgtgggcatcggcaccatcgtgggcagcgctgtgttcaacatcctcttcgtcatcggcacctgcagcctcttcagccgggagatcctgaacctgacctggtggcccctcttcagagatgtgtccttctacatcctggacctgatcatgctgatcctcttcttcctggacagcctgattgcctggtgggagagcctgctgctgctgctggcctatgccttctacgtgttcaccatgaagtggaacaagcacatcgaggtgtgggtgaaggagcagctgagccggcggcctgtggccaaggtgatggccctggaggacctgagcaagctgcccagcctgctgacccggggcagcagcagcaccagcctgcacaacagcaccatccgcagcaccatctaccagctgatgctgcacagcctggaccccctgcgggaggtgcggctggccaaggagaaggaggaggagagcctgaaccagggcgcccgggcccagccccaggccaaggccgagagcaagccagaggaggaggagcccgccaagctgcctgctgtgacagtgaccccagcccctgtgcctgacatcaagggggaccagaaggaaaatcctgggggccaggaggatgtggccgaggccgagagcactggagagatgcctggagaggagggggagacagctggggagggggagacagaggagaagtctggaggagagacccagcctgagggggagggggagacagagacccagggcaagggggaggagtgtgaagatgaaaatgaggccgagggcaaaggagacaatgaaggagaagatgaaggagagatccacgcagaagatggagagatgaagggaaatgaaggagaaacagagagccaggagctgtctgctgagaaccacggggaggccaagaatgatgagaagggcgtggaggatggcggcggcagtgatggaggagacagcgaggaggaggaggaggaggaggaggagcaggaggaggaggaggaggaggaggagcaggaggaggaggaggaggaggaggaggaggaggaggagaagggaaatgaggagcccctgagcctggactggccagagacccggcagaagcaggccatctacctgttcctgctgcccatcgtgttccccctgtggctgactgtgcctgatgtgcggcggcaggagagcaggaagttctttgtgttcaccttcctgggcagcatcatgtggatcgccatgttctcctacctgatggtgtggtgggcccaccaggtgggggagaccatcggcatcagcgaggagatcatgggcctgaccatcctggccgccggcaccagcatcccagacctgatcaccagcgtcatcgtggccaggaagggcctgggggacatggctgtgagcagctctgtgggcagcaacatctttgacatcaccgtgggcctgcctgtgccctggctgctcttcagcctcatcaatggcctgcagcctgtgcctgtgagcagcaatggcctcttctgtgccatcgtgctgctcttcctgatgctgctcttcgtcatcagcagcatcgccagctgcaagtggaggatgaacaagatcctgggcttcaccatgttcctgctgtactttgtgttcctgatcatctctgtgatgctggaggaccgcatcatcagctgccctgtgtctgtgtag

SEQ ID NO: 170413 - DNA, 3210 bp, synthetic construct
  misc_feature 1..3210: note = Description of Artificial Sequence: Synthetic coding sequence
  source 1..3210: mol_type = other DNA
atgggcaagctgatccgcatgggcccccaggagcgctggctgctgcggaccaagaggctgcactggagccggctgctcttcctgctgggcatgctgatcatcggcagcacctaccagcacctgcggcggccccggggcctgagcagcctgtgggccgctgtgagcagccaccagcccatcaagctggccagccgggacctgagcagcgaggagatgatgatgatgagcagcagccccagcaagcccagcagcgagatgggcggcaagatgctggtgccccaggcctctgtgggcagtgatgaggccaccctgtccatgacagtggagaacatccccagcatgcccaagaggacagccaagatgatccccaccaccaccaagaacaactacagccccacagctgctggaacagaaagaaggaaggaggacacccccaccagcagcaggaccctgacctactacaccagcaccagcagccggcagatcgtgaagaagtacacccccaccccaagaggagagatgaagagctacagccccacccaggtgcgggagaaggtgaagtacacccccagcccccggggcagaagagtgggcacctacgtgcccagcaccttcatgaccatggagaccagccacgccatcacccccaggaccaccgtgaaggacagcgacatcacagccacctacaagatcctggagaccaacagcctgaagaggatcatggaggagaccacccccaccaccctgaagggcatgtttgacagcacccccaccttcctgacccatgaggtggaggccaacgtgctgaccagccccaggtctgtgatggagaagaacaacctcttccccccaagaagagtggagagcaacagcagcgcccacccctggggcctggtgggcaagagcaaccccaagaccccccagggcaccgtgctgctgcacaccccagccaccagcgagggccaggtgaccatcagcaccatgacaggcagcagccctgctgagaccaaggccttcaccgctgcctggagcctgaggaaccccagccccaggacctctgtgtctgccatcaagacagccccagccatcgtgtggaggctggccaagaagcccagcacagcccccagcaccagcaccacccccaccgtgcgggccaagctgaccatgcaggtgcaccactgtgtggtggtgaagcccaccccagccatgctgaccacccccagccccagcctgaccacagccctgctgcctgaggagctgagccccagccccagcgtgctgccccccagcctgcctgacctgcaccccaagggggagtaccccccagacctcttctctgtggaggagcggcggcagggctgggtggtgctgcacgtgtttggcatgatgtatgtgtttgtggccctggccatcgtgtgtgatgagtactttgtgcctgccctgggcgtcatcacagacaagctgcagatcagtgaagatgtggccggggccaccttcatggccgccggcggcagcgcccctgagctgttcaccagcctcatcggggtcttcatcagccacagcaatgtgggcatcggcaccatcgtgggcagcgctgtgttcaacatcctcttcgtcatcggcacctgcagcctcttcagccgggagatcctgaacctgacctggtggcccctcttcagagatgtgtccttctacatcctggacctgatcatgctgatcctcttcttcctggacagcctgattgcctggtgggagagcctgctgctgctgctggcctatgccttctacgtgttcaccatgaagtggaacaagcacatcgaggtgtgggtgaaggagcagctgagccggcggcctgtggccaaggtgatggccctggaggacctgagcaagccaggagatggagccatcgctgtggatgagctgcaggacaacaagaagctgaagctgcccagcctgctgacccggggcagcagcagcaccagcctgcacaacagcaccatccgcagcaccatctaccagctgatgctgcacagcctggaccccctgcgggaggtgcggctggccaaggagaaggaggaggagagcctgaaccagggcgcccgggcccagccccaggccaaggccgagagcaagccagaggaggaggagcccgccaagctgcctgctgtgacagtgaccccagcccctgtgcctgacatcaagggggaccagaaggaaaatcctgggggccaggaggatgtggccgaggccgagagcactggagagatgcctggagaggagggggagacagctggggagggggagacagaggagaagtctggaggagagacccagcctgagggggagggggagacagagacccagggcaagggggaggagtgtgaagatgaaaatgaggccgagggcaaaggagacaatgaaggagaagatgaaggagagatccacgcagaagatggagagatgaagggaaatgaaggagaaacagagagccaggagctgtctgctgagaaccacggggaggccaagaatgatgagaagggcgtggaggatggcggcggcagtgatggaggagacagcgaggaggaggaggaggaggaggaggagcaggaggaggaggaggaggaggaggagcaggaggaggaggaggaggaggaggaggaggaggaggagaagggaaatgaggagcccctgagcctggactggccagagacccggcagaagcaggccatctacctgttcctgctgcccatcgtgttccccctgtggctgactgtgcctgatgtgcggcggcaggtgggggagaccatcggcatcagcgaggagatcatgggcctgaccatcctggccgccggcaccagcatcccagacctgatcaccagcgtcatcgtggccaggaagggcctgggggacatggctgtgagcagctctgtgggcagcaacatctttgacatcaccgtgggcctgcctgtgccctggctgctcttcagcctcatcaatggcctgcagcctgtgcctgtgagcagcaatggcctcttctgtgccatcgtgctgctcttcctgatgctgctcttcgtcatcagcagcatcgccagctgcaagtggaggatgaacaagatcctgggcttcaccatgttcctgctgtactttgtgttcctgatcatctctgtgatgctggaggaccgcatcatcagctgccctgtgtctgtgtag

SEQ ID NO: 170414 - DNA, 3246 bp, synthetic construct; identical to SEQ ID NO: 170412
  misc_feature 1..3246: note = Description of Artificial Sequence: Synthetic coding sequence
  source 1..3246: mol_type = other DNA

SEQ ID NO: 170415 - DNA, 1935 bp, synthetic construct
  misc_feature 1..1935: note = Description of Artificial Sequence: Synthetic coding sequence
  source 1..1935: mol_type = other DNA
atggacctgcagcagagcaccaccatcaccagcctggagaagtggtgcctggatgagagcctgagcggctgcagaagacactacagcgtgaagaagaagctgaagctgatccgggtgctgggcctcttcatgggcctggtggccatcagcacagtgtccttcagcatcagcgccttcagcgagacagacacccagagcactggagaggcctctgtggtgtctggcccccgggtggcccagggctaccaccagaggaccctgctggacctgaatgacaagatcctggactacaccccccagccccccctgagcaaggagggggagagcgagaacagcacagaccacgcccagggcgactaccccaaggacatcttcagcctggaggagaggaggaagggggccatcatcctgcacgtgattggcatgatctacatgtttattgccctggccatcgtgtgtgatgagttctttgtgcccagcctgaccgtcatcacagagaagctgggcatcagtgatgatgtggccggggccaccttcatggccgccggcggcagcgcccctgagctgttcaccagcctcatcggggtcttcatcgcccacagcaatgtgggcatcggcaccatcgtgggcagcgctgtgttcaacatcctcttcgtcatcggcatgtgtgccctcttcagccgggagatcctgaacctgacctggtggcccctcttcagagatgtgtccttctacatcgtggacctgatcatgctgatcatcttcttcctggacaacgtcatcatgtggtgggagagcctgctgctgctgacagcctacttctgctacgtggtgttcatgaagttcaacgtgcaggtggagaagtgggtgaagcagatgatcaacagaaacaaggtggtgaaggtgacagcccctgaggcccaggccaagcccagcgctgcccgggacaaggatgagcccaccctgcctgccaagccccggctgcagagaggaggcagcagcgccagcctgcacaacagcctgatgagaaattccatcttccagctgatgatccacaccctggaccccctggccgagggccgcttccgggagaaggccagcatcctgcacaagatcgccaagaagaagtgccacgtggatgaaaatgaaaggcagaatggagctgccaaccacgtggagaagattgagctgcccaacagcaccagcacagatgtggagatgacccccagcagtgatgccagcgagcctgtgcagaatggaaacctgagccacaacatcgagggcgctgaggcccagacagcagatgaggaggaggaccagcccctgagcctggcctggcccagcgagaccaggaagcaggtgaccttcctgattgtgttccccatcgtgttccccctgtggatcaccctgcctgatgtgaggaagcccagcagcaggaagttcttccccatcaccttcttcggcagcatcacctggattgctgtgttctcctacctgatggtgtggtgggcccaccaggtgggggagaccatcggcatcagcgaggagatcatgggcctgaccatcctggccgccggcaccagcatcccagacctgatcacctctgtgattgtggccaggaagggcctgggggacatggctgtgagcagctctgtgggcagcaacatctttgacatcaccgtgggcctgcccctgccctggctgctgtacaccgtcatccaccgcttccagcctgtggccgtgagcagcaatggcctcttctgtgccatcgtgctgctcttcatcatgctgctgtttgtgatcctgagcatcgccctgtgcaagtggaggatgaacaagatcctgggcttcatcatgtttggcctgtactttgtgttcctggtggtgtctgtgctgctggaggaccgcatcctgacctgccctgtgtccatctag

SEQ ID NO: 170416 - DNA, 1986 bp, synthetic construct
  misc_feature 1..1986: note = Description of Artificial Sequence: Synthetic coding sequence
  source 1..1986: mol_type = other DNA
atggacctgcagcagagcaccaccatcaccagcctggagaagtggtgcctggatgagagcctgagcggctgcagaagacactacagcgtgaagaagaagctgaagctgatccgggtgctgggcctcttcatgggcctggtggccatcagcacagtgtccttcagcatcagcgccttcagcgagacagacacccagagcactggagaggcctctgtggtgtctggcccccgggtggcccagggctaccaccagaggaccctgctggacctgaatgacaagatcctggactacaccccccagccccccctgagcaaggagggggagagcgagaacagcacagaccacgcccagggcgactaccccaaggacatcttcagcctggaggagaggaggaagggggccatcatcctgcacgtgattggcatgatctacatgtttattgccctggccatcgtgtgtgatgagttctttgtgcccagcctgaccgtcatcacagagaagctgggcatcagtgatgatgtggccggggccaccttcatggccgccggcggcagcgcccctgagctgttcaccagcctcatcggggtcttcatcgcccacagcaatgtgggcatcggcaccatcgtgggcagcgctgtgttcaacatcctcttcgtcatcggcatgtgtgccctcttcagccgggagatcctgaacctgacctggtggcccctcttcagagatgtgtccttctacatcgtggacctgatcatgctgatcatcttcttcctggacaacgtcatcatgtggtgggagagcctgctgctgctgacagcctacttctgctacgtggtgttcatgaagttcaacgtgcaggtggagaagtgggtgaagcagatgatcaacagaaacaaggtggtgaaggtgacagcccctgaggcccaggccaagcccagcgctgcccgggacaaggatgagcccaccctgcctgccaagccccggctgcagagaggaggcagcagcgccagcctgcacaacagcctgatgagaaattccatcttccagctgatgatccacaccctggaccccctggccgaggagctgggcagctatggcaagctgaagtactatgacaccatgacagaggagggccgcttccgggagaaggccagcatcctgcacaagatcgccaagaagaagtgccacgtggatgaaaatgaaaggcagaatggagctgccaaccacgtggagaagattgagctgcccaacagcaccagcacagatgtggagatgacccccagcagtgatgccagcgagcctgtgcagaatggaaacctgagccacaacattgaaggagctgaggcccagacagcagatgaggaggaggaccagcccctgagcctggcctggcccagcgagaccaggaagcaggtgaccttcctgattgtgttccccatcgtgttccccctgtggatcaccctgcctgatgtgaggaagcccagcagcaggaagttcttccccatcaccttcttcggcagcatcacctggattgctgtgttctcctacctgatggtgtggtgggcccaccaggtgggggagaccatcggcatcagcgaggagatcatgggcctgaccatcctggccgccggcaccagcatcccagacctgatcaccagcgtcatcgtggccaggaagggcctgggggacatggctgtgagcagctctgtgggcagcaacatctttgacatcaccgtgggcctgcccctgccctggctgctgtacaccgtcatccaccgcttccagcctgtggccgtgagcagcaatggcctcttctgtgccatcgtgctgctcttcatcatgctgctcttcgtcatcctgagcatcgccctgtgcaagtggaggatgaacaagatcctgggcttcatcatgtttggcctgtactttgtgttcctggtggtgtctgtgctgctggaggaccgcatcctgacctgccctgtgtccatctag

SEQ ID NO: 170417 - DNA, 1935 bp, synthetic construct
  misc_feature 1..1935: note = Description of Artificial Sequence: Synthetic coding sequence
  source 1..1935: mol_type = other DNA
atgaggcccagcggagatgaagatcgggccaggagaagaagaagaagaagaagaagaagagacctgctgctgagccagctgtgcttcctggcctctgtggccctgctgctgtggagcctgagcagcctgcgggagcagaaggagctggacctgatggacctggtgggggaggacaggaagtggatgatggccaggaagctgatgcaggtgaatgacaccctgaccagtgaagatgctggcctgaggaacagcaagaactgcacagagcccgccctgcacgagttccccaatgacatcttcaccaatgaagatcggcggcagggcgctgtggtgctgcacgtgctgtgtgccatctacatgttctacgccctggccatcgtgtgtgatgacttctttgtgcccagcctggagaagatctgtgagcggctgcacctgtctgaagatgtggccggggccaccttcatggctgctggcagcagcgcccctgagctgttcacctctgtgattggagtcttcatcaccaagggagatgtgggcgtgggcaccatcgtgggcagcgctgtgttcaacatcctgtgcatcattggagtgtgtggcctgtttgctggccaggtggtggccctgagctcctggtgcctgctgcgggacagcatctactacaccctgtctgtgattgccctgattgtgttcatctatgatgagaaggtgtcctggtgggagagcctggtgctggtgctgatgtacctgatctacatcgtcatcatgaagtacaatgcctgcatccaccagtgctttgaaagaaggaccaagggggccggcaacatggtgaatggcctggccaacaatgctgagattgatgacagcagcaactgtgatgccaccgtggtgctgctgaagaaggccaacttccacaggaaggccagcgtcatcatggtggatgagctgctgagcgcctacccccaccagctgtccttcagcgaggccggcctgcgcatcatgatcaccagccacttcccccccaagacccggctgtccatggccagcaggatgctgatcaatgaaaggcagaggctcatcaacagccgggcctacaccaacggggagagcgaggtggccatcaagatccccatcaagcacacagtggagaatggaacaggccccagcagcgccccagaccggggcgtgaatggcaccaggagagatgatgtggtggccgaggccggaaatgaaacagaaaatgaaaatgaagataatgaaaatgatgaggaggaggaggaggatgaagatgatgatgagggcccctacaccccatttgacacccccagcggcaagctggagaccgtgaagtgggccttcacctggcccctgagctttgtgctgtacttcaccgtgcccaactgcaacaagccccgctgggagaagtggttcatggtgacctttgccagcagcaccctgtggattgctgccttctcctacatgatggtgtggatggtgaccatcatcggctacaccctgggcatcccagatgtgatcatgggcatcaccttcctggccgccggcacctctgtgcctgactgcatggccagcctgattgtggcccggcagggcatgggagacatggctgtgagcaacagcatcggcagcaatgtgtttgacatcctgattggcctgggcctgccctgggccctgcagaccctggccgtggactatggcagctacatccggctgaacagccggggcctcatctacagcgtgggcctgctgctggcctctgtgtttgtgacagtgtttggagtgcacctgaacaagtggcagctggacaagaagctgggctgcggctgcctgctgctgtatggagtcttcctgtgcttcagcatcatgacagagttcaacgtgttcacctttgtgaacctgcccatgtgtggggaccactag

SEQ ID NO: 170418 - DNA, 1755 bp, synthetic construct
  misc_feature 1..1755: note = Description of Artificial Sequence: Synthetic coding sequence
  source 1..1755: mol_type = other DNA
atggccggccggcggctgaacctgcgctgggccctgtctgtgctgtgtgtgctgctgatggccgagaccgtgtctggcacccggggcagcagcactggagcccacatcagcccccagtttcctgccagcggcgtgaaccagacccctgtggtggactgcaggaaggtgtgtggcctgaatgtgtctgacagatgtgacttcatccgcaccaacccagactgccacagtgatggcggctacctggactacctggagggcatcttctgccacttcccccccagcctgctgcccctggccgtgaccctgtatgtgtcctggctgctgtacctgttcctgatcctgggcgtgacagctgccaagttcttctgccccaacctgagcgccatcagcaccaccctgaagctgagccacaacgtggccggcgtgaccttcctggcctttggaaatggagccccagacatcttcagcgccctggtggccttcagtgacccccacacagctggcctggccctgggcgccctgtttggagctggggtgctggtgaccaccgtggtggccggcggcatcaccatcctgcaccccttcatggccgccagccggcccttcttccgggacatcgtgttctacatggtggccgtgttcctgaccttcctgatgctgttccggggccgggtgaccctggcctgggccctgggctacctgggcctgtatgtgttctacgtggtgaccgtcatcctgtgcacctggatctaccagaggcagaggcggggcagcctcttctgccccatgcctgtgaccccagagatcctgagtgacagtgaagaagatagagtgagcagcaacaccaacagctatgactatggagatgagtaccggcccctcttcttctaccaggagaccacagcccagatcctggtgcgggccctgaaccccctggactacatgaagtggaggaggaagagcgcctactggaaggccctgaaggtgttcaagctgcctgtggagttcctgctgctgctgactgtgcctgtggtggaccctgacaaggatgaccagaactggaagaggcccctgaactgcctgcacctggtgatcagccccctggtggtggtgctgaccctgcagagcggcacctatggagtgtatgagatcggcggcctggtgcctgtgtgggtggtggtggtgattgctggaacagccctggcctctgtgaccttctttgccaccagtgacagccagcccccccggctgcactggctgtttgccttcctgggcttcctgaccagcgccctgtggatcaatgctgctgccacagaggtggtgaacatcctgcggagcctgggcgtggtgttccggctgagcaacacagtgctgggcctgaccctgctggcctggggcaacagcattggagatgccttcagtgacttcaccctggcccggcagggctaccccaggatggccttcagcgcctgcttcggcggcatcatcttcaacatcctggtgggcgtgggcctgggctgcctgctgcagatcagccgcagccacacagaggtgaagctggagccagatggcctgctggtgtgggtgctggccggggccctgggcctgagcctggtgttcagcctggtgtctgtgcccctgcagtgcttccagctgagccgggtgtatggcttctgcctgctgctcttctacctgaacttcctggtggtggccctgctgacagaatttggagtcatccacctgaagtccatgtag

SEQ ID NO: 170419 - DNA, 1587 bp, synthetic construct
  misc_feature 1..1587: note = Description of Artificial Sequence: Synthetic coding sequence
  source 1..1587: mol_type = other DNA
atggccggccggcggctgaacctgcgctgggccctgtctgtgctgtgtgtgctgctgatggccgagaccgtgtctggcacccggggcagcagcactggagcccacatcagcccccagtttcctgccagcggcgtgaaccagacccctgtggtggactgcaggaaggtgtgtggcctgaatgtgtctgacagatgtgacttcatccgcaccaacccagactgccacagtgatggcggctacctggactacctggagggcatcttctgccacttcccccccagcctgctgcccctggccgtgaccctgtatgtgtcctggctgctgtacctgttcctgatcctgggcgtgacagctgccaagttcttctgccccaacctgagcgccatcagcaccaccctgaagctgagccacaacgtggccggcgtgaccttcctggcctttggaaatggagccccagacatcttcagcgccctggtggccttcagtgacccccacacagctggcctggccctgggcgccctgtttggctacctgggcctgtatgtgttctacgtggtgaccgtcatcctgtgcacctggatctaccagaggcagaggcggggcagcctcttctgccccatgcctgtgaccccagagatcctgagtgacagtgaagaagatagagtgagcagcaacaccaacagctatgactatggagatgagtaccggcccctcttcttctaccaggagaccacagcccagatcctggtgcgggccctgaaccccctggactacatgaagtggaggaggaagagcgcctactggaaggccctgaaggtgttcaagctgcctgtggagttcctgctgctgctgactgtgcctgtggtggaccctgacaaggatgaccagaactggaagaggcccctgaactgcctgcacctggtgatcagccccctggtggtggtgctgaccctgcagagcggcacctatggagtgtatgagatcggcggcctggtgcctgtgtgggtggtggtggtgattgctggaacagccctggcctctgtgaccttctttgccaccagtgacagccagcccccccggctgcactggctgtttgccttcctgggcttcctgaccagcgccctgtggatcaatgctgctgccacagaggtggtgaacatcctgcggagcctgggcgtggtgttccggctgagcaacacagtgctgggcctgaccctgctggcctggggcaacagcattggagatgccttcagtgacttcaccctggcccggcagggctaccccaggatggccttcagcgcctgcttcggcggcatcatcttcaacatcctggtgggcgtgggcctgggctgcctgctgcagatcagccgcagccacacagaggtgaagctggagccagatggcctgctggtgtgggtgctggccggggccctgggcctgagcctggtgttcagcctggtgtctgtgcccctgcagtgcttccagctgagccgggtgtatggcttctgcctgctgctcttctacctgaacttcctggtggtggccctgctgacagaatttggagtcatccacctgaagtccatgtag

SEQ ID NO: 170420 - DNA, 1587 bp, synthetic construct; identical to SEQ ID NO: 170419
  misc_feature 1..1587: note = Description of Artificial Sequence: Synthetic coding sequence
  source 1..1587: mol_type = other DNA

SEQ ID NO: 170421 - DNA, 396 bp, synthetic construct
  misc_feature 1..396: note = Description of Artificial Sequence: Synthetic coding sequence
  source 1..396: mol_type = other DNA
atggccggccggcggctgaacctgcgctgggccctgtctgtgctgtgtgtgctgctgatggccgagaccgtgtctggcacccggggcagcagcactggagcccacatcagcccccagtttcctgccagcggcgtgaaccagacccctgtggtggactgcaggaaggtgtgtggcctgaatgtgtctgacagatgtgacttcatccgcaccaacccagactgccacagtgatggcggctacctggactacctggagggcatcttctgccacttcccccccagcctgctgcccctggccgtgaccctgtatgtgtcctggctgctgtacctgttcctgatcctgggcgtgacagctgccaagttcttctgccccaacctgagcgccatcagcacctag

SEQ ID NO: 170422 - DNA, 696 bp, synthetic construct
  misc_feature 1..696: note = Description of Artificial Sequence: Synthetic coding sequence
  source 1..696: mol_type = other DNA
atggccggccggcggctgaacctgcgctgggccctgtctgtgctgtgtgtgctgctgatggccgagaccgtgtctggcacccggggcagcagcactggagcccacatcagcccccagtttcctgccagcggcgtgaaccagacccctgtggtggactgcaggaaggtgtgtggcctgaatgtgtctgacagatgtgacttcatccgcaccaacccagactgccacagtgatggcggctacctggactacctggagggcatcttctgccacttcccccccagcctgctgcccctggccgtgaccctgtatgtgtcctggctgctgtacctgttcctgatcctgggcgtgacagctgccaagttcttctgccccaacctgagcgccatcagcaccaccctgaagctgagccacaacgtggccggcgtgaccttcctggcctttggaaatggagccccagacatcttcagcgccctggtggccttcagtgacccccacacagctggcctggccctgggcgccctgtttggagctggggtgctggtgaccaccgtggtggccggcggcatcaccatcctgcaccccttcatggccgccagccggcccttcttccgggacatcgtgttctacatggtggccgtgttcctgaccttcctgatgctgttccggggccgggtgaccctggcctgggccctgtag

SEQ ID NO: 170423 - DNA, 312 bp, synthetic construct
  misc_feature 1..312: note = Description of Artificial Sequence: Synthetic coding sequence
  source 1..312: mol_type = other DNA
atggccggccggcggctgaacctgcgctgggccctgtctgtgctgtgtgtgctgctgatggccgagaccgtgtctggcacccggggcagcagcactggagcccacatcagcccccagtttcctgccagcggcgtgaaccagacccctgtggtggactgcaggaaggtgtgtggcctgaatgtgtctgacagatgtgacttcatccgcaccaacccagactgccacagtgatggcggctacctggactacctggagggcatcttctgccacttcccccccagcctgctgcccctggccgtgaccctgtactag

SEQ ID NO: 170424 - DNA, 1755 bp, synthetic construct; identical to SEQ ID NO: 170418
  misc_feature 1..1755: note = Description of Artificial Sequence: Synthetic coding sequence
  source 1..1755: mol_type = other DNA

SEQ ID NO: 170425 - DNA, 906 bp, synthetic construct
  misc_feature 1..906: note = Description of Artificial Sequence: Synthetic coding sequence
  source 1..906: mol_type = other DNA
atggctgaccagcccaagcccatcagccccctgaagaacctgctggccggcggctttggaggagtgtgcctggtgtttgtgggccaccccctggacacagtgaaggtgcggctgcagacccagccccccagcctgcccggccagccccccatgtacagcggcacctttgactgcttcaggaagaccctcttccgggagggcatcaccggcctgtaccggggcatggccgcccccatcatcggcgtgacccccatgtttgctgtgtgcttctttggatttggcctgggcaagaagctgcagcagaagcacccagaagatgtgctgagctacccccagctgtttgctgctggcatgctgagcggggtcttcaccaccggcatcatgaccccaggagagcgcatcaagtgcctgctgcagatccaggccagcagcggggagagcaagtacacaggcaccctggactgtgccaagaagctgtaccaggagtttggcatccggggcatctacaagggcaccgtgctgaccctgatgagagatgtgcctgccagcggcatgtacttcatgacctatgagtggctgaagaacatcttcaccccagagggcaagagggtgtctgagctgagcgccccccgcatcctggtggccggcggcattgctggcatcttcaactgggccgtggccatccccccagatgtgctgaagagccgcttccagacagcccctcctgggaagtacccaaatggcttcagagatgtgctgcgggagctgatcagagatgaaggagtgaccagcctgtacaagggcttcaatgctgtgatgatccgggccttccctgccaatgctgcctgcttcctgggctttgaggtggccatgaagttcctgaactgggccacccccaacctgtag

SEQ ID NO: 170426 - DNA, 756 bp, synthetic construct
  misc_feature 1..756: note = Description of Artificial Sequence: Synthetic coding sequence
  source 1..756: mol_type = other DNA
atgtacagcggcacctttgactgcttcaggaagaccctcttccgggagggcatcaccggcctgtaccggggcatggccgcccccatcatcggcgtgacccccatgtttgctgtgtgcttctttggatttggcctgggcaagaagctgcagcagaagcacccagaagatgtgctgagctacccccagctgtttgctgctggcatgctgagcggggtcttcaccaccggcatcatgaccccaggagagcgcatcaagtgcctgctgcagatccaggccagcagcggggagagcaagtacacaggcaccctggactgtgccaagaagctgtaccaggagtttggcatccggggcatctacaagggcaccgtgctgaccctgatgagagatgtgcctgccagcggcatgtacttcatgacctatgagtggctgaagaacatcttcaccccagagggcaagagggtgtctgagctgagcgccccccgcatcctggtggccggcggcattgctggcatcttcaactgggccgtggccatccccccagatgtgctgaagagccgcttccagacagcccctcctgggaagtacccaaatggcttcagagatgtgctgcgggagctgatcagagatgaaggagtgaccagcctgtacaagggcttcaatgctgtgatgatccgggccttccctgccaatgctgcctgcttcctgggctttgaggtggccatgaagttcctgaactgggccacccccaacctgtag

SEQ ID NO: 170427 - DNA, 948 bp, synthetic construct
  misc_feature 1..948: note = Description of Artificial Sequence: Synthetic coding sequence
  source 1..948: mol_type = other DNA
atgacccaccaggacctgagcatcacagccaagctgatcaatggaggagtggccggcctggtgggcgtgacctgtgtgttccccatcgacctggccaagacccggctgcagaaccagcacggcaaggccatgtacaagggcatgattgactgcctgatgaagacagcccgggcagagggcttcttcggcatgtacagaggagctgctgtgaacctgaccctggtgaccccagagaaggccatcaagctggccgccaatgacttcttccggcggctgctgatggaggatggcatgcagaggaacctgaagatggagatgctggccggctgtggggccggcatgtgccaggtggtggtgacctgccccatggagatgctgaagatccagctgcaggatgctggccgcctggccgtgcaccaccagggcagcgccagcgcccccagcaccagccgcagctacaccactggaagtgccagcacccaccggcggcccagcgccaccctgattgcctgggagctgctgcggacccagggcctggccggcctgtaccggggcctgggcgccaccctgctgcgggacatccccttcagcatcatctacttccccctgtttgccaacctgaacaacctgggcttcaatgagctggccggcaaggccagctttgcccacagctttgtgtctggctgtgtggccggcagcattgctgctgtggccgtgacccccctggatgtgctgaagacccgcatccagaccctgaagaagggcctgggggaggacatgtacagcggcatcacagactgtgccaggaagctgtggatccaggagggccccagcgccttcatgaagggggccggctgccgggccctggtgattgcccccctgtttggaattgcccagggcgtgtacttcatcggcatcggggagcgcatcctgaagtgctttgattag

SEQ ID NO: 170428 - DNA, 948 bp, synthetic construct; identical to SEQ ID NO: 170427
  misc_feature 1..948: note = Description of Artificial Sequence: Synthetic coding sequence
  source 1..948: mol_type = other DNA

SEQ ID NO: 170429 - DNA, 1716 bp, synthetic construct
  misc_feature 1..1716: note = Description of Artificial Sequence: Synthetic coding sequence
  source 1..1716: mol_type = other DNA
atggagaatgtgaaggagatcttcggccagaccatcatccaccaccacatccccttcaactgggactgtgagttcatccggctgcacttcggccacaacaggaagaagcacctgaactacacagagttcacccagttcctgcaggagctgcagctggagcacgcccggcaggcctttgccctgaaggacaagagcaagagcggcatgatcagcggcctggacttcagtgacatcatggtgaccatccgcagccacatgctgaccccatttgtggaggagaacctggtgtctgctgctgggggcagcatcagccaccaggtgtccttctcctacttcaatgccttcaacagcctgctgaacaacatggagctggtgaggaagatctacagcaccctggccggcaccaggaaggatgtggaggtgaccaaggaggagtttgcccagagcgccatccgctatggccaggtgacccccctggagattgacatcctgtaccagctggccgacctgtacaatgccagcggccgcctgaccctggccgacatcgagagaattgcccccctggccgagggcgccctgccctacaacctggccgagctgcagaggcagcagagccctggcctgggccggcccatctggctgcagattgctgagagcgcctaccgcttcaccctgggctctgtggccggggctgtgggcgccacagctgtgtaccccatcgacctggtgaagaccaggatgcagaaccagaggggcagcggctctgtggtgggggagctgatgtacaagaacagctttgactgcttcaagaaggtgctgcgctatgagggcttcttcggcctgtaccggggcctcatcccccagctgattggagtggcccctgagaaggccatcaagctgactgtgaatgactttgtgcgggacaagttcaccaggagagatggctctgtgcccctgcctgctgaggtgctggccggcggctgtgccggcggcagccaggtgatcttcaccaaccccctggagatcgtgaagatccggctgcaggtggccggggagatcaccaccggcccccgggtgtctgccctgaatgtgctgcgggacctgggcatcttcggcctgtacaagggggccaaggcctgcttcctgcgggacatccccttcagcgccatctacttccctgtgtatgcccactgcaagctgctgctggctgatgaaaatggccacgtgggcggcctgaacctgctggccgccggggccatggccggcgtgcctgctgccagcctggtgaccccagcagatgtgatcaagacccggctgcaggtggccgcccgggccggccagaccacctacagcggggtcatcgactgcttcaggaagatcctgcgggaggagggccccagcgccttctggaagggcacagctgcccgggtcttccgcagcagcccccagtttggagtgaccctggtgacctatgagctgctgcagcgctggttctacatcgactttggaggcctgaagccagctggcagcgagcccacccccaagagcagaattgctgacctgcccccagccaacccagaccacatcggcggctaccgcctggccacagccacctttgctggcatcgagaacaagtttggcctgtacctgcccaagttcaagagccccagcgtggccgtggtgcagcccaaggctgctgtggccgccacccagtag

SEQ ID NO: 170430 - DNA, 2037 bp, synthetic construct
  misc_feature 1..2037: note = Description of Artificial Sequence: Synthetic coding sequence
  source 1..2037: mol_type = other DNA
atggctgtgaaggtgcagaccaccaagagaggagacccccatgagctgaggaacatcttcctgcagtatgccagcacagaggtggatggagagcgctacatgaccccagaagattttgtgcagcgctacctgggcctgtacaatgaccccaacagcaaccccaagatcgtgcagctgctggccggcgtggccgaccagaccaaggatggcctcatctcctaccaggagttcctggcctttgagagcgtgctgtgtgccccagacagcatgttcatcgtggccttccagctgtttgacaagtctggaaatggagaggtgacctttgaaaatgtgaaggagatcttcggccagaccatcatccaccaccacatccccttcaactgggactgtgagttcatccggctgcacttcggccacaacaggaagaagcacctgaactacacagagttcacccagttcctgcaggagctgcagctggagcacgcccggcaggcctttgccctgaaggacaagagcaagagcggcatgatcagcggcctggacttcagtgacatcatggtgaccatccgcagccacatgctgaccccatttgtggaggagaacctggtgtctgctgctgggggcagcatcagccaccaggtgtccttctcctacttcaatgccttcaacagcctgctgaacaacatggagctggtgaggaagatctacagcaccctggccggcaccaggaaggatgtggaggtgaccaaggaggagtttgcccagagcgccatccgctatggccaggtgacccccctggagattgacatcctgtaccagctggccgacctgtacaatgccagcggccgcctgaccctggccgacatcgagcgcatcgcccccctggccgagggcgccctgccctacaacctggccgagctgcagaggcagcagagccctggcctgggccggcccatctggctgcagattgctgagagcgcctaccgcttcaccctgggctctgtggccggggctgtgggcgccacagctgtgtaccccatcgacctggtgaagaccaggatgcagaaccagaggggcagcggctctgtggtgggggagctgatgtacaagaacagctttgactgcttcaagaaggtgctgcgctatgagggcttcttcggcctgtaccggggcctcatcccccagctgattggagtggcccctgagaaggccatcaagctgactgtgaatgactttgtgcgggacaagttcaccaggagagatggctctgtgcccctgcctgctgaggtgctggccggcggctgtgccggcggcagccaggtgatcttcaccaaccccctggagatcgtgaagatccggctgcaggtggccggggagatcaccaccggcccccgggtgtctgccctgaatgtgctgcgggacctgggcatcttcggcctgtacaagggggccaaggcctgcttcctgcgggacatccccttcagcgccatctacttccctgtgtatgcccactgcaagctgctgctggctgatgaaaatggacatgtgggcggcctgaacctgctggccgccggggccatggccggcgtgcctgctgccagcctggtgaccccagcagatgtgatcaagacccggctgcaggtggccgcccgggccggccagaccacctacagcggcgtgattgactgcttcaggaagatcctgcgggaggagggccccagcgccttctggaagggcacagctgcccgggtcttccgcagcagcccccagtttggagtgaccctggtgacctatgagctgctgcagcgctggttctacatcgactttggaggcctgaagccagctggcagcgagcccacccccaagagcagaattgctgacctgcccccagccaacccagaccacatcggcggctaccgcctggccacagccacctttgctggcatcgagaacaagtttggcctgtacctgcccaagttcaagagccccagcgtggccgtggtgcagcccaaggctgctgtggccgccacccagtag

SEQ ID NO: 170431 - DNA, 1944 bp, synthetic construct
  misc_feature 1..1944: note = Description of Artificial Sequence: Synthetic coding sequence
  source 1..1944: mol_type = other DNA
atggctgctggcctggccacctggctgccctttgcccgggctgctgctgtgggctggctgcccctggcccagcagcccctgcccccagcccctggggtgaaggccagcagaggagatgaggtgctggtggtgaatgtgtctggaagaagatttgagacctggaagaacaccctggaccgctacccagacaccctgctgggcagcagcgagaaggagttcttctatgatgctgacagcggggagtacttctttgaccgggaccctgacatgttcagacatgtgctgaacttctacagaacaggccgcctgcactgcccccggcaggagtgcatccaggcctttgatgaggagctggccttctacggcctggtgcctgagctggtgggggactgctgcctggaggagtacagagacaggaagaaggaaaatgctgagcggctggctgaagatgaggaggccgagcaggccggagatggccctgccctgcctgctggcagcagcctgcggcagaggctgtggagggcctttgagaacccccacaccagcacagctgccctggtgttctactacgtgacaggcttcttcatcgctgtgtctgtgattgccaacgtggtggagaccatcccctgccggggcagcgcccggcgcagcagccgggagcagccctgtggggagcgcttcccccaggccttcttctgcatggacacagcctgtgtgctgatcttcaccggggagtacctgctgcggctgtttgctgcccccagccgctgccgcttcctgcggtctgtgatgagcctgattgatgtggtggccatcctgccctactacatcggcctgctggtgcccaagaatgatgatgtgtctggggcctttgtgaccctgcgggtcttccgggtcttccgcatcttcaagttcagccgccacagccagggcctgcgcatcctgggctacaccctgaagagctgtgccagcgagctgggcttcctgctcttcagcctgaccatggccatcatcatctttgccaccgtgatgttttatgcagagaagggcaccaacaagaccaacttcaccagcatcccagctgccttctggtacaccatcgtgaccatgaccaccctgggctatggagacatggtgcccagcaccatcgccggcaagatcttcggcagcatctgcagcctgtctggagtgctggtgattgccctgcctgtgcctgtgattgtgagcaacttcagccgcatctaccaccagaaccagagagctgacaagaggcgggcccagcagaaggtgcggctggcccgcatccggctggccaagagcggcaccaccaatgccttcctgcagtacaagcagaatggaggcctggaggacagcggcagcggggaggagcaggccctgtgtgtgaggaacagaagtgcctttgagcagcagcaccaccacctgctgcactgcctggagaagaccacctgccacgagttcacagatgagctgaccttcagcgaggccctgggcgctgtgtcccctgggggccgcaccagccgcagcacctctgtgagcagccagcctgtgggccctggcagcctgctgagcagctgctgcccccggcgggccaagagaagagccatccggctggccaacagcacagcctctgtgtcccggggctccatgcaggagctggacatgctggccggcctgcggcgcagccacgccccccagagccgcagcagcctgaatgccaagccccatgacagcctggacctgaactgtgacagccgggactttgtggccgccatcatcagcatccccaccccaccagccaacaccccagatgagagccagcccagcagccctgggggcggcggccgggccggcagcaccctgaggaacagcagcctgggcaccccctgcctcttccctgagaccgtgaagatcagcagcctgtag

SEQ ID NO: 170432 - DNA, 1062 bp, synthetic construct
  misc_feature 1..1062: note = Description of Artificial Sequence: Synthetic coding sequence
  source 1..1062: mol_type = other DNA
atgggcatcttccctggcatcatcctgatcttcctgcgggtgaagtttgccacagctgctgtgatccaccagaagagcaccaccgtgtcccatgagatgagcggcctgaactggaagccctttgtgtatggaggcctggccagcatcgtggccgagtttggcaccttccctgtggacctgaccaagacccggctgcaggtgcagggccagagcattgatgcccgcttcaaggagatcaagtaccggggcatgttccacgccctcttccgcatctgcaaggaggagggcgtgctggccctgtacagcggcatcgccccagccctgctgcggcaggccagctatggcaccatcaagattggcatctaccagagcctgaagaggctgtttgtggagcggctggaggatgagaccctgctgatcaacatgatctgtggggtggtgtctggagtcatcagcagcaccatcgccaaccccacagatgtgctgaagatccgcatgcaggcccagggcagcctcttccagggctccatgattggcagcttcatcgacatctaccagcaggagggcacccggggcctgtggcgctgcctgtgcagcaaggctgtgacaggctgtgtgctgtggctgatgcctgtgatcccagccctgtgggaggccaatgccggcggcagcctggagggcgtggtgcccacagcccagagagctgccatcgtggtgggcgtggagctgcctgtgtatgacatcaccaagaagcacctgatcctgagcggcatgatgggagacaccatcctgacccactttgtgagcagcttcacctgtggcctggccggggccctggccagcaaccctgtggatgtggtgaggaccaggatgatgaaccagagggccatcgtgggccacgtggacctgtacaagggcaccgtggatggcatcctgaagatgtggaagcatgagggcttctttgccctgtacaagggcttctggcccaactggctgcggctgggcccctggaacatcatcttcttcatcacctatgagcagctgaagaggctgcagatctag

SEQ ID NO: 170433 - DNA, 969 bp, synthetic construct
  misc_feature 1..969: note = Description of Artificial Sequence: Synthetic coding sequence
  source 1..969: mol_type = other DNA
atgggcatcttccctggcatcatcctgatcttcctgcgggtgaagtttgccacagctgctgtgatccaccagaagagcaccaccgtgtcccatgagatgagcggcctgaactggaagccctttgtgtatggaggcctggccagcatcgtggccgagtttggcaccttccctgtggacctgaccaagacccggctgcaggtgcagggccagagcattgatgcccgcttcaaggagatcaagtaccggggcatgttccacgccctcttccgcatctgcaaggaggagggcgtgctggccctgtacagcggcatcgccccagccctgctgcggcaggccagctatggcaccatcaagattggcatctaccagagcctgaagaggctgtttgtggagcggctggaggatgagaccctgctgatcaacatgatctgtggggtggtgtctggagtcatcagcagcaccatcgccaaccccacagatgtgctgaagatccgcatgcaggcccagggcagcctcttccagggctccatgattggcagcttcatcgacatctaccagcaggagggcacccggggcctgtggaggggcgtggtgcccacagcccagagagctgccatcgtggtgggcgtggagctgcctgtgtatgacatcaccaagaagcacctgatcctgagcggcatgatgggagacaccatcctgacccactttgtgtcctccttcacctgtggcctggccggggccctggccagcaaccctgtggatgtggtgaggaccaggatgatgaaccagagggccatcgtgggccacgtggacctgtacaagggcaccgtggatggcatcctgaagatgtggaagcatgagggcttctttgccctgtacaagggcttctggcccaactggctgcggctgggcccctggaacatcatcttcttcatcacctatgagcagctgaagaggctgcagatctag

SEQ ID NO: 170434 - DNA, 597 bp, synthetic construct
  misc_feature 1..597: note = Description of Artificial Sequence: Synthetic coding sequence
  source 1..597: mol_type = other DNA
atgggcatcttccctggcatcatcctgatcttcctgcgggtgaagtttgccacagctgctgtgattgtgtctggccaccagaagagcaccaccgtgtcccatgagatgagcggcctgaactggaagccctttgtgtatggaggcctggccagcatcgtggccgagtttggcaccttccctgtggacctgaccaagacccggctgcaggtgcagggccagagcattgatgcccgcttcaaggagatcaagtaccggggcatgtttcatgccctcttccgcatctgcaaggaggagggcgtgctggccctgtacagcggcatcgccccagccctgctgcggcaggccagctatggcaccatcaagattggcatctaccagagcctgaagaggctgtttgtggagcggctggaggatgagaccctgctgatcaacatgatctgtggggtggtgtctggagtcatcagcagcaccatcgccaaccccacagatgtgctgaagatccgcatgcaggcccagggcagcctcttccagggctccatgattggcagcttcatcgacatctaccagcaggagggcacccggggcctgtggaggtag

SEQ ID NO: 170435 - DNA, 618 bp, synthetic construct
  misc_feature 1..618: note = Description of Artificial Sequence: Synthetic coding sequence
  source 1..618: mol_type = other DNA
atgagcggcctgaactggaagccctttgtgtatggaggcctggccagcatcgtggccgagtttggcaccttccctgtggacctgaccaagacccggctgcaggtgcagggccagagcattgatgcccgcttcaaggagatcaagtaccggggcatgttccacgccctcttccgcatctgcaaggaggagggcgtgctggccctgtacagcggcatcgccccagccctgctgcggcaggccagctatggcaccatcaagattggcatctaccagagcctgaagaggctgtttgtggagcggctggaggatgagaccctgctgatcaacatgatctgtggggtggtgtctggagtcatcagcagcaccatcgccaaccccacagatgtgctgaagatccgcatgcaggcccagggcagcctcttccagggctccatgattggcagcttcatcgacatctaccagcaggagggcacccggggcctgtggaggggcgtggtgcccacagcccagagagctgccatcgtggtgggcgtggagctgcctgtgtatgacatcaccaagaagcacctgatcctgagcggcatgatgggagacaccatcctgacccactttgtgtag

SEQ ID NO: 170436 - DNA, 723 bp, synthetic construct
  misc_feature 1..723: note = Description of Artificial Sequence: Synthetic coding sequence
  source 1..723: mol_type = other DNA
atgggcatcttccctggcatcatcctgatcttcctgcgggtgaagtttgccacagctgctgtgattgtgtctggccaccagaagagcaccaccgtgtcccatgagatgagcggcctgaactggaagccctttgtgtatggaggcctggccagcatcgtggccgagtttggcaccttccctgtggacctgaccaagacccggctgcaggtgcagggccagagcattgatgcccgcttcaaggagatcaagtaccggggcatgtttcatgccctcttccgcatctgcaaggaggagggcgtgctggccctgtacagcggcatcgccccagccctgctgcggcaggccagctatggcaccatcaagattggcatctaccagagcctgaagaggctgtttgtggagcggctggaggatgagaccctgctgatcaacatgatctgtggggtggtgtctggagtcatcagcagcaccatcgccaaccccacagatgtgctgaagatccgcatgcaggcccagggcagcctcttccagggctccatgattggcagcttcatcgacatctaccagcaggagggcacccggggcctgtggaggggcgtggtgcccacagcccagagagctgccatcgtggtgggcgtggagctgcctgtgtatgacatcaccaagaagcacctgatcctgagcggcatgatgggagacaccatcctgacccactttgtgtag

SEQ ID NO: 170437 - DNA, 972 bp, synthetic construct
  misc_feature 1..972: note = Description of Artificial Sequence: Synthetic coding sequence
  source 1..972: mol_type = other DNA
atggctgacaagcagatcagcctgcctgccaagctgatcaatggaggcattgctggcctgattggagtgacctgtgtgttccccatcgacctggccaagacccggctgcagaaccagcagaatggccagagggtgtacacctccatgtctgactgcctgatcaagacagtgcgctctgagggctacttcggcatgtacagaggagctgctgtgaacctgaccctggtgaccccagagaaggccatcaagctggccgccaatgacttcttccgccaccagctgagcaaggatggccagaagctgaccctgctgaaggagatgctggccggctgtggggccggcacctgccaggtgattgtgaccacccccatggagatgctgaagatccagctgcaggatgctggaagaattgctgcccagaggaagatcctggccgcccagggccagctgagcgcccagggcggggcccagcccagcgtggaggccccagctgccccccggcccacagccacccagctgacccgggacctgctgcggagccggggcattgctggcctgtacaagggcctgggcgccaccctgctgagagatgtgcccttctctgtggtgtacttccccctgtttgccaacctgaaccagctgggccgcccagccagcgaggagaagagccccttctacgtgtccttcctggccggctgtgtggccggcagcgctgctgctgtggccgtgaacccctgtgatgtggtgaagacccggctgcagagcctgcagaggggcgtgaatgaagacacctacagcggcatcctggactgtgccaggaagatcctgcggcatgagggccccagcgccttcctgaagggggcctactgccgggccctggtgattgcccccctgtttggaattgcccaggtggtgtacttcctgggcattgctgagagcctgctgggcctgctgcaggacccccaggcctag

SEQ ID NO: 170438 - DNA, 333 bp, synthetic construct
  misc_feature 1..333: note = Description of Artificial Sequence: Synthetic coding sequence
  source 1..333: mol_type = other DNA
atggctgacaagcagatcagcctgcctgccaagctgatcaatggaggcattgctggcctgattggagtgacctgtgtgttccccatcgacctggccaagacccggctgcagaaccagcagaatggccagagggtgtacacctccatgtctgactgcctgatcaagacagtgcgctctgagggctacttcggcatgtacagaggagctgctgtgaacctgaccctggtgaccccagagaaggccatcaagctggccgccaatgacttcttccgccaccagctgagcaaggatggccagaagctgaccctgctgaaggagatgctggccggctag

SEQ ID NO: 170439 - DNA, 384 bp, synthetic construct
  misc_feature 1..384: note = Description of Artificial Sequence: Synthetic coding sequence
  source 1..384: mol_type = other DNA
atggctgacaagcagatcagcctgcctgccaagctgatcaatggaggcattgctggcctgattggagtgacctgtgtgttccccatcgacctggccaagacccggctgcagaaccagcagaatggccagagggtgtacacctccatgtctgactgcctgatcaagacagtgcgctctgagggctacttcggcatgtacagaggagctgctgtgaacctgaccctggtgaccccagagaaggccatcaagctggccgccaatgacttcttccgccaccagctgagcaaggatggccagaagctgaccctgctgaaggagatgctggccggctgtggggccggcacctgccaggtgattgtgaccacccccatggagatgctgtag

SEQ ID NO: 170440 - DNA, 360 bp, synthetic construct
  misc_feature 1..360: note = Description of Artificial Sequence: Synthetic coding sequence
  source 1..360: mol_type = other DNA
atggctgacaagcagatcagcctgcctgccaagctgatcaatggaggcattgctggcctgattggagtgacctgtgtgttccccatcgacctggccaagacccggctgcagaaccagcagaatggccagagggtgtacacctccatgtctgactgcctgatcaagacagtgcgctctgagggctacttcggcatgtacagaggagctgctgtgaacctgaccctggtgaccccagagaaggccatcaagctggccgccaatgacttcttccgccaccagctgagcaaggatggccagaagctgaccctgctgaaggagatgctggccggctgtggggccggcacctgccaggtgatctag

SEQ ID NO: 170441 - DNA, 372 bp, synthetic construct
  misc_feature 1..372: note = Description of Artificial Sequence: Synthetic coding sequence
  source 1..372: mol_type = other DNA
atggctgacaagcagatcagcctgcctgccaagctgatcaatggaggcattgctggcctgattggagtgacctgtgtgttccccatcgacctggccaagacccggctgcagaaccagcagaatggccagagggtgtacacctccatgtctgactgcctgatcaagacagtgcgctctgagggctacttcggcatgtacagaggagctgctgtgaacctgaccctggtgaccccagagaaggccatcaagctggccgccaatgacttcttccgccaccagctgagcaaggatggccagaagctgaccctgctgaaggagatgctggccggctgtggggccggcacctgccaggtgattgtgaccaccccctag

SEQ ID NO: 170442 - DNA, 342 bp, synthetic construct
  misc_feature 1..342: note = Description of Artificial Sequence: Synthetic coding sequence
  source 1..342: mol_type = other DNA
atggctgacaagcagatcagcctgcctgccaagctgatcaatggaggcattgctggcctgattggagtgacctgtgtgttccccatcgacctggccaagacccggctgcagaaccagcagaatggccagagggtgtacacctccatgtctgactgcctgatcaagacagtgcgctctgagggctacttcggcatgtacagaggagctgctgtgaacctgaccctggtgaccccagagaaggccatcaagctggccgccaatgacttcttccgccaccagctgagcaaggatggccagaagctgaccctgctgaaggagatgctggccggctgtggggcctag

SEQ ID NO: 170443 - DNA, 237 bp, synthetic construct
  misc_feature 1..237: note = Description of Artificial Sequence: Synthetic coding sequence
  source 1..237: mol_type = other DNA
atggctgacaagcagatcagcctgcctgccaagctgatcaatggaggcattgctggcctgattggagtgacctgtgtgttccccatcgacctggccaagacccggctgcagaaccagcagaatggccagagggtgtacacctccatgtctgactgcctgatcaagacagtgcgctctgagggctacttcggcatgtacagaggagctgctgtgaacctgaccctggtgaccccctag

SEQ ID NO: 170444 - DNA, 180 bp, synthetic construct
  misc_feature 1..180: note = Description of Artificial Sequence: Synthetic coding sequence
  source 1..180: mol_type = other DNA
atggctgacaagcagatcagcctgcctgccaagctgatcaatggaggcattgctggcctgattggagtgacctgtgtgttccccatcgacctggccaagacccggctgcagaaccagcagaatggccagagggtgtacacctccatgtctgactgcctgatcaagacagtgcgctcctag

SEQ ID NO: 170445 - DNA, 972 bp, synthetic construct; identical to SEQ ID NO: 170437
  misc_feature 1..972: note = Description of Artificial Sequence: Synthetic coding sequence
  source 1..972: mol_type = other DNA

SEQ ID NO: 170446 - DNA, 345 bp, synthetic construct
  misc_feature 1..345: note = Description of Artificial Sequence: Synthetic coding sequence
  source 1..345: mol_type = other DNA
atggctgacaagcagatcagcctgcctgccaagctgatcaatggaggcattgctggcctgattggagtgacctgtgtgttccccatcgacctggccaagacccggctgcagaaccagcagaatggccagagggtgtacacctccatgtctgactgcctgatcaagacagtgcgctctgagggctacttcggcatgtacagaggagctgctgtgaacctgaccctggtgaccccagagaaggccatcaagctggccgccaatgacttcttccgccaccagctgagcaaggatggccagaagctgaccctgctgaaggagatgctggccggctgtggggccggctag

SEQ ID NO: 170447 - DNA, 237 bp, synthetic construct; identical to SEQ ID NO: 170443
  misc_feature 1..237: note = Description of Artificial Sequence: Synthetic coding sequence
  source 1..237: mol_type = other DNA

SEQ ID NO: 170448 - DNA, 321 bp, synthetic construct
  misc_feature 1..321: note = Description of Artificial Sequence: Synthetic coding sequence
  source 1..321: mol_type = other DNA
atggctgacaagcagatcagcctgcctgccaagctgatcaatggaggcattgctggcctgattggagtgacctgtgtgttccccatcgacctggccaagacccggctgcagaaccagcagaatggccagagggtgtacacctccatgtctgactgcctgatcaagacagtgcgctctgagggctacttcggcatgtacagaggagctgctgtgaacctgaccctggtgaccccagagaaggccatcaagctggccgccaatgacttcttccgccaccagctgagcaaggatggccagaagctgaccctgctgaaggagtag

SEQ ID NO: 170449 - DNA, 408 bp, synthetic construct
  misc_feature 1..408: note = Description of Artificial Sequence: Synthetic coding sequence
  source 1..408: mol_type = other DNA
atggctgacaagcagatcagcctgcctgccaagctgatcaatggaggcattgctggcctgattggagtgacctgtgtgttccccatcgacctggccaagacccggctgcagaaccagcagaatggccagagggtgtacacctccatgtctgactgcctgatcaagacagtgcgctctgagggctacttcggcatgtacagaggagctgctgtgaacctgaccctggtgaccccagagaaggccatcaagctggccgccaatgacttcttccgccaccagctgagcaaggatggccagaagctgaccctgctgaaggagatgctggccggctgtggggccggcacctgccaggtgattgtgaccacccccatggagatgctgaagatccagctgcaggatgctggatag

SEQ ID NO: 170450 - DNA, 948 bp, synthetic construct
  misc_feature 1..948: note = Description of Artificial Sequence: Synthetic coding sequence
  source 1..948: mol_type = other DNA
atgcaccgggagcccgccaagaagaaggccgagaagaggctgtttgatgccagcagctttgggaaggacctgctggccggcggcgtggccgctgctgtgtccaagacagctgtggcccccatcgagcgggtgaagctgctgctgcaggtgcaggccagcagcaagcagatcagccctgaggcccgctacaagggcatggtggactgcctggtgcgcatcccccgggagcagggcttcttctccttctggaggggcaacctggccaacgtcatccgctacttccccacccaggccctgaactttgccttcaaggacaagtacaagcagctgttcatgtctggagtgaacaaggagaagcagttctggcgctggttcctggccaacctggccagcggcggcgctgctggggccaccagcctgtgtgtggtgtaccccctggactttgcccggacccggctgggcgtggacattggaaaaggacctgaggagcggcagttcaagggcctgggggactgcatcatgaagatcgccaagagtgatggcattgctggcctgtaccagggctttggagtgtctgtgcagggcatcatcgtgtaccgggccagctactttggagcctatgacacagtgaagggcctgctgcccaagcccaagaagacccccttcctggtgtccttcttcatcgcccaggtggtgaccacctgcagcggcatcctgagctacccctttgacacagtgagaagaaggatgatgatgcagagcggggaggccaagaggcagtacaagggcaccctggactgctttgtgaagatctaccagcacgagggcatcagcagcttcttccggggggccttcagcaatgtgctgcggggcaccggcggggccctggtgctggtgctgtatgacaagatcaaggagttcttccacatcgacatcggcggccgctag

SEQ ID NO: 170451 - DNA, 897 bp, synthetic construct
  misc_feature 1..897: note = Description of Artificial Sequence: Synthetic coding sequence
  source 1..897: mol_type = other DNA
atgggagaccacgcctggagcttcctgaaggacttcctggccggcggcgtggccgctgctgtgtccaagacagctgtggcccccatcgagcgggtgaagctgctgctgcaggtgcagcacgccagcaagcagatctctgctgagaagcagtacaagggcatcatcgactgtgtggtgcgcatccccaaggagcagggcttcctgtccttctggaggggcaacctggccaacgtcatccgctacttccccacccaggccctgaactttgccttcaaggacaagtacaagcagctgttcctgggcggcgtggacagacacaagcagttctggagatactttgctggcaacctggccagcggcggcgctgctggggccaccagcctgtgctttgtgtaccccctggactttgcccggacccggctggccgcagatgtgggcaaaggagctgcccagcgggagttccacggcctgggggactgcatcatcaagatcttcaagagtgatggcctgcggggcctgtaccagggcttcaacgtgtctgtgcagggcatcatcatctacagagctgcctactttggagtgtatgacacagccaagggcatgctgcctgaccccaagaatgtgcacatctttgtgtcctggatgattgcccagagcgtgacagctgtggccggcctggtgtcctacccctttgacacagtgagaagaaggatgatgatgcagagcggcaggaaaggagctgacatcatgtacacaggcaccgtggactgctggaggaagatcgccaaggatgagggcgccaaggccttcttcaagggggcctggagcaatgtgctgcggggcatgggcggggcctttgtgctggtgctgtatgatgagatcaagaagtatgtgtag

SEQ ID NO: 170452 - DNA, 897 bp, synthetic construct
  misc_feature 1..897: note = Description of Artificial Sequence: Synthetic coding sequence
  source 1..897: mol_type = other DNA
atgacagatgctgctgtgtcctttgccaaggacttcctggccggcggcgtggccgccgccatcagcaagacagctgtggcccccatcgagcgggtgaagctgctgctgcaggtgcagcacgccagcaagcagatcacagctgacaagcagtacaagggcatcatcgactgtgtggtgcgcatccccaaggagcagggcgtgctgtccttctggaggggcaacctggccaacgtcatccgctacttccccacccaggccctgaactttgccttcaaggacaagtacaagcagatcttcctgggcggcgtggacaagaggacccagttctggctgtactttgctggcaacctggccagcggcggcgctgctggggccaccagcctgtgctttgtgtaccccctggactttgcccggacccggctggccgcagatgtgggcaaggccggggctgagcgggagttccggggcctgggggactgcctggtgaagatctacaagagtgatggcatcaagggcctgtaccagggcttcaacgtgtctgtgcagggcatcatcatctacagagctgcctacttcggcatctatgacacagccaagggcatgctgcctgaccccaagaacacccacatcgtcatctcctggatgattgcccagacagtgacagctgtggccggcctgaccagctacccctttgacacagtgagaagaaggatgatgatgcagagcggcaggaaaggaacagacatcatgtacacaggcaccctggactgctggaggaagatcgccagagatgagggcggcaaggccttcttcaagggggcctggagcaatgtgctgcggggcatgggcggggcctttgtgctggtgctgtatgatgagatcaagaagtacacctag

SEQ ID NO: 170453 - DNA, 897 bp, synthetic construct
  misc_feature 1..897: note = Description of Artificial Sequence: Synthetic coding sequence
  source 1..897: mol_type = other DNA
atgacagagcaggccatcagctttgccaaggacttcctggccggcggcattgctgctgccatcagcaagacagctgtggcccccatcgagcgggtgaagctgctgctgcaggtgcagcacgccagcaagcagattgctgctgacaagcagtacaagggcatcgtggactgcatcgtgcgcatccccaaggagcagggcgtgctgtccttctggaggggcaacctggccaacgtcatccgctacttccccacccaggccctgaactttgccttcaaggacaagtacaagcagatcttcctgggcggcgtggacaagcacacccagttctggagatactttgctggcaacctggccagcggcggcgctgctggggccaccagcctgtgctttgtgtaccccctggactttgcccggacccggctggccgcagatgtgggcaagagcggcacagagcgggagttccggggcctgggggactgcctggtgaagatcaccaagagtgatggcatccggggcctgtaccagggcttctctgtgtctgtgcagggcatcatcatctacagagctgcctactttggagtgtatgacacagccaagggcatgctgcctgaccccaagaacacccacatcgtggtgtcctggatgattgcccagacagtgacagctgtggccggcgtggtgtcctacccctttgacacagtgagaagaaggatgatgatgcagagcggcaggaaaggagctgacatcatgtacacaggcaccgtggactgctggaggaagatcttcagagatgagggcggcaaggccttcttcaagggggcctggagcaatgtgctgcggggcatgggcggggcctttgtgctggtgctgtatgatgagctgaagaaggtgatctag

SEQ ID NO: 170454 - DNA, 477 bp, synthetic construct
  misc_feature 1..477: note = Description of Artificial Sequence: Synthetic coding sequence
  source 1..477: mol_type = other DNA
atgacagagcaggccatcagctttgccaaggacttcctggccggcggcattgctgctgccatcagcaagacagctgtggcccccatcgagcgggtgaagctgctgctgcaggtgcagcacgccagcaagcagattgctgctgacaagcagtacaagggcatcgtggactgcatcgtgcgcatccccaaggagcagggcgtgctgtccttctggaggggcaacctggccaacgtcatccgctacttccccacccaggccctgaactttgccttcaaggacaagtacaagcagatcttcctgggcggcgtggacaagcacacccagttctggagatactttgctggcaacctggccagcggcggcgctgctggggccaccagcctgtgctttgtgtaccccctggactttgcccggacccggctggccgcagatgtgggcaagagcggcacagagcgggagttccggggcctgggctag

SEQ ID NO: 170455 - DNA, 2913 bp, synthetic construct
  misc_feature 1..2913: note = Description of Artificial Sequence: Synthetic coding sequence
  source 1..2913: mol_type = other DNA
atgctgtgcttcctggatgatggagctggcatggaccccagtgatgctgccagcgtcatccagtttgggaagagcgccaagaggaccccagagagcacccagatcggccagtatggaaatggcctgaagagcggctccatgagaattggcaaggacttcatcctcttcaccaagaaggaggacaccatgacctgcctcttcctgagcaggaccttccacgaggaggagggcattgatgaagtcatcgtgcccctgcccacctggaatgcccggacccgggagcctgtgacagacaacgtggagaagtttgccattgaaacagagctgatctacaagtacagccccttcagaacagaggaggaggtgatgacccagttcatgaagatccctggggacagcggcaccctggtgatcatcttcaacctgaagctgatggacaatggagagcctgagctggacatcatcagcaacccccgggacatccagatggccgagaccagccctgagggcaccaagccagagaggaggagcttccgggcctatgctgctgtgctgtacatcgaccccaggatgaggatcttcatccacggccacaaggtgcagaccaagaggctgagctgctgcctgtacaagcccaggatgtacaagtacaccagcagccgcttcaagaccagggctgagcaggaggtgaagaaggccgagcacgtggccagaattgctgaggagaaggcccgggaggccgagagcaaggcccggaccctggaggtgcggctgggcggggacctgacccgggacagccgggtgatgctgcggcaggtgcagaacagagccatcaccctgcggcgggaggctgatgtgaagaagaggatcaaggaggccaagcagagggccctgaaggagcccaaggagctgaactttgtgtttggagtgaacatcgagcaccgggacctggatggcatgttcatctacaactgcagccgcctcatcaagatgtatgagaaggtgggcccccagctggagggcggcatggcctgtggcggcgtggtgggcgtggtggatgtgccctacctggtgctggagcccacccacaacaagcaggactttgctgatgccaaggagtaccgccacctgctgcgggccatgggagagcacctggcccagtactggaaggacatcgccatcgcccagaggggcatcatcaagttctgggatgaatttggctacctgagcgccaactggaaccagccccccagcagcgagctgcgctacaagagaagaagagccatggagatccccaccaccatccagtgtgacctgtgcctgaagtggaggaccctgcccttccagctgagctctgtggagaaggactacccagacacctgggtgtgcagcatgaacccagaccctgagcaggacagatgtgaggccagcgagcagaagcagaaggtgcccctgggcaccttcaggaaggacatgaagacccaggaggagaagcagaagcagctgacagagaagatccggcagcagcaggagaagctggaggccctgcagaagaccacccccatccgcagccaggccgacctgaagaagctgcccctggaggtgaccacccggcccagcacagaggagcctgtgcggcggccccagaggcccaggagcccccccctgcctgctgtgatcagaaatgcccccagcaggcctcccagcctgcccacccccaggcctgccagccagcccaggaaggcccctgtgatcagcagcacccccaagctgcctgccctggccgcccgggaggaggccagcaccagccggctgctgcagcccccagaggcccccaggaagccagccaacaccctggtgaagacagccagcaggcctgcccccctggtgcagcagctgagccccagcctgctgcccaacagcaagagcccccgggaggtgcccagccccaaggtgatcaagacccctgtggtgaagaagacagagagccccatcaagctgagccctgccacccccagcaggaagaggtctgtggccgtgtctgatgaggaggaggtggaggaggaggccgagaggaggaaggagcgctgcaagaggggccgctttgtggtgaaggaggagaagaaggacagcaatgagctgagtgacagcgctggggaggaggacagcgctgacctgaagagggcccagaaggacaagggcctgcacgtggaggtgcgggtgaaccgggagtggtacacaggccgggtgacagctgtggaggtgggcaagcacgtggtgcgctggaaggtgaagtttgattatgtgcccacagacaccaccccccgggaccgctgggtggagaagggctctgaagatgtgcggctgatgaagccacccagccctgagcaccagagcctggacacccagcaggagggcggggaggaggaggtgggccctgtggcccagcaggccatcgctgtggccgagcccagcaccagcgagtgcctgcgcatcgagccagacaccacagccctgagcaccaaccacgagaccatcgacctgctggtgcagatcctgaggaactgcctgcgctacttcctgccccccagcttccccatcagcaagaagcagctgagcgccatgaacagtgatgagctgatctccttccccctgaaggagtacttcaagcagtatgaggtgggcctgcagaacctgtgcaacagctaccagagcagagctgacagccgggccaaggccagcgaggagagcctgcggaccagcgagaggaagctgcgggagacagaggagaagctgcagaagctgcggaccaacatcgtggccctgctgcagaaggtgcaggaggacatcgacatcaacacagatgatgagctggatgcctacattgaagatctcatcaccaagggggactag

SEQ ID NO: 170456 - DNA, 627 bp, synthetic construct
  misc_feature 1..627: note = Description of Artificial Sequence: Synthetic coding sequence
  source 1..627: mol_type = other DNA
atgtttgagttcctgagcaaccacatgagagatgcccagggccgcctggacagcacccggggcctgctgtgtggcctgggcgctggggtggccgaggccgtggtggtggtgtgccccatggagaccatcaaggtgaagttcatccatgaccagaccagccccaaccccaagtaccggggcttcttccatggagtgcgggagatcgtgcgggagcagggcctgaagggcacctaccagggcctgacagccaccgtgctgaagcagggcagcaaccaggccatccgcttctttgtgatgaccagcctgaggaactggtacagaggagacaaccccaacaagcccatgaaccccctcatcaccggggtgtttggagccatcgccggggccgcctctgtgtttggaaacacccccctggatgtgatcaagaccaggatgcagggcctggaggcccacaagtacagaaacacctgggactgtggcctgcagatcctgaagaaggagggcctgaaggccttctacaagggcaccgtgccccggctgggccgggtgtgcctggatgtggccatcgtgtttgtgatctatgatgaggtggtgaagctgctgaacaaggtgtggaagacagactag

SEQ ID NO: 170457 - DNA, 999 bp, synthetic construct
  misc_feature 1..999: note = Description of Artificial Sequence: Synthetic coding sequence
  source 1..999: mol_type = other DNA
atggctgctgccacagctgctgctgccctggccgctgctgaccccccaccagccatgccccaggccgccggggccggcggccccaccacccggcgggacttctactggctgcgctccttcctggccggcggcattgctggctgctgtgccaagaccaccgtggcccccctggacagagtgaaggtgctgctgcaggcccacaaccaccactacaagcacctgggcgtcttcagcgccctgcgggctgtgccccagaaggagggcttcctgggcctgtacaagggaaatggagccatgatgatccgcatcttcccctacggggccatccagttcatggcctttgagcactacaagaccctcatcaccaccaagctgggcatcagcggccacgtgcaccggctgatggccggctccatggccggcatgacagctgtgatctgcacctaccccctggacatggtgcgggtgcggctggccttccaggtgaagggggagcacagctacacaggcatcatccacgccttcaagaccatctatgccaaggagggcggcttcttcggcttctaccggggcctgatgcccaccatcctgggcatggccccctatgccggcgtgtccttcttcaccttcggcaccctgaagtctgtgggcctgagccacgcccccaccctgctgggccggcccagcagtgacaaccccaacgtgctggtgctgaagacccacgtgaacctgctgtgtggcggcgtggccggggccatcgcccagaccatctcctacccctttgatgtgaccaggaggaggatgcagctgggcaccgtgctgcctgagtttgagaagtgcctgaccatgagggacaccatgaagtatgtgtatggccaccacggcatcaggaagggcctgtaccggggcctgagcctgaactacatccgctgcatccccagccaggccgtggccttcaccacctatgagctgatgaagcagttcttccacctgaactag

SEQ ID NO: 170458 - DNA, 705 bp, synthetic construct
  misc_feature 1..705: note = Description of Artificial Sequence: Synthetic coding sequence
  source 1..705: mol_type = other DNA
atgatgatccgcatcttcccctacggggccatccagttcatggcctttgagcactacaagaccctcatcaccaccaagctgggcatcagcggccacgtgcaccggctgatggccggctccatggccggcatgacagctgtgatctgcacctaccccctggacatggtgcgggtgcggctggccttccaggtgaagggggagcacagctacacaggcatcatccacgccttcaagaccatctatgccaaggagggcggcttcttcggcttctaccggggcctgatgcccaccatcctgggcatggccccctatgccggcgtgtccttcttcaccttcggcaccctgaagtctgtgggcctgagccacgcccccaccctgctgggccggcccagcagtgacaaccccaacgtgctggtgctgaagacccacgtgaacctgctgtgtggcggcgtggccggggccatcgcccagaccatctcctacccctttgatgtgaccaggaggaggatgcagctgggcaccgtgctgcctgagtttgagaagtgcctgaccatgagggacaccatgaagtatgtgtatggccaccacggcatcaggaagggcctgtaccggggcctgagcctgaactacatccgctgcatccccagccaggccgtggccttcaccacctatgagctgatgaagcagttcttccacctgaactag

SEQ ID NO: 170459 - DNA, 906 bp, synthetic construct
  misc_feature 1..906: note = Description of Artificial Sequence: Synthetic coding sequence
  source 1..906: mol_type = other DNA
atgaagagcaacccagccatccaggccgccatcgacctgacagctggagctgctgggggcacagcctgtgtgctgaccggccagccctttgacaccatgaaggtgaagatgcagaccttcccagacctgtaccggggcctgacagactgctgcctgaagacctacagccaggtgggcttccggggcttctacaagggcaccagccctgccctgattgccaacattgctgaaaattctgtgctcttcatgtgctacggcttctgccagcaggtggtgaggaaggtggccggcctggacaagcaggccaagctgagtgacctgcagaatgctgctgctggcagctttgccagcgcctttgctgccctggtgctgtgccccacagagctggtgaagtgccgcctgcagaccatgtatgagatggagaccagcggcaagatcgccaagagccagaacacagtgtggagcgtcatcaagagcatcctgaggaaggatggccccctgggcttctaccacggcctgagcagcaccctgctgcgggaggtgcccggctacttcttcttcttcggcggctatgagctgagccgctccttctttgccagcggccgcagcaaggatgagctgggccctgtgcccctgatgctgtctggaggagtgggcggcatctgcctgtggctggccgtgtaccctgtggactgcatcaagagccgcatccaggtgctgtccatgtctgggaagcaggccggcttcatccgcaccttcatcaacgtggtgaagaatgaaggcatcacagccctgtacagcggcctgaagcccaccatgatccgggccttccctgccaacggggccctcttcctggcctatgagtacagcaggaagctgatgatgaaccagctggaggcctactag

SEQ ID NO: 170460 - DNA, 402 bp, synthetic construct
  misc_feature 1..402: note = Description of Artificial Sequence: Synthetic coding sequence
  source 1..402: mol_type = other DNA
atgaagagcaacccagccatccaggccgccatcgacctgacagctggagctgctgggggcacagcctgtgtgctgaccggccagccctttgacaccatgaaggtgaagatgcagaccttcccagacctgtaccggggcctgacagactgctgcctgaagacctacagccaggtgggcttccggggcttctacaagggcaccagccctgccctgattgccaacattgctgaaaattctgtgctcttcatgtgctacggcttctgccagcaggtggtgaggaaggtggccggcctggacaagcaggccaagctgagcacagtgtggagcgtcatcaagagcatcctgaggaaggatggccccctgggcttctaccacggcctgagcagcaccctgctgaggtag

SEQ ID NO: 170461 - DNA, 402 bp, synthetic construct; identical to SEQ ID NO: 170460
  misc_feature 1..402: note = Description of Artificial Sequence: Synthetic coding sequence
  source 1..402: mol_type = other DNA

SEQ ID NO: 170462 - DNA, 906 bp, synthetic construct; identical to SEQ ID NO: 170459
  misc_feature 1..906: note = Description of Artificial Sequence: Synthetic coding sequence
  source 1..906: mol_type = other DNA

SEQ ID NO: 170463 - DNA, 726 bp, synthetic construct
  misc_feature 1..726: note = Description of Artificial Sequence: Synthetic coding sequence
  source 1..726: mol_type = other DNA
atgaagagcaacccagccatccaggccgccatcgacctgacagctggagctgctgggggcacagcctgtgtgctgaccggccagccctttgacaccatgaaggtggccggcctggacaagcaggccaagctgagtgacctgcagaatgctgctgctggcagctttgccagcgcctttgctgccctggtgctgtgccccacagagctggtgaagtgccgcctgcagaccatgtatgagatggagaccagcggcaagatcgccaagagccagaacacagtgtggagcgtcatcaagagcatcctgaggaaggatggccccctgggcttctaccacggcctgagcagcaccctgctgcgggaggtgcccggctacttcttcttcttcggcggctatgagctgagccgctccttctttgccagcggccgcagcaaggatgagctgggccctgtgcccctgatgctgtctggaggagtgggcggcatctgcctgtggctggccgtgtaccctgtggactgcatcaagagccgcatccaggtgctgtccatgtctgggaagcaggccggcttcatccgcaccttcatcaacgtggtgaagaatgaaggcatcacagccctgtacagcggcctgaagcccaccatgatccgggccttccctgccaacggggccctcttcctggcctatgagtacagcaggaagctgatgatgaaccagctggaggcctactag

SEQ ID NO: 170464 - DNA, 906 bp, synthetic construct
  misc_feature 1..906: note = Description of Artificial Sequence: Synthetic coding sequence
  source 1..906: mol_type = other DNA
atgaagagcggccctggcatccaggccgccatcgacctgacagctggagctgctgggggcacagcctgtgtgctgaccggccagccctttgacaccatcaaggtgaagatgcagaccttcccagacctgtacaagggcctgacagactgcttcctgaagacctacgcccaggtgggcctgcggggcttctacaagggcactggacctgccctgatggcctacgtggctgaaaattctgtgctcttcatgtgctacggcttctgccagcagtttgtgaggaaggtggccggcatggacaagcaggccaagctgagtgacctgcagacagctgctgctggcagctttgccagcgcctttgctgccctggccctgtgccccacagagctggtgaagtgccgcctgcagaccatgtatgagatggagatgtctgggaagatcgccaagagccacaacaccatctggagcgtggtgaagggcatcctgaagaaggatggccccctgggcttctaccacggcctgagcagcaccctgctgcaggaggtgcccggctacttcttcttcttcggcggctatgagctgagccgctccttctttgccagcggccgcagcaaggatgagctgggccctgtgcacctgatgctgtctggaggagtggccggcatctgcctgtggctggtggtgtttcctgtggactgcatcaagagccgcatccaggtgctgtccatgtatggcaagcaggccggcttcatcggcaccctgctgtctgtggtgagaaatgaaggcatcgtggccctgtacagcggcctgaaggccaccatgatccgggccatcccagccaacggggccctgtttgtggcctatgagtacagcaggaagatgatgatgaagcagctggaggcctactag

SEQ ID NO: 170465 - DNA, 423 bp, synthetic construct
  misc_feature 1..423: note = Description of Artificial Sequence: Synthetic coding sequence
  source 1..423: mol_type = other DNA
atggccggctggaatgcctacatcgacaacctgatggctgatggcacctgccaggatgctgccatcgtgggctacaaggacagccccagcgtgtgggccgctgtgcctgggaagacctttgtgaacatcaccccagctgaggtgggcgtgctggtgggcaaggacaggagcagcttctacgtgaatggcctgaccctgggcggccagaagtgcagcgtcatccgggacagcctgctgcaggatggagagttctccatggacctgcggaccaagagcactggaggagcccccaccttcaacgtgacagtgaccaagacagacaagaccctggtgctgctgatgggcaaggagggcgtgcacggcggcctcatcaacaagaagtgctatgagatggccagccacctgcggcgcagccagtactag

SEQ ID NO: 170466 - DNA, 792 bp, synthetic construct
  misc_feature 1..792: note = Description of Artificial Sequence: Synthetic coding sequence
  source 1..792: mol_type = other DNA
atggccgccacagccagcgctggagctgggggcattgatggcaagcccaggaccagccccaagtctgtgaagttcctgtttggaggcctggccggcctgtctgctggcctgctgcggcaggccacctacaccaccacccggctgggcatctacacagtgctgtttgagcggctgactggagcagatggcaccccacctggcttcctgctgaaggccgtcatcggcatgacagctggggccactggagcctttgtgggcaccccagctgaggtggccctgatccgcatgacagcagatggccgcctgcctgctgaccagaggcggggctacaagaatgtgttcaatgccctgatccgcatcacccgggaggagggcgtgctgaccctgtggaggggctgcatccccaccatggcccgggctgtggtggtgaatgctgcccagctggccagctacagccagagcaagcagttcctgctggacagcggctacttcagtgacaacatcctgtgccacttctgtgcctccatgatcagcggcctggtgaccacagctgcctccatgcctgtggacatcgccaagacccgcatccagaacatgaggatgattgatggcaagccagagtacaagaatggcctggatgtgctcttcaaggtggtgcgctatgagggcttcttcagcctgtggaagggcttcaccccctactatgcccggctgggcccccacacagtgctgaccttcatcttcctggagcagatgaacaaggcctacaagaggctcttcctgagcggctag

SEQ ID NO: 170467 - DNA, 678 bp, synthetic construct
  misc_feature 1..678: note = Description of Artificial Sequence: Synthetic coding sequence
  source 1..678: mol_type = other DNA
atggagtactggtacgtggccctgaagcagcagagcctgaaggctgacatcctgcccagcctcttcctgagcatcttcctggtgaagggcgtggtgaatgtgctgctgaccacccccctgtgggtggtgaacacccggctgaagctgcagggcgccaagttcagaaatgaagatattgtgcccaccaactacaagggcatcattgatgccttccaccagatcatcagagatgagggcatcagcgccctgtggaatggcaccttccccagcctgctgctggtgttcaacccagccatccagttcatgttttatgagggcctgaagaggcagctgctgaagaagaggatgaagctgagcagcctggatgtgttcatcatcggggctgtggccaaggccatcgccaccaccgtgacctaccccctgcagacagtgcagagcatcctgcgcttcggccgccaccggctgaaccctgagaacagaaccctgggcagcctgaggaacatcctgtacctgctgcaccagagggtgagaagatttggcatcatgggcctgtacaagggcctggaggccaagctgctgcagacagtgctgacagctgccctgatgttcctggtgtatgagaagctgacagctgccaccttcaccgtgatgggcctgaagagggcccaccagcactag

SEQ ID NO: 170468 - DNA, 279 bp, synthetic construct
  misc_feature 1..279: note = Description of Artificial Sequence: Synthetic coding sequence
  source 1..279: mol_type = other DNA
atgggctctgtgacagccatgaccgtcttcttccccctggacacagcccggctgcggctgcaggtggatgagaagaggaagagcaagaccacccacatggtgctgctggagatcatcaaggaggagggcctgctggccccctaccggggctggttccctgtgatcagcagcctgtgctgcagcaactttgtgtacttctacaccttcaacagcctgaaggccctgtgggtgaagggccagcacagcaccaccgggaaggacctggtggtgggcttctag

SEQ ID NO: 170469 - DNA, 924 bp, synthetic construct
  misc_feature 1..924: note = Description of Artificial Sequence: Synthetic coding sequence
  source 1..924: mol_type = other DNA
atggcctctgtgctgtcctatgagagcctggtgcatgctgtggccggggctgtgggctctgtgacagccatgacagtgttcttccccctggacacagcccggctgcggctgcaggtggatgagaagaggaagagcaagaccacccacatggtgctgctggagatcatcaaggaggagggcctgctggccccctaccggggctggttccctgtgatcagcagcctgtgctgcagcaactttgtgtacttctacaccttcaacagcctgaaggccctgtgggtgaagggccagcacagcaccaccgggaaggacctggtggtgggctttgtggccggcgtggtgaatgtgctgctgaccacccccctgtgggtggtgaacacccggctgaagctgcagggcgccaagttcagaaatgaagatattgtgcccaccaactacaagggcatcattgatgccttccaccagatcatcagagatgagggcatcagcgccctgtggaatggcaccttccccagcctgctgctggtgttcaacccagccatccagttcatgttttatgagggcctgaagaggcagctgctgaagaagaggatgaagctgagcagcctggatgtgttcatcatcggggctgtggccaaggccatcgccaccaccgtgacctaccccctgcagacagtgcagagcatcctgcgcttcggccgccaccggctgaaccctgagaacagaaccctgggcagcctgaggaacatcctgtacctgctgcaccagagggtgagaagatttggcatcatgggcctgtacaagggcctggaggccaagctgctgcagacagtgctgacagctgccctgatgttcctggtgtatgagaagctgacagctgccaccttcaccgtgatgggcctgaagagggcccaccagcactag

SEQ ID NO: 170470 - DNA, 705 bp, synthetic construct
  misc_feature 1..705: note = Description of Artificial Sequence: Synthetic coding sequence
  source 1..705: mol_type = other DNA
atggcctctgtgctgtcctatgagagcctggtgcatgctgtggccggggctgtgggctctgtgacagccatgacagtgttcttccccctggacacagcccggctgcggctgcagggcgtggtgaatgtgctgctgaccacccccctgtgggtggtgaacacccggctgaagctgcagggcgccaagttcagaaatgaagacatcgtgcccaccaactacaagggcatcattgatgccttccaccagatcatcagagatgagggcatcagcgccctgtggaatggcaccttccccagcctgctgctggtgttcaacccagccatccagttcatgttttatgagggcctgaagaggcagctgctgaagaagaggatgaagctgagcagcctggatgtgttcatcattggagctgtggccaaggccatcgccaccaccgtgacctaccccctgcagacagtgcagagcatcctgcgcttcggccgccaccggctgaacccagaaaatagaaccctgggcagcctgaggaacatcctgtacctgctgcaccagagggtgcggcgcttcggcatcatgggcctgtacaagggcctggaggccaagctgctgcagacagtgctgacagctgccctgatgttcctggtgtatgagaagctgacagctgccaccttcaccgtgatgggcctgaagagggcccaccagcactag

SEQ ID NO: 170471 - DNA, 813 bp, synthetic construct
  misc_feature 1..813: note = Description of Artificial Sequence: Synthetic coding sequence
  source 1..813: mol_type = other DNA
atgattgatgagaagaggaagagcaagaccacccacatggtgctgctggagatcatcaaggaggagggcctgctggccccctaccggggctggttccctgtgatcagcagcctgtgctgcagcaactttgtgtacttctacaccttcaacagcctgaaggccctgtgggtgaagggccagcacagcaccaccgggaaggacctggtggtgggctttgtggccggcgtggtgaatgtgctgctgaccacccccctgtgggtggtgaacacccggctgaagctgcagggcgccaagttcagaaatgaagacatcgtgcccaccaactacaagggcatcattgatgccttccaccagatcatcagagatgagggcatcagcgccctgtggaatggcaccttccccagcctgctgctggtgttcaacccagccatccagttcatgttttatgagggcctgaagaggcagctgctgaagaagaggatgaagctgagcagcctggatgtgttcatcattggagctgtggccaaggccatcgccaccaccgtgacctaccccctgcagacagtgcagagcatcctgcgcttcggccgccaccggctgaacccagaaaatagaaccctgggcagcctgaggaacatcctgtacctgctgcaccagagggtgcggcgcttcggcatcatgggcctgtacaagggcctggaggccaagctgctgcagacagtgctgacagctgccctgatgttcctggtgtatgagaagctgacagctgccaccttcaccgtgatgggcctgaagagggcccaccagcactag

SEQ ID NO: 170472 - DNA, 1086 bp, synthetic construct
  misc_feature 1..1086: note = Description of Artificial Sequence: Synthetic coding sequence
  source 1..1086: mol_type = other DNA
atgttcagctctgtggcccacctggcccgggccaaccccttcaacaccccccacctgcagctggtgcatgatggcctgggggacctgcggagcagcagccctggccccaccggccagccccggcggcccaggaacctggccgctgctgctgtggaggagtacagctgtgaatttggcagcgccaagtactatgccctgtgtggctttggaggagtgctgagctgtggcctgacccacacagctgtggtgcccctggacctggtgaagtgcaggatgcaggtggacccccagaagtacaagggcatcttcaacggcttctctgtgaccctgaaggaggatggagtgcggggcctggccaagggctgggcccccaccttcctgggctacagcatgcagggcctgtgcaagtttggcttctatgaggtgttcaaggtgctgtacagcaacatgctgggggaggagaacacctacctgtggaggaccagcctgtacctggccgccagcgccagcgctgagttctttgctgacatcgccctggcccccatggaggccgccaaggtgcgcatccagacccagcccggctacgccaacaccctgagagatgctgcccccaagatgtacaaggaggagggcctgaaggccttctacaagggcgtggcccccctgtggatgaggcagatcccctacaccatgatgaagtttgcctgctttgagaggacagtggaggccctgtacaagtttgtggtgcccaagcccaggagtgaatgttccaagccagagcagctggtggtgacctttgtggccggctacatcgccggggtcttctgtgccatcgtgagccaccctgctgacagcgtggtgtctgtgctgaacaaggagaagggcagcagcgccagcctggtgctgaagaggctgggcttcaagggcgtgtggaagggcctgtttgcccgcatcatcatgattggcaccctgacagccctgcagtggttcatctatgacagcgtgaaggtgtacttccggctgccccggcccccacctcctgagatgcctgagagcctgaagaagaagctgggcctgacccagtag

SEQ ID NO: 170473 - DNA, 1776 bp, synthetic construct
  misc_feature 1..1776: note = Description of Artificial Sequence: Synthetic coding sequence
  source 1..1776: mol_type = other DNA
atggatgacctggatgccctgctggccgacctggagagcaccaccagccacatcagcaagaggcctgtgttcctgtctgaggagaccccctacagctaccccactggaaaccacacctaccaggagattgctgtgcccccacctgtgcccccaccacccagcagcgaggccctgaatggcaccatcctggaccccctggaccagtggcagcccagcagcagccgcttcatccaccagcagccccagagcagcagccctgtgtatggcagcagcgccaagaccagctctgtgagcaacccccaggacagcgtgggcagcccctgcagccgggtgggggaggaggagcacgtgtacagcttccccaacaagcagaagtctgctgagcccagccccaccgtgatgagcaccagcctgggcagcaacctgtctgagctggaccggctgctgctggagctgaatgctgtgcagcacaaccccccaggcttcccagcagatgaggccaacagcagcccccccctgcccggggccctgagccccctgtatggagtgcctgagaccaacagccccctgggcggcaaggccggccccctgaccaaggagaagcccaagagaaatggaggccggggcctggaggatgtgcggcccagcgtggagagcctgctggatgagctggagagctctgtgcccagccctgtgcctgccatcaccgtgaaccagggcgagatgagcagcccccagagggtgaccagcacccagcagcagacccgcatcagcgccagcagcgccacccgggagctggatgagctgatggccagcctgagtgacttcaagatccagggcctggagcagagagcagatggagagcgctgctgggccgccggctggcccagagatggcggccgcagcagccctgggggccaggatgagggcggcttcatggcccagggcaagacaggcagcagcagccccccaggcggcccccccaagccaggcagccagctggacagcatgctgggcagcctgcagagcgacctgaacaagctgggcgtggccaccgtggccaagggcgtgtgtggggcctgcaagaagcccatcgccggccaggtggtgacagccatgggcaagacctggcaccctgagcactttgtgtgcacccactgccaggaggagatcggcagcaggaacttctttgaaagagatggccagccctactgtgagaaggactaccacaacctcttcagcccccgctgctactactgcaatggccccatcctggacaaggtggtgacagccctggacaggacctggcaccctgagcacttcttctgtgcccagtgtggggccttcttcggccctgagggcttccacgagaaggatggcaaggcctactgcaggaaggactactttgacatgtttgcccccaagtgtggcggctgtgcccgggccatcctggagaactacatcagcgccctgaacaccctgtggcaccctgagtgctttgtgtgccgggagtgcttcaccccatttgtgaatggcagcttctttgaacatgatggccagccctactgtgaggtgcactaccacgagcggcggggcagcctgtgcagcggctgccagaagcccatcaccggccgctgcatcacagccatggccaagaagttccaccctgagcactttgtgtgtgccttctgcctgaagcagctgaacaagggcaccttcaaggagcagaatgacaagccctactgccagaactgcttcctgaagctgttctgctag

SEQ ID NO: 170474 - DNA, 1086 bp, synthetic construct; identical to SEQ ID NO: 170472
  misc_feature 1..1086: note = Description of Artificial Sequence: Synthetic coding sequence
  source 1..1086: mol_type = other DNA

SEQ ID NO: 170475 - DNA, 1086 bp, synthetic construct; identical to SEQ ID NO: 170472
  misc_feature 1..1086: note = Description of Artificial Sequence: Synthetic coding sequence
  source 1..1086: mol_type = other DNA

SEQ ID NO: 170476 - DNA, 1089 bp, synthetic construct; identical to SEQ ID NO: 161684
  misc_feature 1..1089: note = Description of Artificial Sequence: Synthetic coding sequence
  source 1..1089: mol_type = other DNA

SEQ ID NO: 170477 - DNA, 1086 bp, synthetic construct; identical to SEQ ID NO: 170472
  misc_feature 1..1086: note = Description of Artificial Sequence: Synthetic coding sequence
  source 1..1086: mol_type = other DNA

SEQ ID NO: 170478 - DNA, 897 bp, synthetic construct
  misc_feature 1..897: note = Description of Artificial Sequence: Synthetic coding sequence
  source 1..897: mol_type = other DNA
atgtctgccaagccagaggtgtccctggtgcgggaggccagccggcagatcgtggccggcggcagcgctggcctggtggagatctgcctgatgcaccccctggatgtggtgaagacccgcttccagatccagagatgtgccacagaccccaacagctacaagagcctggtggacagcttcaggatgatcttccagatggagggcctgtttggcttctacaagggcatcctgccccccatcctggccgagacccccaagagagctgtgaagttcttcacctttgagcagtacaagaagctgctgggctacgtgtccctgagccctgccctgacctttgccatcgccggcctgggcagcggcctgacagaggccatcgtggtgaacccctttgaggtggtgaaggtgggcctgcaggccaacagaaacacctttgctgagcagcccagcacagtgggctacgcccggcagatcatcaagaaggagggctggggcctgcagggcctgaacaagggcctgacagccaccctgggcagacatggagtcttcaacatggtgtacttcggcttctactacaacgtgaagaacatgatccctgtgaacaaggaccccatcctggagttctggaggaagtttggaattggcctgctgagcggcaccatcgccagcgtcatcaacatcccctttgatgtggccaagagccgcatccagggcccccagcctgtgcctggagagatcaagtaccgcacctgcttcaagaccatggccaccgtgtaccaggaggagggcatcctggccctgtacaagggcctgctgcccaagatcatgaggctgggccctggaggagctgtgatgctgctggtgtatgagtacacctacagctggctgcaggagaactag

SEQ ID NO: 170479 - DNA, 900 bp, synthetic construct
  misc_feature 1..900: note = Description of Artificial Sequence: Synthetic coding sequence
  source 1..900: mol_type = other DNA
atgtctgccaagccagaggtgtccctggtgcgggaggccagccggcagatcgtggccggcggcagcgctggcctggtggagatctgcctgatgcaccccctggatgtggtgaagacccgcttccagatccagagatgtgccacagaccccaacagctacaagagcctggtggacagcttcaggatgatcttccagatggagggcctgtttggcttctacaagggcatcctgccccccatcctggccgagacccccaagagagctgtgaagttcttcacctttgagcagtacaagaagctgctgggctacgtgtccctgagccctgccctgacctttgccatcgccggcctgggcagcggcctgacagaggccatcgtggtgaacccctttgaggtggtgaaggtgggcctgcaggccaacagaaacacctttgctgagcagcccagcacagtgggctacgcccggcagatcatcaagaaggagggctggggcctgcagggcctgaacaagggcctgacagccaccctgggcagacatggagtcttcaacatggtgtacttcggcttctactacaacgtgaagaacatgatccctgtgaacaaggaccccatcctggagttctggaggaagtttggaattggcctgctgagcggcaccatcgccagcgtcatcaacatcccctttgatgtggccaagagccgcatccagggcccccagcctgtgcctggagagatcaagtaccgcacctgcttcaagaccatggccaccgtgtaccaggaggagggcatcctggccctgtacaagggcctgctgcccaagatcatgaggctgggccctggaggagctgtgatgctgctggtgtatgagtacacctacagctggctgcaggagaactggtag

SEQ ID NO: 170480 - DNA, 963 bp, synthetic construct
  misc_feature 1..963: note = Description of Artificial Sequence: Synthetic coding sequence
  source 1..963: mol_type = other DNA
atggtgggctatgaccccaagccagatggaagaaacaacaccaagttccaggtggccgtggccggctctgtgtctggcctggtgacccgggccctgatcagcccctttgatgtgatcaagatccgcttccagctgcagcacgagcggctgagcagaagtgaccccagcgccaagtaccacggcatcctgcaggccagccggcagatcctgcaggaggagggccccacagccttctggaagggccacgtgcctgcccagatcctgagcatcggctacggggctgtgcagttcctgagctttgagatgctgacagagctggtgcaccggggctctgtgtatgatgcccgggagttctctgtgcactttgtgtgtggcggcctggccgcctgcatggccaccctgactgtgcaccctgtggatgtgctgcggaccaggtttgctgcccagggcgagcccaaggtgtacaacaccctgcggcatgctgtgggcaccatgtacagaagtgagggcccccaggtgttctacaagggcctggcccccaccctgattgccatcttcccctatgccggcctgcagttcagctgctacagcagcctgaagcacctgtacaagtgggccatcccagctgagggcaagaagaatgaaaacctgcagaacctgctgtgtggcagcggggccggggtcatcagcaagaccctgacctaccccctggacctcttcaagaagaggctgcaggtgggcggctttgaacatgcccgggccgccttcggccaggtgcggcgctacaagggcctgatggactgtgccaagcaggtgctgcagaaggagggcgccctgggcttcttcaagggcctgagccccagcctgctgaaggccgccctgagcacaggcttcatgttcttctcctatgagttcttctgcaatgtgttccactgcatgaacagaacagccagccagaggtag

SEQ ID NO: 170481 - DNA, 963 bp, synthetic construct; identical to SEQ ID NO: 170480
  misc_feature 1..963: note = Description of Artificial Sequence: Synthetic coding sequence
  source 1..963: mol_type = other DNA

SEQ ID NO: 170482 - DNA, 792 bp, synthetic construct
  misc_feature 1..792: note = Description of Artificial Sequence: Synthetic coding sequence
  source 1..792: mol_type = other DNA
atggtgggctatgaccccaagccagatggaagaaacaacaccaagttccaggtggccgtggccggctctgtgtctggcctggtgacccgggccctgatcagcccctttgatgtgatcaagatccgcttccagctgcagcacgagcggctgagcagaagtgaccccagcgccaagtaccacggcatcctgcaggccagccggcagatcctgcaggaggagggccccacagccttctggaagggccacgtgcctgcccagatcctgagcatcggctacggggctgtgcaggtgtacaacaccctgcggcatgctgtgggcaccatgtacagaagtgagggcccccaggtgttctacaagggcctggcccccaccctcatcgccatcttcccctatgccggcctgcagttcagctgctacagcagcctgaagcacctgtacaagtgggccatcccagctgagggcaagaagaatgaaaacctgcagaacctgctgtgtggcagcggggccggggtcatcagcaagaccctgacctaccccctggacctcttcaagaagaggctgcaggtgggcggctttgagcacgcccgggccgccttcggccaggtgcggcgctacaagggcctgatggactgtgccaagcaggtgctgcagaaggagggcgccctgggcttcttcaagggcctgagccccagcctgctgaaggccgccctgagcacaggcttcatgttcttctcctatgagttcttctgcaatgtgttccactgcatgaacagaacagccagccagaggtag

SEQ ID NO: 170483 - DNA, 963 bp, synthetic construct; identical to SEQ ID NO: 170480
  misc_feature 1..963: note = Description of Artificial Sequence: Synthetic coding sequence
  source 1..963: mol_type = other DNA

SEQ ID NO: 170484 - DNA, 963 bp, synthetic construct; identical to SEQ ID NO: 170480
  misc_feature 1..963: note = Description of Artificial Sequence: Synthetic coding sequence
  source 1..963: mol_type = other DNA

SEQ ID NO: 170485 - DNA, 963 bp, synthetic construct; identical to SEQ ID NO: 170480
  misc_feature 1..963: note = Description of Artificial Sequence: Synthetic coding sequence
  source 1..963: mol_type = other DNA

SEQ ID NO: 170486 - DNA, 2028 bp, synthetic construct
  misc_feature 1..2028: note = Description of Artificial Sequence: Synthetic coding sequence
  source 1..2028: mol_type = other DNA
atggctgctgccaaggtggccctgaccaagagagctgaccctgctgagctgcggaccatcttcctgaagtatgccagcattgagaagaatggagagttcttcatgagccccaatgactttgtgacccgctacctgaacatctttggagagagccagcccaaccccaagacagtggagctgctgagcggcgtggtggaccagaccaaggatggcctcatctccttccaggagtttgtggcctttgaatctgtgctgtgtgccccagatgccctcttcatggtggccttccagctgtttgacaaggccggcaagggggaggtgacctttgaagatgtgaagcaggtgtttggccagaccaccatccaccagcacatccccttcaactgggacagcgagtttgtgcagctgcactttgggaaggagaggaagaggcacctgacctatgcagagttcacccagttcctgctggagatccagctggagcacgccaagcaggcctttgtgcagagggacaatgccaggacaggccgggtgacagccatcgacttccgggacatcatggtgaccatccggccccacgtgctgaccccatttgtggaggagtgcctggtggccgctgctgggggcaccaccagccaccaggtgtccttctcctacttcaacggcttcaacagcctgctgaacaacatggagctgatcaggaagatctacagcaccctggccggcaccaggaaggatgtggaggtgaccaaggaggagtttgtgctggccgcccagaagtttggccaggtgacccccatggaggtggacatcctcttccagctggccgacctgtatgagccccggggccgcatgaccctggccgacatcgagagaattgcccccctggaggagggcaccctgcccttcaacctggccgaggcccagaggcagaaggccagcggggacagcgcccggcctgtgctgctgcaggtggccgagagcgcctaccgcttcggcctgggctctgtggccggggctgtgggcgccacagctgtgtaccccatcgacctggtgaagaccaggatgcagaaccagaggagcacaggcagctttgtgggggagctgatgtacaagaacagctttgactgcttcaagaaggtgctgcgctatgagggcttcttcggcctgtaccggggcctgctgccccagctgctgggcgtggcccctgagaaggccatcaagctgactgtgaatgactttgtgcgggacaagttcatgcacaaggatggctctgtgcccctggccgctgagatcctggccggcggctgtgccggcggcagccaggtgatcttcaccaaccccctggagatcgtgaagatccggctgcaggtggccggggagatcaccaccggcccccgggtgtctgccctgtctgtggtgcgggacctgggcttcttcggcatctacaagggggccaaggcctgcttcctgcgggacatccccttcagcgccatctacttcccctgctacgcccacgtgaaggccagctttgccaatgaagatggccaggtgtccccaggcagcctgctgctggccggggccatcgccggcatgcctgctgccagcctggtgaccccagcagatgtgatcaagacccggctgcaggtggccgcccgggccggccagaccacctacagcggcgtgattgactgcttcaggaagatcctgcgggaggagggccccaaggccctgtggaagggggccggggcccgggtcttccgcagcagcccccagtttggagtgaccctgctgacctatgagctgctgcagcgctggttctacatcgactttggaggagtgaagcccatgggcagcgagcctgtgcccaagagccgcatcaacctgcctgcccccaacccagaccacgtgggcggctacaagctggccgtggccacctttgctggcatcgagaacaagtttggcctgtacctgcccctcttcaagcccagcgtgtccaccagcaaggccatcggcggcggcccctag

SEQ ID NO: 170487 - DNA, 2031 bp, synthetic construct
  misc_feature 1..2031: note = Description of Artificial Sequence: Synthetic coding sequence
  source 1..2031: mol_type = other DNA
atggctgctgccaaggtggccctgaccaagagagctgaccctgctgagctgcggaccatcttcctgaagtatgccagcattgagaagaatggagagttcttcatgagccccaatgactttgtgacccgctacctgaacatctttggagagagccagcccaaccccaagacagtggagctgctgagcggcgtggtggaccagaccaaggatggcctcatctccttccaggagtttgtggcctttgaatctgtgctgtgtgccccagatgccctcttcatggtggccttccagctgtttgacaaggccggcaagggggaggtgacctttgaagatgtgaagcaggtgtttggccagaccaccatccaccagcacatccccttcaactgggacagcgagtttgtgcagctgcactttgggaaggagaggaagaggcacctgacctatgcagagttcacccagttcctgctggagatccagctggagcacgccaagcaggcctttgtgcagagggacaatgccaggacaggccgggtgacagccatcgacttccgggacatcatggtgaccatccggccccacgtgctgaccccatttgtggaggagtgcctggtggccgctgctgggggcaccaccagccaccaggtgtccttctcctacttcaacggcttcaacagcctgctgaacaacatggagctgatcaggaagatctacagcaccctggccggcaccaggaaggatgtggaggtgaccaaggaggagtttgtgctggccgcccagaagtttggccaggtgacccccatggaggtggacatcctcttccagctggccgacctgtatgagccccggggccgcatgaccctggccgacatcgagagaattgcccccctggaggagggcaccctgcccttcaacctggccgaggcccagaggcagcagaaggccagcggggacagcgcccggcctgtgctgctgcaggtggccgagagcgcctacagatttggcctgggctctgtggccggggctgtgggcgccacagctgtgtaccccatcgacctggtgaagaccaggatgcagaaccagaggagcacaggcagctttgtgggggagctgatgtacaagaacagctttgactgcttcaagaaggtgctgcgctatgagggcttcttcggcctgtaccggggcctgctgccccagctgctgggcgtggcccctgagaaggccatcaagctgactgtgaatgactttgtgcgggacaagttcatgcacaaggatggctctgtgcccctggccgctgagatcctggccggcggctgtgccggcggcagccaggtgatcttcaccaaccccctggagatcgtgaagatccggctgcaggtggccggggagatcaccaccggcccccgggtgtctgccctgtctgtggtgcgggacctgggcttcttcggcatctacaagggggccaaggcctgcttcctgcgggacatccccttcagcgccatctacttcccctgctacgcccacgtgaaggccagctttgccaatgaagatggccaggtgtccccaggcagcctgctgctggccggggccatcgccggcatgcctgctgccagcctggtgaccccagcagatgtgatcaagacccggctgcaggtggccgcccgggccggccagaccacctacagcggggtcatcgactgcttcaggaagatcctgcgggaggagggccccaaggccctgtggaagggagctggggcccgggtcttccgcagcagcccccagtttggagtgaccctgctgacctatgagctgctgcagcgctggttctacatcgactttggaggagtgaagcccatgggcagcgagcctgtgcccaagagccgcatcaacctgcctgcccccaacccagaccacgtgggcggctacaagctggccgtggccacctttgctggcatcgagaacaagtttggcctgtacctgcccctcttcaagcccagcgtgtccaccagcaaggccatcggcggcggcccctag

SEQ ID NO: 170488 - DNA, 1704 bp, synthetic construct
  misc_feature 1..1704: note = Description of Artificial Sequence: Synthetic coding sequence
  source 1..1704: mol_type = other DNA
atggaggatgtgaagcaggtgtttggccagaccaccatccaccagcacatccccttcaactgggacagcgagtttgtgcagctgcactttgggaaggagaggaagaggcacctgacctatgcagagttcacccagttcctgctggagatccagctggagcacgccaagcaggcctttgtgcagagggacaatgccaggacaggccgggtgacagccatcgacttccgggacatcatggtgaccatccggccccacgtgctgaccccatttgtggaggagtgcctggtggccgctgctgggggcaccaccagccaccaggtgtccttctcctacttcaacggcttcaacagcctgctgaacaacatggagctgatcaggaagatctacagcaccctggccggcaccaggaaggatgtggaggtgaccaaggaggagtttgtgctggccgcccagaagtttggccaggtgacccccatggaggtggacatcctcttccagctggccgacctgtatgagccccggggccgcatgaccctggccgacatcgagagaattgcccccctggaggagggcaccctgcccttcaacctggccgaggcccagaggcagaaggccagcggggacagcgcccggcctgtgctgctgcaggtggccgagagcgcctaccgcttcggcctgggctctgtggccggggctgtgggcgccacagctgtgtaccccatcgacctggtgaagaccaggatgcagaaccagaggagcacaggcagctttgtgggggagctgatgtacaagaacagctttgactgcttcaagaaggtgctgcgctatgagggcttcttcggcctgtaccggggcctgctgccccagctgctgggcgtggcccctgagaaggccatcaagctgactgtgaatgactttgtgcgggacaagttcatgcacaaggatggctctgtgcccctggccgctgagatcctggccggcggctgtgccggcggcagccaggtgatcttcaccaaccccctggagatcgtgaagatccggctgcaggtggccggggagatcaccaccggcccccgggtgtctgccctgtctgtggtgcgggacctgggcttcttcggcatctacaagggggccaaggcctgcttcctgcgggacatccccttcagcgccatctacttcccctgctacgcccacgtgaaggccagctttgccaatgaagatggccaggtgtccccaggcagcctgctgctggccggggccatcgccggcatgcctgctgccagcctggtgaccccagcagatgtgatcaagacccggctgcaggtggccgcccgggccggccagaccacctacagcggcgtgattgactgcttcaggaagatcctgcgggaggagggccccaaggccctgtggaagggggccggggcccgggtcttccgcagcagcccccagtttggagtgaccctgctgacctatgagctgctgcagcgctggttctacatcgactttggaggagtgaagcccatgggcagcgagcctgtgcccaagagccgcatcaacctgcctgcccccaacccagaccacgtgggcggctacaagctggccgtggccacctttgctggcatcgagaacaagtttggcctgtacctgcccctcttcaagcccagcgtgtccaccagcaaggccatcggcggcggcccctag

SEQ ID NO: 170489 - DNA, 561 bp, synthetic construct
  misc_feature 1..561: note = Description of Artificial Sequence: Synthetic coding sequence
  source 1..561: mol_type = other DNA
atgaagcacatgctggccgccagcgctggggaggtggtggcctgcctgatccgggtgcccagcgaggtggtgaagcagagggcccaggtgtctgccagcaccaggaccttccagatcttcagcaacatcctgtatgaggagggcatccagggcctgtaccggggctacaagagcacagtgctgcgggagatccccttcagcctggtgcagttccccctgtgggagagcctgaaggccctgtggagctggaggcaggaccacgtggtggacagctggcagagcgctgtgtgtggggcctttgctgggggctttgctgctgctgtgaccacccccctggatgtggccaagacccgcatcaccctggccaaggccggcagcagcacagcagatggaaatgtgctgtctgtgctgcacggcgtgtggaggagccagggcctggccggcctgtttgctggggtcttccccaggatggccgccatcagcctgggcggcttcatcttcctgggcgcctatgacaggacccacagcctgctgctggaggtgggcaggaagagcccctag

SEQ ID NO: 170490 - DNA, 825 bp, synthetic construct
  misc_feature 1..825: note = Description of Artificial Sequence: Synthetic coding sequence
  source 1..825: mol_type = other DNA
atggaccggcccggctttgtggccgccctggtggccggcggcgtggccggcgtgtctgtggacctgatcctcttccccctggacaccatcaagacccggctgcagagcccccagggcttcagcaaggccggcggcttccacggcatctatgccggcgtgcccagcgctgccatcggcagcttccccaatgctgctgccttcttcatcacctatgaatatgtgaagtggttcctgcacgccgacagcagcagctacctgacccccatgaagcacatgctggccgccagcgctggggaggtggtggcctgcctgatccgggtgcccagcgaggtggtgaagcagagggcccaggtgtctgccagcaccaggaccttccagatcttcagcaacatcctgtatgaggagggcatccagggcctgtaccggggctacaagagcacagtgctgcgggagatccccttcagcctggtgcagttccccctgtgggagagcctgaaggccctgtggagctggaggcaggaccacgtggtggacagctggcagagcgctgtgtgtggggcctttgctgggggctttgctgctgctgtgaccacccccctggatgtggccaagacccgcatcaccctggccaaggccggcagcagcacagcagatggaaatgtgctgtctgtgctgcacggcgtgtggaggagccagggcctggccggcctgtttgctggggtcttccccaggatggccgccatcagcctgggcggcttcatcttcctgggcgcctatgacaggacccacagcctgctgctggaggtgggcaggaagagcccctag

SEQ ID NO: 170491 - DNA, 66 bp, synthetic construct
  misc_feature 1..66: note = Description of Artificial Sequence: Synthetic coding sequence
  source 1..66: mol_type = other DNA
atggaccggcccggctttgtggccgccctggtgctgctgcacttcctgagccccatgaacatgtag

SEQ ID NO: 170492 - DNA, 477 bp, synthetic construct
  misc_feature 1..477: note = Description of Artificial Sequence: Synthetic coding sequence
  source 1..477: mol_type = other DNA
atggagggcaagaggaagctggagggcaagcccctgcgcttccggggcgtgcaccacgcctttgccaagatcctggccgagggcggcatccggggcctgtgggccggctgggtgcccaacatccagagagctgccctggtgaacatgggagacctgaccacctatgacacagtgaagcactacctggtgctgaacacccccctggaggacaacatcatgacccacggcctgagcagcctgtgcagcggcctggtggccagcatcctgggcaccccagcagatgtgatcaagagccgcatcatgaaccagccccgggacaagcagggccggggcctgctgtacaagagcagcacagactgcctgatccaggccgtgcagggcgagggcttcatgagcctgtacaagggcttcctgcccagctggctgaggatggccgccgtcatcgtgaacagcagccgcagccagctgaaggtgtag

SEQ ID NO: 170493 - DNA, 972 bp, synthetic construct
  misc_feature 1..972: note = Description of Artificial Sequence: Synthetic coding sequence
  source 1..972: mol_type = other DNA
atgtctgtgcctgaggaggaggagcggctgctgcccctgacccagcgctggccccgggccagcaagttcctgctgagcggctgtgccgccaccgtggccgagctggccaccttccccctggacctgaccaagacccggctgcagatgcagggcgaggccgccctggcccggctgggagatggagcccgggagagcgccccctaccggggcatggtgaggacagccctgggcatcatcgaggaggagggcttcctgaagctgtggcagggcgtgaccccagccatctaccgccacgtggtgtacagcggcggccgcatggtgacctatgagcacctgcgggaggtggtgtttgggaagtcagaagatgagcactaccccctgtggaagagcgtcatcggcggcatgatggccggggtcatcggccagttcctggccaaccccacagacctggtgaaggtgcagatgcagatggagggcaagaggaagctggagggcaagcccctgcgcttccggggcgtgcaccacgcctttgccaagatcctggccgagggcggcatccggggcctgtgggccggctgggtgcccaacatccagagagctgccctggtgaacatgggagacctgaccacctatgacacagtgaagcactacctggtgctgaacacccccctggaggacaacatcatgacccacggcctgagcagcctgtgcagcggcctggtggccagcatcctgggcaccccagcagatgtgatcaagagccgcatcatgaaccagccccgggacaagcagggccggggcctgctgtacaagagcagcacagactgcctgatccaggccgtgcagggcgagggcttcatgagcctgtacaagggcttcctgcccagctggctgaggatgaccccctggagcatggtgttctggctgacctatgagaagatccgggagatgtctggagtgagccccttctag

SEQ ID NO: 170494 - DNA, 738 bp, synthetic construct
  misc_feature 1..738: note = Description of Artificial Sequence: Synthetic coding sequence
  source 1..738: mol_type = other DNA
atgtctgtgcctgaggaggaggagcggctgctgcccctgacccagcgctggccccgggccagcaagttcctgctgagcggctgtgccgccaccgtggccgagctggccaccttccccctggacctgaccaagacccggctgcagatgcagggcgaggccgccctggcccggctgggagatggagcccgggagagcgccccctaccggggcatggtgaggacagccctgggcatcatcgaggaggagggcttcctgaagctgtggcagggcgtgaccccagccatctaccgccacgtggtgtacagcggcggccgcatggtgacctatgagcacctgcgggaggtggtgtttgggaagtcagaagatgagcactaccccctgtggaagagcgtcatcggcggcatgatggccggggtcatcggccagttcctggccaaccccacagacctggtgaaggtgcagatgcagatggagggcaagaggaagctggagggcaagcccctgcgcttccggggcgtgcaccacgcctttgccaagatcctggccgagggcggcatccggggcctgtgggccggctgggtgcccaacatccagagagctgccctggtgaacatgggagacctgaccacctatgacacagtgaagcactacctggtgctgaacacccccctggaggacaacatcatgacccacggcctgagcagtgacctggtgggcagccacaaggccatccagtag

SEQ ID NO: 170495 - DNA, 297 bp, synthetic construct
  misc_feature 1..297: note = Description of Artificial Sequence: Synthetic coding sequence
  source 1..297: mol_type = other DNA
tgaaacatgggagacctgaccacctatgacacagtgaagcactacctggtgctgaacacccccctggaggacaacatcatgacccacggcctgagcagcctgtgcagcggcctggtggccagcatcctgggcaccccagcagatgtgatcaagagccgcatcatgaaccagccccgggacaagcagggccggggcctgctgtacaagagcagcacagactgcctgatccaggccgtgcagggcgagggcttcatgagcctgtacaagggcttcctgcccagctggctgaggatgtag

SEQ ID NO: 170496 - DNA, 450 bp, synthetic construct
  misc_feature 1..450: note = Description of Artificial Sequence: Synthetic coding sequence
  source 1..450: mol_type = other DNA
atgtctgaatgtcccctcatcctgtacatccacaagcacatcgacacctacagccagagctacctgttcaatgacctcttctaccctgtgtacagcggcggccgcatggtgacctatgagcacctgcgggaggtggtgtttgggaagtcagaagatgagcactaccccctgtggaagagcgtcatcggcggcatgatggccggggtcatcggccagttcctggccaaccccacagacctggtgaaggtgcagatgcagatggagggcaagaggaagctggagggcaagcccctgcgcttccggggcgtgcaccacgcctttgccaagatcctggccgagggcggcatccggggcctgtgggccggctgggtgcccaacatccagagagctgccctggtgaacatgggagacctgaccacctatgacacagtgaagcactacctggtgtag

SEQ ID NO: 170497 - DNA, 480 bp, synthetic construct
  misc_feature 1..480: note = Description of Artificial Sequence: Synthetic coding sequence
  source 1..480: mol_type = other DNA
tgaatggagggcaagaggaagctggagggcaagcccctgcgcttccggggcgtgcaccacgcctttgccaagatcctggccgagggcggcatccggggcctgtgggccggctgggtgcccaacatccagagagctgccctggtgaacatgggagacctgaccacctatgacacagtgaagcactacctggtgctgaacacccccctggaggacaacatcatgacccacggcctgagcagcctgtgcagcggcctggtggccagcatcctgggcaccccagcagatgtgatcaagagccgcatcatgaaccagccccgggacaagcagggccggggcctgctgtacaagagcagcacagactgcctgatccaggccgtgcagggcgagggcttcatgagcctgtacaagggcttcctgcccagctggctgaggatggctgctgtgattgtgaacagcagccgcagccagctgaaggtgtag

SEQ ID NO: 170498 - DNA, 714 bp, synthetic construct
  misc_feature 1..714: note = Description of Artificial Sequence: Synthetic coding sequence
  source 1..714: mol_type = other DNA
atgtacctgtacctgatgaagatgcctgctgcctaccaggtgtacagcggcggccgcatggtgacctatgagcacctgcgggaggtggtgtttgggaagtcagaagatgagcactaccccctgtggaagagcgtcatcggcggcatgatggccggggtcatcggccagttcctggccaaccccacagacctggtgaaggtgcagatgcagatggagggcaagaggaagctggagggcaagcccctgcgcttccggggcgtgcaccacgcctttgccaagatcctggccgagggcggcatccggggcctgtgggccggctgggtgcccaacatccagagagctgccctggtgaacatgggagacctgaccacctatgacacagtgaagcactacctggtgctgaacacccccctggaggacaacatcatgacccacggcctgagcagcctgtgcagcggcctggtggccagcatcctgggcaccccagcagatgtgatcaagagccgcatcatgaaccagccccgggacaagcagggccggggcctgctgtacaagagcagcacagactgcctgatccaggccgtgcagggcgagggcttcatgagcctgtacaagggcttcctgcccagctggctgaggatgaccccctggagcatggtgttctggctgacctatgagaagatccgggagatgtctggagtgagccccttctag

SEQ ID NO: 170499 - DNA, 1095 bp, synthetic construct
  misc_feature 1..1095: note = Description of Artificial Sequence: Synthetic coding sequence
  source 1..1095: mol_type = other DNA
atggagctggagggccgcggggccggcggcgtggccggcggccctgctgctggccctggccgcagccctggagagagcgccctgctggatggctggctgcagaggggcgtgggcagaggagctgggggcggggaggccggggcctgcaggcctcctgtgcggcaggaccctgattctggccctgactatgaggccctgcctgctggggccaccgtgaccacccacatggtggccggggctgtggccggcatcctggagcactgtgtgatgtaccccatcgactgtgtgaagaccaggatgcagagcctgcagcctgaccctgctgcccgctacagaaatgtgctggaggccctgtggaggatcatcagaacagagggcctgtggaggcccatgaggggcctgaatgtgacagccactggagctggccctgcccacgccctgtactttgcctgctatgagaagctgaagaagaccctgagtgatgtgatccaccctgggggcaacagccacatcgccaatggagctgctggctgtgtggccaccctgctgcatgatgctgccatgaacccagctgaggtggtgaagcagaggatgcagatgtacaacagcccctaccaccgggtgacagactgtgtgcgggctgtgtggcagaatgaaggagctggggccttctaccgcagctacaccacccagctgaccatgaatgtgcccttccaggccatccacttcatgacctatgagttcctgcaggagcacttcaacccccagaggcgctacaaccccagcagccacgtgctgagcggggcctgtgccggggctgtggccgctgctgccaccacccccctggatgtgtgcaagaccctgctgaacacccaggagagcctggccctgaacagccacatcaccggccacatcaccggcatggccagcgccttcagaacagtgtaccaggtgggcggcgtgacagcctacttccggggcgtgcaggcccgggtcatctaccagatccccagcacagccatcgcctggagcgtgtatgagttcttcaagtacctgatcaccaagaggcaggaggagtggagggctgggaagtag

SEQ ID NO: 170500 - DNA, 678 bp, synthetic construct
  misc_feature 1..678: note = Description of Artificial Sequence: Synthetic coding sequence
  source 1..678: mol_type = other DNA
cggggagctgctggctggagccactgccaccacgcccatggaggaagaagaagaggccgggaccccggggccctgagagatgtgccccaccggctgcggcagggcgctgctggctgtgtggccaccctgctgcatgatgctgccatgaacccagctgaggtggtgaagcagaggatgcagatgtacaacagcccctaccaccgggtgacagactgtgtgcgggctgtgtggcagaatgaaggagctggggccttctaccgcagctacaccacccagctgaccatgaatgtgcccttccaggccatccacttcatgacctatgagttcctgcaggagcacttcaacccccagaggcgctacaaccccagcagccacgtgctgagcggggcctgtgccggggctgtggccgccgccgccaccacccccctggatgtgtgcaagaccctgctgaacacccaggagagcctggccctgaacagccacatcaccggccacatcaccggcatggccagcgccttcagaacagtgtaccaggtgggcggcgtgacagcctacttccggggcgtgcaggcccgggtcatctaccagatccccagcacagccatcgcctggagcgtgtatgagttcttcaagtacctgatcaccaagaggcaggaggagtggagggctgggaagtag

SEQ ID NO: 170501 - DNA, 876 bp, synthetic construct
  misc_feature 1..876: note = Description of Artificial Sequence: Synthetic coding sequence
  source 1..876: mol_type = other DNA
atgtctgccctgaactggaagccctttgtgtatggaggcctggccagcatcacagcagaatgtggcaccttccccatcgacctgaccaagacccggctgcagatccagggccagaccaatgatgccaagttcaaggagatccgctaccggggcatgctgcacgccctggtgagaattggccgggaggagggcctgaaggccctgtacagcggcatcgccccagccatgctgcggcaggccagctatggcaccatcaagattggcacctaccagagcctgaagaggctcttcatcgagaggccagaagatgagaccctgcccatcaacgtcatctgtggcatcctgagcggggtcatcagcagcaccatcgccaaccccacagatgtgctgaagatccgcatgcaggcccagagcaacaccatccagggcggcatgattggcaacttcatgaacatctaccagcaggagggcacccggggcctgtggaagggcgtgtccctgacagcccagagagctgccatcgtggtgggcgtggagctgcctgtgtatgacatcaccaagaagcacctgatcctgagcggcctgatgggagacacagtgtacacccacttcctgagcagcttcacctgtggcctggccggggccctggccagcaaccctgtggatgtggtgaggaccaggatgatgaaccagagggtgctgagagatggccgctgcagcggctacacaggcaccctggactgcctgctgcagacctggaagaatgaaggcttctttgccctgtacaagggcttctggcccaactggctgcggctgggcccctggaacatcatcttctttgtgacctatgagcagctgaagaagctggacctgtag

SEQ ID NO: 170502 - DNA, 651 bp, synthetic construct
  misc_feature 1..651: note = Description of Artificial Sequence: Synthetic coding sequence
  source 1..651: mol_type = other DNA
atgctgcggcaggccagctatggcaccatcaagattggcacctaccagagcctgaagaggctcttcatcgagaggccagaagatgagaccctgcccatcaacgtcatctgtggcatcctgtctggagtcatcagcagcaccatcgccaaccccacagatgtgctgaagatccgcatgcaggcccagagcaacaccatccagggcggcatgattggcaacttcatgaacatctaccagcaggagggcacccggggcctgtggaagggcgtgtccctgacagcccagagagctgccatcgtggtgggcgtggagctgcctgtgtatgacatcaccaagaagcacctgatcctgagcggcctgatgggagacacagtgtacacccacttcctgagcagcttcacctgtggcctggccggggccctggccagcaaccctgtggatgtggtgaggaccaggatgatgaaccagagggtgctgagagatggccgctgcagcggctacacaggcaccctggactgcctgctgcagacctggaagaatgaaggcttctttgccctgtacaagggcttctggcccaactggctgcggctgggcccctggaacatcatcttctttgtgacctatgagcagctgaagaagctggacctgtag

SEQ ID NO: 170503 - DNA, 723 bp, synthetic construct
  misc_feature 1..723: note = Description of Artificial Sequence: Synthetic coding sequence
  source 1..723: mol_type = other DNA
atgctgcacgccctggtgcgcatcggccgggaggagggcctgaaggccctgtacagcggcatcgccccagccatgctgcggcaggccagctatggcaccatcaagattggcacctaccagagcctgaagaggctcttcatcgagaggccagaagatgagaccctgcccatcaacgtcatctgtggcatcctgtctggagtcatcagcagcaccatcgccaaccccacagatgtgctgaagatccgcatgcaggcccagagcaacaccatccagggcggcatgattggcaacttcatgaacatctaccagcaggagggcacccggggcctgtggaagggcgtgtccctgacagcccagagagctgccatcgtggtgggcgtggagctgcctgtgtatgacatcaccaagaagcacctgatcctgagcggcctgatgggagacacagtgtacacccacttcctgagcagcttcacctgtggcctggccggggccctggccagcaaccctgtggatgtggtgaggaccaggatgatgaaccagagggtgctgagagatggccgctgcagcggctacacaggcaccctggactgcctgctgcagacctggaagaatgaaggcttctttgccctgtacaagggcttctggcccaactggctgcggctgggcccctggaacatcatcttctttgtgacctatgagcagctgaagaagctggacctgtag

SEQ ID NO: 170504 - DNA, 948 bp, synthetic construct
  misc_feature 1..948: note = Description of Artificial Sequence: Synthetic coding sequence
  source 1..948: mol_type = other DNA
atgacaggccagggccagagcgccagcggcagcagcgcctggagcaccgtcttccgccacgtgcgctatgagaacctgattgctggggtgtctggaggagtgctgagcaacctggccctgcaccccctggacctggtgaagatccgctttgctgtgtctgatggcctggagctgcggcccaagtacaacggcatcctgcactgcctgaccaccatctggaagctggatggcctgcggggcctgtaccagggcgtgacccccaacatctggggcgccggcctgtcctggggcctgtacttcttcttctacaatgccatcaagagctacaagacagagggccgggcagagcggctggaggccacagagtacctggtgtctgctgctgaggccggggccatgaccctgtgcatcaccaaccccctgtgggtgaccaagacccggctgatgctgcagtatgatgctgtggtgaacagcccccaccggcagtacaagggcatgtttgacaccctggtgaagatctacaagtatgagggcgtgcggggcctgtacaagggctttgtgcccggcctgtttggcaccagccatggagccctgcagttcatggcctatgagctgctgaagctgaagtacaaccagcacatcaaccggctgcctgaggcccagctgagcacagtggagtacatctctgtggccgccctgagcaagatctttgctgtggccgccacctacccctaccaggtggtgcgggcccggctgcaggaccagcacatgttctacagcggcgtgattgatgtgatcaccaagacctggaggaaggagggcgtgggcggcttctacaagggcatcgcccccaacctgatccgggtgaccccagcctgctgcatcacctttgtggtgtatgaaaatgtgagccacttcctgctggacctgcgggagaagaggaagtag

SEQ ID NO: 170505 - DNA, 900 bp, synthetic construct
  misc_feature 1..900: note = Description of Artificial Sequence: Synthetic coding sequence
  source 1..900: mol_type = other DNA
atgacaggccagggccagagcgccagcggcagcagcgcctggagcggaggagtgctgagcaacctggccctgcaccccctggacctggtgaagatccgctttgctgtgtctgatggcctggagctgcggcccaagtacaacggcatcctgcactgcctgaccaccatctggaagctggatggcctgcggggcctgtaccagggcgtgacccccaacatctggggcgccggcctgtcctggggcctgtacttcttcttctacaatgccatcaagagctacaagacagagggccgggcagagcggctggaggccacagagtacctggtgtctgctgctgaggccggggccatgaccctgtgcatcaccaaccccctgtgggtgaccaagacccggctgatgctgcagtatgatgctgtggtgaacagcccccaccggcagtacaagggcatgtttgacaccctggtgaagatctacaagtatgagggcgtgcggggcctgtacaagggctttgtgcccggcctgtttggcaccagccatggagccctgcagttcatggcctatgagctgctgaagctgaagtacaaccagcacatcaaccggctgcctgaggcccagctgagcacagtggagtacatctctgtggccgccctgagcaagatctttgctgtggccgccacctacccctaccaggtggtgcgggcccggctgcaggaccagcacatgttctacagcggcgtgattgatgtgatcaccaagacctggaggaaggagggcgtgggcggcttctacaagggcatcgcccccaacctgatccgggtgaccccagcctgctgcatcacctttgtggtgtatgaaaatgtgagccacttcctgctggacctgcgggagaagaggaagtag

SEQ ID NO: 170506 - DNA, 552 bp, synthetic construct
  misc_feature 1..552: note = Description of Artificial Sequence: Synthetic coding sequence
  source 1..552: mol_type = other DNA
atgaccctgtgcatcaccaaccccctgtgggtgaccaagacccggctgatgctgcagtatgatgctgtggtgaacagcccccaccggcagtacaagggcatgtttgacaccctggtgaagatctacaagtatgagggcgtgcggggcctgtacaagggctttgtgcccggcctgtttggcaccagccatggagccctgcagttcatggcctatgagctgctgaagctgaagtacaaccagcacatcaaccggctgcctgaggcccagctgagcacagtggagtacatctctgtggccgccctgagcaagatctttgctgtggccgccacctacccctaccaggtggtgcgggcccggctgcaggaccagcacatgttctacagcggcgtgattgatgtgatcaccaagacctggaggaaggagggcgtgggcggcttctacaagggcatcgcccccaacctgatccgggtgaccccagcctgctgcatcacctttgtggtgtatgaaaatgtgagccacttcctgctggacctgcgggagaagaggaagtag

SEQ ID NO: 170507 - DNA, 966 bp, synthetic construct
  misc_feature 1..966: note = Description of Artificial Sequence: Synthetic coding sequence
  source 1..966: mol_type = other DNA
atggccactggaggccagcagaaggagaacaccctgctgcacctgtttgctgggggctgcggcggcaccgtgggcgccatcttcacctgccccctggaggtgatcaagacccggctgcagagcagccggctggccctgaggacagtgtactacccccaggtgcacctgggcaccatcagcggggccggcatggtgcggcccacctctgtgaccccaggcctcttccaggtgctgaagagcatcctggagaaggagggccccaagagcctcttccggggcctgggccccaacctggtgggcgtggcccccagcagagctgtgtactttgcctgctacagcaaggccaaggagcagttcaacggcatctttgtgcccaacagcaacatcgtgcacatcttctctgctggcagcgctgccttcatcaccaacagcctgatgaaccccatctggatggtgaagaccaggatgcagctggagcagaaggtgcggggcagcaagcagatgaacaccctgcagtgtgcccgctacgtgtaccagacagagggcatccggggcttctaccggggcctgacagccagctatgccggcatcagcgagaccatcatctgctttgccatctatgagagcctgaagaagtacctgaaggaggcccccctggccagcagcgccaacggcacagagaagaacagcaccagcttcttcggcctgatggctgctgctgccctgagcaagggctgtgccagctgcatcgcctacccccatgaggtgatccgcacccggctgcgggaggagggcaccaagtacaagagctttgtgcagacagcccggctggtgttccgggaggagggctacctggccttctaccggggcctgtttgcccagctgatccggcagatccccaacacagccatcgtgctgagcacctatgagctgattgtgtacctgctggaggacaggacccagtag

SEQ ID NO: 170508 - DNA, 915 bp, synthetic construct
  misc_feature 1..915: note = Description of Artificial Sequence: Synthetic coding sequence
  source 1..915: mol_type = other DNA
atggagaccgtgcccccagctgtggacctggtgctgggcgccagcgcctgctgcctggcctgtgtgttcaccaaccccctggaggtggtgaagacccggctgcagctgcagggcgagctgcaggcccggggcacctacccccggccctaccacggcttcatcgcctctgtggccgctgtggcccgggcagatggcctgtggggcctgcagaagggcctggccgccggcctgctgtaccagggcctgatgaatggagtgcgcttctactgctacagcctggcctgccaggccggcctgacccagcagcccggcggcaccgtggtggccggggctgtggccggggccctgggcgcctttgtgggcagccctgcctacctgatcaagacccagctgcaggcccagacagtggccgctgtggccgtgggccaccagcacaaccaccagacagtgctgggcgccctggagaccatctggaggcagcagggcctgctgggcctgtggcagggcgtgggcggcgctgtgccccgggtgatggtgggcagcgctgcccagctggccacctttgccagcgccaaggcctgggtgcagaagcagcagtggctgcctgaagattcctggctggtggccctggccggcggcatgatcagcagcattgctgtggtggtggtgatgaccccatttgatgtggtgtccacccggctgtacaaccagcctgtggacacagctggccggggccagctgtatggaggcctgacagactgcatggtgaagatctggaggcaggagggccccctggccctgtacaagggcctgggccctgcctacctgcggctgggcccccacaccatcctgtccatgctgttctgggatgagctgaggaagctggccggccgggcccagcacaagggcacctag

SEQ ID NO: 170509 - DNA, 888 bp, synthetic construct
  misc_feature 1..888: note = Description of Artificial Sequence: Synthetic coding sequence
  source 1..888: mol_type = other DNA
atggacttcctgatgagcggcctggccgcctgtggggcctgtgtgttcaccaaccccctggaggtggtgaagaccaggatgcagctgcagggcgagctgcaggcccctggcacctaccagaggcactacagaaatgtgttccacgccttcatcaccatcggcaaggtggatggcctggccgccctgcagaagggcctggccccagccctgctgtaccagttcctgatgaatggcatccggctgggcacctacggcctggccgaggccggcggctacctgcacacagctgagggcacccacagccctgcccggtctgctgctgctggggccatggccggcgtgatgggcgcctacctgggcagccccatctacatggtgaagacccacctgcaggcccaggccgccagcgagattgctgtgggccaccagtacaagcaccagggcatgttccaggccctgacagagatcggccagaagcacggcctggtgggcctgtggaggggggccctgggcggcctgccccgggtgattgtgggcagcagcacccagctgtgcaccttcagcagcaccaaggacctgctgagccagtgggagatcttccccccccagagctggaagctggccctggtggccgccatgatgtctggaattgctgtggtgctggccatggccccctttgatgtggcctgcacccggctgtacaaccagcccacagatgcccagggcaagaacagagtgcccaagttcagcgccaccagctgcagcgccagcgcccccctgctgggcaccaaggatgtgcgcatcgtgaagggccagacaggccaccagctgttcaaggtgacccaggcccctggctgcagccccatcctgctgggcacccagagctag

SEQ ID NO: 170510 - DNA, 876 bp, synthetic construct
  misc_feature 1..876: note = Description of Artificial Sequence: Synthetic coding sequence
  source 1..876: mol_type = other DNA
atggacttcctgatgagcggcctggccgcctgtggggcctgtgtgttcaccaaccccctggaggtggtgaagaccaggatgcagctgcagggcgagctgcaggcccctggcacctaccagaggcactacagaaatgtgttccacgccttcatcaccatcggcaaggtggatggcctggccgccctgcagaagggcctggccccagccctgctgtaccagttcctgatgaatggcatccggctgggcacctacggcctggccgaggccggcggctacctgcacacagctgagggcacccacagccctgcccggtctgctgctgctggggccatggccggcgtgatgggcgcctacctgggcagccccatctacatggtgaagacccacctgcaggcccaggccgccagcgagattgctgtgggccaccagtacaagcaccagggcatgttccaggccctgacagagatcggccagaagcacggcctggtgggcctgtggaggggggccctgggcggcctgccccgggtgattgtgggcagcagcacccagctgtgcaccttcagcagcaccaaggacctgctgagccagtgggagatcttccccccccagagctggaagctggccctggtggccgccatgatgtctggaattgctgtggtgctggccatggccccctttgatgtggcctgcacccggctgtacaaccagcccacagatgcccagggcaagggcctgatgtaccggggcatcctggatgccctgctgcagacagccaggacagagggcatcttcggcatgtacaaggagcccagcccccaggtgctgagcaacatcatgcagtgcttcagcgccttcaccggggaccagcgctgctag

SEQ ID NO: 170511 - DNA, 915 bp, synthetic construct
  misc_feature 1..915: note = Description of Artificial Sequence: Synthetic coding sequence
  source 1..915: mol_type = other DNA
atgatccagaacagccggcccagcctgctgcagccccaggatgtgggggacacagtggagaccctgatgctgcaccctgtgatcaaggccttcctgtgtggcagcatcagcggcacctgcagcaccctgctcttccagcccctggacctgctgaagacccggctgcagaccctgcagcccagcgaccacggcagccggcgggtgggcatgctggccgtgctgctgaaggtggtgaggacagagagcctgctgggcctgtggaagggcatgagccccagcatcgtgcgctgtgtgcctggggtgggcatctacttcggcaccctgtacagcctgaagcagtacttcctgcggggccaccccccaacagccctggagagcgtgatgctgggcgtgggcagccgctctgtggccggcgtgtgcatgagccccatcaccgtcatcaagaccaggtatgaaagtggcaagtatggctatgagagcatctatgctgccctgcggagcatctaccacagcgagggccaccggggcctcttcagcggcctgacagccaccctgctgagagatgcccccttcagcggcatctacctgatgttctacaaccagaccaagaacatcgtgccccatgaccaggtggatgccaccctcatccccatcaccaacttcagctgtggcatctttgctggcatcctggccagcctggtgacccagcctgcagatgtgatcaagacccacatgcagctgtaccccctgaagttccagtggattggccaggccgtgaccctcatcttcaaggactatggcctgcggggcttcttccagggcggcatcccccgggccctgcggaggaccctgatggccgccatggcctggacagtgtatgaggagatgatggccaagatgggcctgaagagctag

SEQ ID NO: 170512 - DNA, 1671 bp, synthetic construct
  misc_feature 1..1671: note = Description of Artificial Sequence: Synthetic coding sequence
  source 1..1671: mol_type = other DNA
atgcctcctgagaggagaagaaggatgaagctggacagaagaactggagccaagcccaagaggaagccaggcatgaggccagactggaaggccggggccggccctgggggccccccccagaagccagcccccagcagccagaggaagcccccagcccggcccagcgctgctgctgctgccatcgctgtggccgctgctgaggaggagcggcggctgcggcagaggaaccggctgcggctggaggaggacaagccagctgtggagcgctgcctggaggagctggtgtttggagatgtggagaatgatgaagatgccctgctgcggcggctgcggggcccccgggtgcaggagcatgaagattctggggacagcgaggtggagaatgaggccaagggcaacttccccccccagaagaagcctgtgtgggtggatgaggaggatgaagatgaggagatggtggacatgatgaacaaccgcttcaggaaggacatgatgaagaatgccagcgagagcaagctgagcaaggacaacctgaagaagaggctgaaggaggagttccagcacgccatgggcggcgtgcctgcctgggccgagaccaccaagaggaagaccagcagtgatgatgagagcgaggaggatgaagatgacctgctgcagaggactggaaacttcatcagcaccagcaccagcctgccccggggcatcctgaagatgaagaactgccagcacgccaatgctgagcggcccaccgtggcccgcatcagctctgtgcagttccaccctggggcccagatcgtgatggtggccggcctggacaatgctgtgtccctcttccaggtggatggcaagaccaaccccaagatccagagcatctacctggagcgcttccccatcttcaaggcctgcttcagcgccaacggggaggaggtgctggccaccagcacccacagcaaggtgctgtatgtgtatgacatgctggccggcaagctgatccctgtgcaccaggtgcggggcctgaaggagaagatcgtgcgcagctttgaggtgtccccagatggcagcttcctgctgatcaatggaattgctggctacctgcacctgctggccatgaagaccaaggagctgattggctccatgaagatcaatggccgggtggccgccagcaccttcagcagtgacagcaagaaggtgtatgccagcagtggagatggagaggtgtatgtgtgggatgtgaacagcaggaagtgcctgaacagatttgtggatgagggcagcctgtatggcctgagcatcgccaccagcagaaatggccagtatgtggcctgtggcagcaactgtggggtggtgaacatctacaaccaggacagctgcctgcaggagaccaaccccaagcccatcaaggccatcatgaacctggtgactggagtgaccagcctgaccttcaaccccaccacagagatcctggccatcgccagcgagaagatgaaggaggccgtgcggctggtgcacctgcccagctgcaccgtcttcagcaacttccctgtgatcaagaacaagaacatcagccacgtgcacaccatggacttcagccccaggagcggctactttgccctgggcaatgagaagggcaaggccctgatgtaccgcctgcaccactacagcgacttctag

SEQ ID NO: 170513 - DNA, 1080 bp, synthetic construct
  misc_feature 1..1080: note = Description of Artificial Sequence: Synthetic coding sequence
  source 1..1080: mol_type = other DNA
atggctgaccaggaccctgctggcatcagccccctgcagcagatggtggccagcggcaccggggctgtggtgaccagcctcttcatgacccccctggatgtggtgaaggtgcggctgcagagccagaggcccagcatggccagcgagctgatgcccagcagccggctgtggagcctgagctacaccaagctgcccagcagcctgcagagcacaggcaagtgcctgctgtactgcaatggagtgctggagcccctgtacctgtgccccaacggggcccgctgtgccacctggttccaggaccccacccgcttcaccggcaccatggatgcctttgtgaagatcgtgagacatgagggcaccaggaccctgtggagcggcctgcctgccaccctggtgatgacagtgcctgccacagccatctacttcaccgcctatgaccagctgaaggccttcctgtgtggccgggccctgaccagtgacctgtatgcccccatggtggccggggccctggcccggctgggcaccgtgaccgtcatcagccccctggagctgatgaggaccaagctgcaggcccagcacgtgtcctaccgggagctgggcgcctgtgtgaggacagctgtggcccagggcggctggaggagcctgtggctgggctggggccccacagccctgagagatgtgcccttcagcgccctgtactggttcaactatgagctggtgaagtcctggctgaatggcttccggcccaaggaccagacctctgtgggcatgagctttgtggccggcggcatctctggaacagtggccgctgtgctgaccctgccctttgatgtggtgaagacccagaggcaggtggccctgggcgccatggaggccgtgcgggtgaaccccctgcacgtggacagcacctggctgctgctgcggcgcatccgggcagagagcggcaccaagggcctgtttgctggcttcctgccccgcatcatcaaggccgcccccagctgtgccatcatgatcagcacctatgaatttgggaagagcttcttccagaggctgaaccaggaccggctgctgggcggctag

SEQ ID NO: 170514 - DNA, 1011 bp, synthetic construct
  misc_feature 1..1011: note = Description of Artificial Sequence: Synthetic coding sequence
  source 1..1011: mol_type = other DNA
atggctgaccaggaccctgctggcatcagccccctgcagcagatggtggccagcggcaccggggctgtggtgaccagcctcttcatgacccccctggatgtggtgaaggtgcggctgcagagccagaggcccagcatggccagcggcaagtgcctgctgtactgcaatggagtgctggagcccctgtacctgtgccccaatggagcccgctgtgccacctggttccaggaccccacccgcttcaccggcaccatggatgcctttgtgaagatcgtgagacatgagggcaccaggaccctgtggagcggcctgcctgccaccctggtgatgacagtgcctgccacagccatctacttcaccgcctatgaccagctgaaggccttcctgtgtggccgggccctgaccagtgacctgtatgcccccatggtggccggggccctggcccggctgggcaccgtgaccgtcatcagccccctggagctgatgaggaccaagctgcaggcccagcacgtgtcctaccgggagctgggcgcctgtgtgaggacagctgtggcccagggcggctggaggagcctgtggctgggctggggccccacagccctgagagatgtgcccttcagcgccctgtactggttcaactatgagctggtgaagtcctggctgaatggcttccggcccaaggaccagacctctgtgggcatgagctttgtggccggcggcatcagcggcaccgtggccgctgtgctgaccctgccctttgatgtggtgaagacccagaggcaggtggccctgggcgccatggaggccgtgcgggtgaaccccctgcacgtggacagcacctggctgctgctgcggcgcatccgggcagagagcggcaccaagggcctgtttgctggcttcctgccccgcatcatcaaggccgcccccagctgtgccatcatgatcagcacctatgaatttgggaagagcttcttccagaggctgaaccaggaccggctgctgggcggctag

SEQ ID NO: 170515 - DNA, 1017 bp, synthetic construct
  misc_feature 1..1017: note = Description of Artificial Sequence: Synthetic coding sequence
  source 1..1017: mol_type = other DNA
atggaccctgagacccggggccaggagatcatcaaggtgacccccctgcagcagatgctggccagctgcaccggggccatcctgaccagcgtcatcgtgacccccctggatgtggtgaagatccggctgcaggcccagaacaaccccctgcccaagggcaagtgctttgtgtacagcaatggcctgatggaccacctgtgtgtgtgtgaggagggcggcaacaagctgtggtacaagaagccaggcaacttccagggcaccctggatgccttcttcaagatcatcagaaatgaaggcatcaagagcctgtggagcggcctgccccccaccctggtgatggctgtgcctgccaccgtcatctacttcacctgctatgaccagctgagcgccctgctgcggagcaagctgggggagaatgagacctgcatccccatcgtggccggcatcgtggccaggtttggagctgtgaccgtcatcagccccctggagctgatccgcaccaagatgcagagcaagaagttctcctatgtggagctgcacagatttgtgtccaagaaggtgtctgaagatggctggatcagcctgtggaggggctgggcccccaccgtgctgagagatgtgcccttcagcgccatgtactggtacaactatgagatcctgaagaagtggctgtgtgagaagagcggcctgtatgagcccaccttcatgatcaacttcaccagcggggccctgagcggcagctttgctgctgtggccaccctgccctttgatgtggtgaagacccagaagcagacccagctgtggacctatgagagccacaagatctccatgcccctgcacatgagcacctggatcatcatgaagaacatcgtggccaagaatggcttcagcggcctcttcagcggcctcatccccaggctcatcaagatcgccccagcctgtgccatcatgatcagcacctatgaatttgggaaggccttcttccagaagcagaatgtgcggcggcagcagtactag

SEQ ID NO: 170516 - DNA, 1113 bp, synthetic construct
  misc_feature 1..1113: note = Description of Artificial Sequence: Synthetic coding sequence
  source 1..1113: mol_type = other DNA
atgggcgcccagcctggagagccccagaacacctgcagccgcatccagaccctcttccggcgggtgaagaccctgctgatcaaggcccctcctccaccccagcccccacctcctcctccttcctggaaccctggctgcacccacgtgtatggctacgccttcggccacatgcatgacaacaacctggagcacctgcccagccagcaggtgctggacacaggagagcagctgatggtgcctgtggaggtgctggaggtggacaacaaggaggccctgtggaagttcctgctgagcggggccatggccggggctgtgtccaggactggaacagcccccctggaccgggccaaggtgtacatgcaggtgtacagcagcaagaccaacttcaccaacctgctgggcggcctgcagagcatggtgcaggagggcggcttccgcagcctgtggagaggaaatggcatcaacgtgctgaagatcgccccagaatatgccatcaagttctctgtgtttgagcagtgcaagaactacttctgtggcatccagggcagcccccccttccaggagcggctgctggccggcagcctggccgtggccatcagccagaccctcatcaaccccatggaggtgctgaagacccggctgaccctgcggaggacaggccagtacaagggcctgctggactgtgcccggcagatcctgcagcgggagggcacccgggccctgtaccggggctacctgcccaacatgctgggcatcatcccctatgcctgcacagacctggccgtgtatgagatgctgcagtgcttctgggtgaagagcggccgggacatgggagaccccagcggcctggtgtccctgagctctgtgaccctgagcaccacctgtggccagatggccagctaccccctgaccctggtgaggaccaggatgcaggcccaggacacagtggagggcagcaaccccaccatgagaggagtgctgcagaggatcctggcccagcagggctggctgggcctgtaccggggcatgacccccaccctgctgaaggtgctgcctgctgggggcatctcctatgtggtgtatgaggccatgaagaagaccctgggcatctag

SEQ ID NO: 170517 - DNA, 729 bp, synthetic construct
  misc_feature 1..729: note = Description of Artificial Sequence: Synthetic coding sequence
  source 1..729: mol_type = other DNA
atgggcgcccagcctggagagccccagaacacctgcagccgcatccagaccctcttccggcgggtgaagaccctgctgatcaaggcccctcctccaccccagcccccacctcctcctccttcctggaaccctggctgcacccacgtgtatggctacgccttcggccacatgcatgacaacaacctggagcacctgcccagccagcaggtgctggacacaggagagcagctgatggtgcctgtggaggtgctggaggtggacaacaaggaggccctgtggaagttcctgctgagcggggccatggccggggctgtgtccaggactggaacagcccccctggaccgggccaaggtgtacatgcagctgctgggccgcctgcggcaggagaaccggctgaacctgggcggcggcggctgcagcgagcccaggagcccagacaggaccccagcctgggccacagagagcaccccacccaggaggaccagccccacctgctggggcggctaccgggcctggagccggcgggccgccagcgccccctgtggcggggccacagccagcacctgcagccggctgctgctgtccatgcccagcagcagcccctacagcagcagcgcccgcatcacctctgtggagtacaagggcccccggcccagccgctctgtgtccctgctggccccctggctgtggcccagcccccggcccagcagcaccccctggcgctgctag

SEQ ID NO: 170518 - DNA, 957 bp, synthetic construct
  misc_feature 1..957: note = Description of Artificial Sequence: Synthetic coding sequence
  source 1..957: mol_type = other DNA
atgggaaatggagtgaaggagggccctgtgcggctgcatgaagatgctgaggccgtgctgagcagctctgtgagcagcaagagggaccaccggcaggtgctgagcagcctgctgagcggggccctggccggggccctggccaagacagctgtggcccccctggacaggaccaagatcatcttccaggtgagcagcaagcgcttcagcgccaaggaggccttccgggtgctgtactacacctacctgaatgaaggcttcctgagcctgtggaggggcaacagcgccaccatggtgcgggtggtgccctatgctgccatccagttcagcgcccacgaggagtacaagaggatcctgggcagctactacggcttccggggggaggccctgcccccctggccccggctgtttgctggggccctggccggcaccacagctgccagcctgacctaccccctggacctggtgcgggccaggatggctgtgacccccaaggagatgtacagcaacatcttccacgtgttcatccgcatcagccgggaggagggcctgaagaccctgtaccacggcttcatgcccaccgtgctgggcgtcatcccctatgccggcctgtccttcttcacctatgagaccctgaagagcctgcaccgggagtacagcggccggcggcagccctacccctttgagaggatgatctttggagcctgtgccggcctgattggccagagcgccagctaccccctggatgtggtgagaagaaggatgcagacagctggggtgacaggctacccccgggccagcatcgcccggaccctgcggaccatcgtgcgggaggagggcgctgtgcggggcctgtacaagggcctgtccatgaactgggtgaagggccccatcgctgtgggcatctccttcaccacctttgacctgatgcagatcctgctgcggcacctgcagagctag

SEQ ID NO: 170519 - DNA, 1011 bp, synthetic construct
  misc_feature 1..1011: note = Description of Artificial Sequence: Synthetic coding sequence
  source 1..1011: mol_type = other DNA
atgtctgtgctcttcttctacatcatgagatacaagcagagcgaccctgaaaatccagacaatgacagatttgtgctggccaagatcgccaccaggaaggcctgtggcctggccctggccaagctgggctacgccaacaacagagtggtggtgctggatggagacacccgctacagcaccttcagcgagatcttcaacaaggagtacccagagcgcttcatcgagtgcttcatggccgagcagaacatggtgtctgtggccctgggctgtgccagccggggccgcaccatcgcctttgccagcacctttgctgccttcctgacccgggcctttgaccacatccgcatcggcggcctggccgagagcaacatcaacatcatcggcagccactgcggcgtgtctgtgggagatgatggagccagccagatggccctggaggacatcgccatgttccgcaccatccccaagtgcaccatcttctaccccacagatgctgtgtccacagagcacgctgtggccctggccgccaatgccaagggcatgtgcttcatccgcaccaccaggcctgagaccatggtgatctacaccccccaggagagatttgaaattggccaggccaaggtgctgcggcactgtgtgtctgacaaggtgaccgtcatcggggccggcatcaccgtgtatgaggccctggccgctgctgatgagctgagcaagcaggacatcttcatccgggtcatcgacctcttcaccatcaagcccctggatgtggccaccatcgtgagcagcgccaaggccacagagggccgcatcatcaccgtggaggaccactacccccagggcggcatcggggaggccgtgtgtgccgctgtgtccatggaccctgacatccaggtgcacagcctggccgtgtctggagtgccccagagcggcaagtctgaggagctgctggacatgtatggcatcagcgcccggcacatcatcgtggccgtgaagtgcatgctgctgaactag

SEQ ID NO: 170520 - DNA, 870 bp, synthetic construct
  misc_feature 1..870: note = Description of Artificial Sequence: Synthetic coding sequence
  source 1..870: mol_type = other DNA
atggccacctggaggagagatggccgcctgactggaggccagaggctgctgtgtgccggcctggccggcaccctgagcctgagcctgacagcccccctggagctggccgcctacaggaagtttgtggtgctcttcacagatgacctgggccacatcagccagtggagcagcatcatggccggcagcctggccggcatggtgtccaccatcgtgacctaccccacagacctgatcaagaccaggctcatcatgcagaacatcctggagcccagctaccggggcctgctgcacgccttcagcaccatctaccagcaggagggcttcctggccctgtaccggggcgtgtccctgactgtggtgggcgccctgcccttctctgctggcagcctgctggtgtacatgaacctggagaagatctggaatggcccccgggaccagttcagcctgccccagaactttgccaacgtgtgcctggccgctgctgtgacccagaccctgtccttcccctttgagaccgtgaagaggaagatgcaggcccagagcccctacctgccccacagcggaggagtggatgtgcacttctctggagctgtggactgcttccggcagatcgtgaaggcccagggcgtgctgggcctgtggaatggcctgacagccaacctgctgaagatcgtgccctacttcggcatcatgttcagcacctttgagttctgcaagaggatctgcctgtaccagaatggctacatcctgagccccctgagctacaagctgaccccaggagtggaccagagcctgcagccccaggagctgcgggagctgaagaagttcttcaagaccaggaagcccaagcccaagaagcccaccctgtag

SEQ ID NO: 170521 - DNA, 681 bp, synthetic construct
  misc_feature 1..681: note = Description of Artificial Sequence: Synthetic coding sequence
  source 1..681: mol_type = other DNA
atggccacctggaggagagatggccgcctgactggaggccagaggctgctgtgtgccggcctggccggcaccctgagcctgagcctgacagcccccctggagctggccaccgtgctggcccaggtgggcgtggtgcggggccacgcccggggcccctgggccaccggccaccgggtgtggagggctgagggcctgcgggccctgtggaagggaaatgctgtggcctgcctgcggctcttcccctgcagcgctgtgcagctggccgcctacaggaagtttgtggtgctcttcacagatgacctgggccacatcagccagtggagcagcatcatggccggcagcctggccggcatggtgtccaccatcgtgacctaccccacagacctgatcaagaccaggctcatcatgcagaacatcctggagcccagctaccggggcctgctgcacgccttcagcaccatctaccagcaggagggcttcctggccctgtaccggggcgtgtccctgactgtggtgggcagcgagcccctgccccccacccagtggaggagccgctgccccttcctgcggagcagcggcctgctgcctgctgacagcgagggccctgggggccctggggccctggagtggattgacagccagttcacagaggacagcagcatcttctggaactacgtgtag

SEQ ID NO: 170522 - DNA, 945 bp, synthetic construct
  misc_feature 1..945: note = Description of Artificial Sequence: Synthetic coding sequence
  source 1..945: mol_type = other DNA
atggaggacaagaggaacatccagatcatcgagtgggagcacctggacaagaagaagttctacgtgtttggagtggccatgaccatgatgatccgggtgtctgtgtaccccttcaccctcatccgcacccggctgcaggtgcagaagggcaagagcctgtaccacggcacctttgatgccttcatcaagatcctgcgggcagatggcatcaccggcctgtaccggggcttcctggtgaacaccttcaccctcatcagcggccagtgctacgtgaccacctatgagctgaccaggaagtttgtggccgactacagccagagcaacacagtgaagagcctggtggccggcggcagcgccagcctggtggcccagagcatcaccgtgcccattgatgtggtgtcccagcacctgatgatgcagaggaagggggagaagatgggccgcttccaggtgcggggcaaccctgagggccagggcgtggtggccttcggccagaccaaggacatcatccggcagatcctgcaggctgatggcctgcggggcttctaccggggctacgtggccagcctgctgacctacatccccaacagcgctgtgtggtggcccttctaccacttctacgccgagcagctgagctacctgtgccccaaggagtgcccccacatcgtgttccaggccgtgtctggccccctggccgccgccacagccagcatcctgaccaaccccatggatgtgatccgcaccagggtgcaggtggagggcaagaacagcatcatcctgaccttccggcagctgatggccgaggagggcccctggggcctgatgaagggcctgagcgcccgcatcatcagcgccacccccagcaccatcgtcatcgtggtgggctatgagagcctgaagaagctgagcctgcggcctgagctggtggacagccgccactggtag

SEQ ID NO: 170523 - DNA, 489 bp, synthetic construct
  misc_feature 1..489: note = Description of Artificial Sequence: Synthetic coding sequence
  source 1..489: mol_type = other DNA
atggaggacaagaggaacatccagatcatcgagtgggagcacctggacaagaagaagttctacgtgtttggagtggccatgaccatgatgatccgggtgtctgtgtaccccttcaccctcatccgcacccggctgcaggtgcagaagggcaagagcctgtaccacggcacctttgatgccttcatcaagatcctgcgggcagatggcatcaccggcctgtaccggggcttcctggtgaacaccttcaccctcatcagcggccagtgctacgtgaccacctatgagctgaccaggaagtttgtggccgactacagccagagcaacacagtgaagagcctgatggccgaggagggcccctggggcctgatgaagggcctgagcgcccgcatcatcagcgccacccccagcaccatcgtcatcgtggtgggctatgagagcctgaagaagctgagcctgcggcctgagctggtggacagccgccactggtag

SEQ ID NO: 170524 - DNA, 876 bp, synthetic construct
  misc_feature 1..876: note = Description of Artificial Sequence: Synthetic coding sequence
  source 1..876: mol_type = other DNA
atggaggacaagaggaacatccagatcatcgagtgggagcacctggacaagaagaagttctacgtgtttggagtggccatgaccatgatgatccgggtgtctgtgtaccccttcaccctcatccgcacccggctgcaggtgcagaagggcaagagcctgtaccacggcacctttgatgccttcatcaagatcctgcgggcagatggcatcaccggcctgtaccggggcttcctggtgaacaccttcaccctcatcagcggccagtgctacgtgaccacctatgagctgaccaggaagtttgtggccgactacagccagagcaacacagtgaagagcctggtggccggcggcagcgccagcctggtggcccagagcatcaccgtgcggggcaaccctgagggccagggcgtggtggccttcggccagaccaaggacatcatccggcagatcctgcaggctgatggcctgcggggcttctaccggggctacgtggccagcctgctgacctacatccccaacagcgctgtgtggtggcccttctaccacttctatgcagagcagctgagctacctgtgccccaaggaatgtccccacatcgtgttccaggccgtgtctggccccctggccgccgccacagccagcatcctgaccaaccccatggatgtgatccgcaccagggtgcaggtggagggcaagaacagcatcatcctgaccttccggcagctgatggccgaggagggcccctggggcctgatgaagggcctgagcgcccgcatcatcagcgccacccccagcaccatcgtgattgtggtgggctatgagagcctgaagaagctgagcctgcggcctgagctggtggacagccgccactggtag

SEQ ID NO: 170525 - DNA, 741 bp, synthetic construct
  misc_feature 1..741: note = Description of Artificial Sequence: Synthetic coding sequence
  source 1..741: mol_type = other DNA
atggtgaagatctacagacatgagagcctgctgggcttcttcaagggcatgtccttccccatcgccagcattgctgtggtgaacagcgtgctgtttggagtgtacagcaacaccctgctggtgctgacagccaccagccaccaggagcggcgggcccagccccccagctacatgcacatcttcctggccggctgcaccggcggcttcctgcaggcctactgcctggccccctttgacctgatcaaggtgcggctgcagaaccagacagagccccgggcccagcccggcagccccccaccccgctaccagggccctgtgcactgtgccgccagcatcttccgggaggagggcccccggggcctcttccggggggcctgggccctgaccctgcgggacacccccaccgtgggcatctacttcatcacctatgagggcctgtgccggcagtacaccccagagggccagaaccccagcagcgccaccgtgctggtggccggcggctttgctggcatcgcctcctgggtggccgccacccccctggacatgatcaagagcaggatgcagatggatggcctgcggcggcgggtgtaccagggcatgctggactgcatggtgagcagcatccggcaggagggcctgggcgtcttcttccggggcgtgaccatcaacagcgcccgggccttccctgtgaatgctgtgaccttcctgtcctatgagtacctgctgcgctggtggggctag

SEQ ID NO: 170526 - DNA, 795 bp, synthetic construct
  misc_feature 1..795: note = Description of Artificial Sequence: Synthetic coding sequence
  source 1..795: mol_type = other DNA
atgcctgtggaggagtttgtggccggctggatcagcggggccctgggcctggtgctgggccacccctttgacacagtgaagctgctgggcttcttcaagggcatgtccttccccatcgccagcattgctgtggtgaacagcgtgctgtttggagtgtacagcaacaccctgctggtgctgacagccaccagccaccaggagcggcgggcccagccccccagctacatgcacatcttcctggccggctgcaccggcggcttcctgcaggcctactgcctggccccctttgacctgatcaaggtgcggctgcagaaccagacagagccccgggcccagcccggcagccccccaccccgctaccagggccctgtgcactgtgccgccagcatcttccgggaggagggcccccggggcctcttccggggggcctgggccctgaccctgcgggacacccccaccgtgggcatctacttcatcacctatgagggcctgtgccggcagtacaccccagagggccagaaccccagcagcgccaccgtgctggtggccggcggctttgctggcatcgcctcctgggtggccgccacccccctggacatgatcaagagcaggatgcagatggatggcctgcggcggcgggtgtaccagggcatgctggactgcatggtgagcagcatccggcaggagggcctgggcgtcttcttccggggcgtgaccatcaacagcgcccgggccttccctgtgaatgctgtgaccttcctgtcctatgagtacctgctgcgctggtggggctag

SEQ ID NO: 170527 - DNA, 555 bp, synthetic construct
  misc_feature 1..555: note = Description of Artificial Sequence: Synthetic coding sequence
  source 1..555: mol_type = other DNA
atggtgaagatctacagacatgaaagtgcctactgcctggccccctttgacctgatcaaggtgcggctgcagaaccagacagagccccgggcccagcccggcagccccccaccccgctaccagggccctgtgcactgtgccgccagcatcttccgggaggagggcccccggggcctcttccggggggcctgggccctgaccctgcgggacacccccaccgtgggcatctacttcatcacctatgagggcctgtgccggcagtacaccccagagggccagaaccccagcagcgccaccgtgctggtggccggcggctttgctggcatcgcctcctgggtggccgccacccccctggacatgatcaagagcaggatgcagatggatggcctgcggcggcgggtgtaccagggcatgctggactgcatggtgagcagcatccggcaggagggcctgggcgtcttcttccggggcgtgaccatcaacagcgcccgggccttccctgtgaatgctgtgaccttcctgtcctatgagtacctgctgcgctggtggggctag

SEQ ID NO: 170528 - DNA, 867 bp, synthetic construct
  misc_feature 1..867: note = Description of Artificial Sequence: Synthetic coding sequence
  source 1..867: mol_type = other DNA
atgcctgtggaggagtttgtggccggctggatcagcggggccctgggcctggtgctgggccacccctttgacacagtgaaggtgcggctgcagacccagaccacctaccggggcatcgtggactgcatggtgaagatctacagacatgagagcctgctgggcttcttcaagggcatgtccttccccatcgccagcattgctgtggtgaacagcgtgctgtttggagtgtacagcaacaccctgctggtgctgacagccaccagccaccaggagcggcgggcccagccccccagctacatgcacatcttcctggccggctgcaccggcggcttcctgcaggcctactgcctggccccctttgacctgatcaaggtgcggctgcagaaccagacagagccccgggcccagcccggcagccccccaccccgctaccagggccctgtgcactgtgccgccagcatcttccgggaggagggcccccggggcctcttccggggggcctgggccctgaccctgcgggacacccccaccgtgggcatctacttcatcacctatgagggcctgtgccggcagtacaccccagagggccagaaccccagcagcgccaccgtgctggtggccggcggctttgctggcatcgcctcctgggtggccgccacccccctggacatgatcaagagcaggatgcagatggatggcctgcggcggcgggtgtaccagggcatgctggactgcatggtgagcagcatccggcaggagggcctgggcgtcttcttccggggcgtgaccatcaacagcgcccgggccttccctgtgaatgctgtgaccttcctgtcctatgagtacctgctgcgctggtggggctag

SEQ ID NO: 170529 - DNA, 741 bp, synthetic construct; identical to SEQ ID NO: 170525
  misc_feature 1..741: note = Description of Artificial Sequence: Synthetic coding sequence
  source 1..741: mol_type = other DNA

SEQ ID NO: 170530 - DNA, 867 bp, synthetic construct; identical to SEQ ID NO: 170528
  misc_feature 1..867: note = Description of Artificial Sequence: Synthetic coding sequence
  source 1..867: mol_type = other DNA

SEQ ID NO: 170531 - DNA, 357 bp, synthetic construct
  misc_feature 1..357: note = Description of Artificial Sequence: Synthetic coding sequence
  source 1..357: mol_type = other DNA
atgcctgtggaggagtttgtggccggctggatcagcggggccctgggcctggtgctgggccacccctttgacacagtgaaggtgcggctgcagacccagaccacctaccggggcatcgtggactgcatggtgaagatctacagacatgagagcctgctgggcttcttcaagggcatgtccttccccatcgccagcattgctgtggtgaacagcgtgctgtttggagtgtacagcaacaccctgctggtgctgacagccaccagccaccaggagcggcgggcccagccccccagctacatgcacatcttcctggccggctgcaccggcggcttcctgcaggcctactgcctggcctag

SEQ ID NO: 170532 - DNA, 1257 bp, synthetic construct
  misc_feature 1..1257: note = Description of Artificial Sequence: Synthetic coding sequence
  source 1..1257: mol_type = other DNA
atgcacccccggcggccagatggctttgatggcctgggctaccggggcggggccagagatgagcagggctttggaggagccttccctgcccggagcttcagcactggaagtgacctgggccactgggtgaccaccccaccagacatccctggcagcaggaacctgcactggggcgagaagagccccccctacggcgtgcccaccaccagcaccccctatgagggccccacagaggagcccttcagcagcggcggcggcggctctgtgcagggccagagcagcgagcagctgaacagatttgctggctttggaattggcctggccagcctcttcacagaaaatgtgctggcccacccctgcatcgtgctgcggcggcagtgccaggtgaactaccacgcccagcactaccacctgacccccttcaccgtcatcaacatcatgtacagcttcaacaagacccagggcccccgggccctgtggaagggcatgggcagcaccttcatcgtgcagggcgtgaccctgggcgctgagggcatcatcagcgagttcacccccctgccccgggaggtgctgcacaagtggagccccaagcagattggagagcacctgctgctgaagagcctgacctacgtggtggccatgcccttctacagcgccagcctcatcgagaccgtgcagagcgagatcatccgggacaacacaggcatcctggagtgtgtgaaggagggcatcggccgggtcatcggcatgggcgtgccccacagcaagaggctgctgcccctgctgagcctcatcttccccaccgtgctgcatggagtgctgcactacatcatcagcagcgtcatccagaagtttgtgctgctgatcctgaagaggaagacctacaacagccacctggccgagagcaccagccctgtgcagagcatgctggatgcctacttccctgagctgattgccaactttgctgccagcctgtgcagtgatgtgatcctgtaccccctggagaccgtgctgcaccggctgcacatccagggcaccaggaccatcatcgacaacacagacctgggctatgaggtgctgcccatcaacacccagtatgagggcatgagggactgcatcaacaccatccggcaggaggagggcgtgtttggcttctacaagggctttggagctgtgatcatccagtacaccctgcacgccgctgtgctgcagatcaccaagatcatctacagcaccctgctgcagaacaacatctag

SEQ ID NO: 170533 - DNA, 1014 bp, synthetic construct
  misc_feature 1..1014: note = Description of Artificial Sequence: Synthetic coding sequence
  source 1..1014: mol_type = other DNA
atgcacccccggcggccagatggctttgatggcctgggctaccggggcggggccagagatgagcagggctttggaggagccttccctgcccggagcttcagcactggaagtgacctgggccactgggtgaccaccccaccagacatccctggcagcaggaacctgcactggggcgagaagagccccccctacggcgtgcccaccaccagcaccccctatgagggccccacagaggagcccttcagcagcggcggcggcggctctgtgcagggccagagcagcgagcagctgaacagatttgctggctttggaattggcctggccagcctcttcacagaaaatgtgctggcccacccctgcatcgtgctgcggcggcagtgccaggtgaactaccacgcccagcactaccacctgacccccttcaccgtcatcaacatcatgtacagcttcaacaagacccagggcccccgggccctgtggaagggcatgggcagcaccttcatcgtgcagggcgtgaccctgggcgctgagggcatcatcagcgagttcacccccctgccccgggaggtgctgcacaagtggagccccaagcagattggagagcacctgctgctgaagagcctgacctacgtggtggccatgcccttctacagcgccagcctcatcgagaccgtgcagagcatgctggatgcctacttccctgagctgattgccaactttgctgccagcctgtgcagtgatgtgatcctgtaccccctggagaccgtgctgcaccggctgcacatccagggcaccaggaccatcatcgacaacacagacctgggctatgaggtgctgcccatcaacacccagtatgagggcatgagggactgcatcaacaccatccggcaggaggagggcgtgtttggcttctacaagggctttggagctgtgatcatccagtacaccctgcatgctgctgtgctgcagatcaccaagatcatctacagcaccctgctgcagaacaacatctag

SEQ ID NO: 170534 - DNA, 819 bp, synthetic construct
  misc_feature 1..819: note = Description of Artificial Sequence: Synthetic coding sequence
  source 1..819: mol_type = other DNA
atgtacagcttcaacaagacccagggcccccgggccctgtggaagggcatgggcagcaccttcatcgtgcagggcgtgaccctgggcgctgagggcatcatcagcgagttcacccccctgccccgggaggtgctgcacaagtggagccccaagcagattggagagcacctgctgctgaagagcctgacctacgtggtggccatgcccttctacagcgccagcctcatcgagaccgtgcagagcgagatcatccgggacaacacaggcatcctggagtgtgtgaaggagggcatcggccgggtcatcggcatgggcgtgccccacagcaagaggctgctgcccctgctgagcctcatcttccccaccgtgctgcatggagtgctgcactacatcatcagcagcgtcatccagaagtttgtgctgctgatcctgaagaggaagacctacaacagccacctggccgagagcaccagccctgtgcagagcatgctggatgcctacttccctgagctgattgccaactttgctgccagcctgtgcagtgatgtgatcctgtaccccctggagaccgtgctgcaccggctgcacatccagggcaccaggaccatcatcgacaacacagacctgggctatgaggtgctgcccatcaacacccagtatgagggcatgagggactgcatcaacaccatccggcaggaggagggcgtgtttggcttctacaagggctttggagctgtgatcatccagtacaccctgcacgccgctgtgctgcagatcaccaagatcatctacagcaccctgctgcagaacaacatctag

SEQ ID NO: 170535 - DNA, 618 bp, synthetic construct
  misc_feature 1..618: note = Description of Artificial Sequence: Synthetic coding sequence
  source 1..618: mol_type = other DNA
atgcccttctacagcgccagcctgattgaaacagtgcagagcgagatcatccgggacaacacaggcatcctggagtgtgtgaaggagggcatcggccgggtgattggcatgggcgtgccccacagcaagaggctgctgcccctgctgagcctcatcttccccaccgtgctgcacggcgtgctgcactacatcatcagcagcgtcatccagaagtttgtgctgctgatcctgaagaggaagacctacaacagccacctggccgagagcaccagccctgtgcagagcatgctggatgcctacttccctgagctgattgccaactttgctgccagcctgtgcagtgatgtgatcctgtaccccctggagaccgtgctgcaccggctgcacatccagggcaccaggaccatcatcgacaacacagacctgggctatgaggtgctgcccatcaacacccagtatgagggcatgagggactgcatcaacaccatccggcaggaggagggcgtgtttggcttctacaagggctttggagctgtgatcatccagtacaccctgcatgctgctgtgctgcagatcaccaagatcatctacagcaccctgctgcagaacaacatctag

SEQ ID NO: 170536 - DNA, 984 bp, synthetic construct
  misc_feature 1..984: note = Description of Artificial Sequence: Synthetic coding sequence
  source 1..984: mol_type = other DNA
atgaagacagagcagctgaacagatttgctggcttcggcatcggcctggccagcctcttcacagaaaatgtgctggcccacccctgcatcgtgctgcggcggcagtgccaggtgaactaccacgcccagcactaccacctgacccccttcaccgtcatcaacatcatgtacagcttcaacaagacccagggcccccgggccctgtggaagggcatgggcagcaccttcatcgtgcagggcgtgaccctgggcgctgagggcatcatcagcgagttcacccccctgccccgggaggtgctgcacaagtggagccccaagcagatcggggagcacctgctgctgaagagcctgacctacgtggtggccatgcccttctacagcgccagcctgattgaaacagtgcagagcgagatcatccgggacaacacaggcatcctggagtgtgtgaaggagggcatcggccgggtgattggcatgggcgtgccccacagcaagaggctgctgcccctgctgagcctcatcttccccaccgtgctgcacggcgtgctgcactacatcatcagcagcgtcatccagaagtttgtgctgctgatcctgaagaggaagacctacaacagccacctggccgagagcaccagccctgtgcagagcatgctggatgcctacttccctgagctgattgccaactttgctgccagcctgtgcagtgatgtgatcctgtaccccctggagaccgtgctgcaccggctgcacatccagggcaccaggaccatcatcgacaacacagacctgggctatgaggtgctgcccatcaacacccagtatgagggcatgagggactgcatcaacaccatccggcaggaggagggcgtgtttggcttctacaagggctttggagctgtgatcatccagtacaccctgcatgctgctgtgctgcagatcaccaagatcatctacagcaccctgctgcagaacaacatctag

SEQ ID NO: 170537 - DNA, 771 bp, synthetic construct
  misc_feature 1..771: note = Description of Artificial Sequence: Synthetic coding sequence
  source 1..771: mol_type = other DNA
atgggcagcaccttcatcgtgcagggcgtgaccctgggcgctgagggcatcatcagcgagttcacccccctgccccgggaggtgctgcacaagtggagccccaagcagattggagagcacctgctgctgaagagcctgacctacgtggtggccatgcccttctacagcgccagcctcatcgagaccgtgcagagcgagatcatccgggacaacacaggcatcctggagtgtgtgaaggagggcatcggccgggtcatcggcatgggcgtgccccacagcaagaggctgctgcccctgctgagcctcatcttccccaccgtgctgcatggagtgctgcactacatcatcagcagcgtcatccagaagtttgtgctgctgatcctgaagaggaagacctacaacagccacctggccgagagcaccagccctgtgcagagcatgctggatgcctacttccctgagctgattgccaactttgctgccagcctgtgcagtgatgtgatcctgtaccccctggagaccgtgctgcaccggctgcacatccagggcaccaggaccatcatcgacaacacagacctgggctatgaggtgctgcccatcaacacccagtatgagggcatgagggactgcatcaacaccatccggcaggaggagggcgtgtttggcttctacaagggctttggagctgtgatcatccagtacaccctgcacgccgctgtgctgcagatcaccaagatcatctacagcaccctgctgcagaacaacatctag

SEQ ID NO: 170538 - DNA, 819 bp, synthetic construct; identical to SEQ ID NO: 170534
  misc_feature 1..819: note = Description of Artificial Sequence: Synthetic coding sequence
  source 1..819: mol_type = other DNA

SEQ ID NO: 170539 - DNA, 2220 bp, synthetic construct
  misc_feature 1..2220: note = Description of Artificial Sequence: Synthetic coding sequence
  source 1..2220: mol_type = other DNA
atgagcagcgagagcaaggagcagcacaacgtgagcccccgggacagcgctgagggcaatgacagctaccccagcggcatccacctggagctgcagcgggagagcagcacagacttcaagcagtttgagaccaatgaccagtgccggccctaccaccgcatcctgattgaaaggcaggagaagagtgacaccaacttcaaggagtttgtgatcaagaagctgcagaagaactgccagtgcagccctgccaaggccaagaacatgatcctgggcttcctgcctgtgctgcagtggctgcccaagtatgacctgaagaagaacatcctgggagatgtgatgagcggcctgattgtgggcatcctgctggtgccccagagcatcgcctacagcctgctggccggccaggagcctgtgtatggcctgtacaccagcttctttgccagcatcatctacttcctgctgggcaccagccgccacatctctgtgggcatctttggagtgctgtgcctgatgattggagaaacagtggaccgggagctgcagaaggccggctatgacaatgcccacagcgcccccagcctgggcatggtgtccaatggcagcaccctgctgaaccacaccagtgaccgcatctgtgacaagagctgctacgccatcatggtgggcagcacagtgaccttcatcgccggcgtgtaccaggtggccatgggcttcttccaggtgggctttgtgtctgtgtacctgagtgatgccctgctgagcggctttgtgactggagccagcttcaccatcctgaccagccaggccaagtacctgctgggcctgaacctgcccaggaccaatggagtgggcagcctcatcaccacctggatccacgtgttcaggaacatccacaagaccaacctgtgtgacctgatcaccagcctgctgtgcctgctggtgctgctgcccaccaaggagctgaatgagcacttcaagagcaagctgaaggcccccatccccatcgagctggtggtggtggtggccgccaccctggccagccactttgggaagctgcacgagaactacaacagcagcattgctggccacatccccaccggcttcatgccacccaaggtgcctgagtggaacctgatccccagcgtggccgtggatgccatcgccatcagcatcatcggctttgccatcaccgtgtccctgtctgagatgtttgccaagaagcacggctacacagtgaaggccaaccaggagatgtatgccatcggcttctgcaacatcatccccagcttcttccactgcttcaccaccagcgctgccctggccaagaccctggtgaaggagagcacaggctgccacacccagctgagcggcgtggtgacagccctggtgctgctgctggtgctgctggtgattgcccccctcttctacagcctgcagaagtctgtgctgggcgtcatcaccatcgtgaacctgcggggggccctgaggaagttccgggacctgcccaagatgtggagcatcagcaggatggacaccgtcatctggtttgtgaccatgctgagcagcgccctgctgagcacagaaattggcctgctggtgggcgtgtgcttcagcatcttctgtgtgatcctgcggacccagaagcccaagagcagcctgctgggcctggtggaggagagcgaggtgtttgaatctgtgtctgcctacaagaacctgcagatcaagccaggcatcaagatcttccgctttgtggcccccctgtactacatcaacaaggagtgcttcaagagcgccctgtacaagcagacagtgaaccccatcctgatcaaggtggcctggaagaaggccgccaagaggaagatcaaggagaaggtggtgaccctgggcggcatccaggatgagatgtctgtgcagctgagccatgaccccctggagctgcacaccatcgtgattgactgcagcgccatccagttcctggacacagctggcatccacaccctgaaggaggtgagaagagattatgaggccatcggcatccaggtgctgctggcccagtgcaaccccaccgtgcgggacagcctgaccaacggggagtactgcaagaaggaggaggagaacctgctcttctacagcgtgtatgaggccatggcctttgctgaggtgtccaagaaccagaagggcgtgtgtgtgcccaacggcctgagcctgagcagtgactag

SEQ ID NO: 170540 - DNA, 72 bp, synthetic construct
  misc_feature 1..72: note = Description of Artificial Sequence: Synthetic coding sequence
  source 1..72: mol_type = other DNA
atgagcagcgagagcaaggagcagcacaacgtgagcccccgggacagcgctgagggcaatgacagctactag

SEQ ID NO: 170541 - DNA, 2295 bp, synthetic construct
  misc_feature 1..2295: note = Description of Artificial Sequence: Synthetic coding sequence
  source 1..2295: mol_type = other DNA
atgattgagccctttggaaaccagtacatcgtggcccggcctgtgtacagcaccaatgcctttgaggagaaccacaagaagacaggccgccaccacaagaccttcctggaccacctgaaggtgtgctgcagctgcagcccccagaaggccaagagaattgtgctgagcctcttccccatcgcctcctggctgcctgcctaccgcctgaaggagtggctgctgagtgacatcgtgtctggcatcagcactggaattgtggccgtgctgcagggcctggcctttgccctgctggtggacatcccccctgtgtatggcctgtatgccagcttcttccctgccatcatctacctgttcttcggcaccagccgccacatctctgtgggccccttccccatcctgtccatgatggtgggcctggccgtgtctggagctgtgtccaaggctgtgcctgacagaaatgccaccaccctgggcctgcccaacaacagcaacaacagcagcctgctggatgatgagcgggtgcgggtggccgctgctgcctctgtgacagtgctgagcggcatcatccagctggccttcggcatcctgcgcatcggctttgtggtgatctacctgtctgagagcctcatcagcggcttcaccacagctgctgctgtgcacgtgctggtgtcccagctgaagttcatcttccagctgactgtgcccagccacacagatcctgtgtccatcttcaaggtgctgtacagcgtcttcagccagatcgagaagaccaacattgctgacctggtgacagccctgattgtgctgctggtggtgtccatcgtgaaggagatcaaccagcgcttcaaggacaagctgcctgtgcccatccccatcgagttcatcatgacagtgattgctgctggggtgtcctatggctgtgacttcaagaaccgcttcaaggtggccgtggtgggggacatgaaccctggcttccagccccccatcaccccagatgtggagaccttccagaacacagtgggggactgcttcggcatcgccatggtggcctttgctgtggccttctctgtggcctctgtgtacagcctgaagtatgactaccccctggatggcaaccaggagctgattgccctgggcctgggcaacatcgtgtgtggggtcttccggggctttgctggcagcacagccctgagccgctctgctgtgcaggagagcactggaggcaagacccagattgctggcctcatcggggccatcatcgtgctgattgtggtgctggccatcggcttcctgctggcccccctgcagaagtctgtgctggccgccctggccctgggcaacctgaagggcatgctgatgcagtttgctgagatcggccgcctgtggaggaaggacaagtatgactgcctgatctggatcatgaccttcatcttcaccatcgtgctgggcctgggcctgggcctggccgcctctgtggccttccagctgctgaccatcgtgttccgcacccagttccccaagtgcagcaccctggccaacatcggccgcaccaacatctacaagaacaagaaggactactatgacatgtatgagcctgagggcgtgaagatcttccgctgccccagccccatctactttgccaacatcggcttcttccggaggaagctgattgatgctgtgggcttcagccccctgcgcatcctgaggaagaggaacaaggccctgaggaagatcaggaagctgcagaagcagggcctgctgcaggtgacccccaagggcttcatctgcaccgtggacaccatcaaggacagtgatgaggagctggacaacaaccagatcgaggtgctggaccagcccatcaacaccacagacctgcccttccacatcgactggaatgatgacctgcccctgaacatcgaggtgcccaagatcagcctgcacagcctcatcctggacttctctgctgtgtccttcctggatgtgtcctctgtgcggggcctgaagagcatcctgcaggagttcatccgcatcaaggtggatgtgtacatcgtgggcacagatgatgacttcatcgagaagctgaacagatatgagttctttgatggagaggtgaagagcagcatcttcttcctgaccatccatgatgctgtgctgcacatcctgatgaagaaggactacagcaccagcaagttcaaccccagccaggagaaggatggcaagattgacttcaccatcaacaccaacggcggcctgaggaacagagtgtatgaggtgcctgtggagaccaagttctag

SEQ ID NO: 170542 - DNA, 1956 bp, synthetic construct
  misc_feature 1..1956: note = Description of Artificial Sequence: Synthetic coding sequence
  source 1..1956: mol_type = other DNA
atgctgctgaggaagatcatcaagaggcaggaggacatcatccgccacttctggatcatcagcaaatgtgtggtggcctcctggctgcctgcctaccgcctgaaggagtggctgctgagtgacatcgtgtctggcatcagcacaggcatcgtggccgtgctgcagggcctggcctttgccctgctggtggacatcccccctgtgtatggcctgtatgccagcttcttccctgccatcatctacctgttcttcggcaccagccgccacatctctgtgggccccttccccatcctgtccatgatggtgggcctggccgtgtctggagctgtgtccaaggctgtgcctgacagaaatgccaccaccctgggcctgcccaacaacagcaacaacagcagcctgctggatgatgagcgggtgcgggtggccgccgccgcctctgtgacagtgctgagcggcatcatccagctggccttcggcatcctgagaattggatttgtggtgatctacctgtctgagagcctcatcagcggcttcaccacagctgctgctgtgcacgtgctggtgtcccagctgaagttcatcttccagctgactgtgcccagccacacagatcctgtgtccatcttcaaggtgctgtacagcgtcttcagccagatcgagaagaccaacattgctgacctggtgacagccctgattgtgctgctggtggtgtccatcgtgaaggagatcaaccagcgcttcaaggacaagctgcctgtgcccatccccatcgagttcatcatgacagtgattgctgctggggtgtcctatggctgtgacttcaagaaccgcttcaaggtggccgtggtgggggacatgaaccctggcttccagccccccatcaccccagatgtggagaccttccagaacacagtgggggactgctttggaattgccatggtggcctttgctgtggccttctctgtggcctctgtgtacagcctgaagtatgactaccccctggatggcaaccaggagctgattgccctgggcctgggcaacatcgtgtgtggggtcttccggggctttgctggcagcacagccctgagccgctctgctgtgcaggagagcactggaggcaagacccagattgctggcctgattggagccatcatcgtgctgattgtggtgctggccatcggcttcctgctggcccccctgcagaagtctgtgctggccgccctggccctgggcaacctgaagggcatgctgatgcagtttgctgagatcggccgcctgtggaggaaggacaagtatgactgcctgatctggatcatgaccttcatcttcaccatcgtgctgggcctgggcctgggcctggccgcctctgtggccttccagctgctgaccatcgtgttccgcacccagttccccaagtgcagcaccctggccaacattggaagaaccaacatctacaagaacaagaaggactactatgacatgtatgagcctgagggcgtgaagatcttccgctgccccagccccatctactttgccaacatcggcttcttccggaggaagctgattgatgctgtgggcttcagccccctgcgcatcctgaggaagaggaacaaggccctgaggaagatcaggaagctgcagaagcagggcctgctgcaggtgacccccatcctgcaggagttcatccgcatcaaggtggatgtgtacatcgtgggcacagatgatgacttcatcgagaagctgaacagatatgagttctttgatggagaggtgaagagcagcatcttcttcctgaccatccatgatgctgtgctgcacatcctgatgaagaaggactacagcaccagcaagttcaaccccagccaggagaaggatggcaagattgacttcaccatcaacaccaatggaggcctgaggaacagagtgtatgaggtgcctgtggagaccaagttctag

SEQ ID NO: 170543 - DNA, 363 bp, synthetic construct
  misc_feature 1..363: note = Description of Artificial Sequence: Synthetic coding sequence
  source 1..363: mol_type = other DNA
atgattgagccctttggaaaccagtacatcgtggcccggcctgtgtacagcaccaatgcctttgaggagaaccacaagaagacaggccgccaccacaagaccttcctggaccacctgaaggtgtgctgcagctgcagcccccagaaggccaagagaattgtgctgagcctcttccccatcgcctcctggctgcctgcctaccgcctgaaggagtggctgctgagtgacatcgtgtctggcatcagcactggaattgtggccgtgctgcagggcctggcctttgccctgctggtggacatcccccctgtgtatggcctgtatgccagcttcttccctgccatcatctacctgttctttggatag

SEQ ID NO: 170544 - DNA, 2343 bp, synthetic construct
  misc_feature 1..2343: note = Description of Artificial Sequence: Synthetic coding sequence
  source 1..2343: mol_type = other DNA
atggccgcccctgggggccgctctgagcccccccagctgcctgagtacagctgcagctacatggtgtccaggcctgtgtacagcgagctggccttccagcagcagcacgagcggcggctgcaggagaggaagaccctgcgggagagcctggccaagtgctgcagctgcagcaggaagagggccttcggcgtgctgaagaccctggtgcccatcctggagtggctgcccaagtacagagtgaaggagtggctgctgagtgatgtgatcagcggcgtgtccacaggcctggtggccaccctgcagggcatggcctatgccctgctggccgctgtgcctgtgggctacggcctgtacagcgccttcttccccatcctgacctacttcatcttcggcaccagccgccacatctctgtgggccccttccctgtggtgtccctgatggtgggctctgtggtgctgtccatggccccagatgagcacttcctggtgagcagcagcaatggaacagtgctgaacaccaccatgattgacacagctgcccgggacacagcccgggtgctgattgccagcgccctgaccctgctggtgggcatcatccagctgatctttggaggcctgcagatcggcttcatcgtgcgctacctggccgaccccctggtgggcggcttcaccacagctgctgccttccaggtgctggtgtcccagctgaagatcgtgctgaatgtgtccaccaagaactacaacggggtgctgagcatcatctacaccctggtggagatcttccagaacatcggggacaccaacctggccgacttcaccgctggcctgctgaccatcgtggtgtgcatggctgtgaaggagctgaatgaccgcttccgccacaagatccctgtgcccatccccatcgaggtgattgtgaccatcatcgccacagccatctcctatggagccaacctggagaagaactacaatgccggcatcgtgaagagcatcccccggggcttcctgcccccagagctgccccctgtgtccctcttcagcgagatgctggccgccagcttcagcattgctgtggtggcctatgccatcgctgtgtctgtgggcaaggtgtatgccaccaagtatgactacaccattgatggcaaccaggagttcatcgccttcggcatcagcaacatcttcagcggcttcttcagctgctttgtggccaccacagccctgagcaggacagctgtgcaggagagcactggaggcaagacccaggtggccggcatcatctctgctgccatcgtgatgattgccatcctggccctgggcaagctgctggagcccctgcagaagtctgtgctggccgctgtggtgattgccaacctgaagggcatgttcatgcagctgtgtgacatcccccggctgtggaggcagaacaagattgatgctgtgatctgggtgttcacctgcatcgtgtccatcatcctgggcctggacctgggcctgctggccggcctcatcttcggcctgctgactgtggtgctgcgggtgcagttccccagctggaatggcctgggcagcatccccagcacagacatctacaagagcaccaagaactacaagaacatcgaggagccccagggcgtgaagatcctgcgcttcagcagccccatcttctatggaaatgtggatggcttcaagaagtgcatcaagagcacagtgggctttgatgccatccgggtgtacaacaagaggctgaaggccctgaggaagatccagaagctgatcaagagcggccagctgcgggccaccaagaatggcatcatcagtgatgctgtgtccaccaacaatgcctttgagccagatgaagatattgaggacctggaggagctggacatccccaccaaggagattgagatccaggtggactggaacagcgagctgcctgtgaaggtgaatgtgcccaaggtgcccatccacagcctggtgctggactgtggggccatctccttcctggatgtggtgggcgtgcgcagcctgcgggtgattgtgaaggagttccagagaattgatgtgaatgtgtactttgccagcctgcaggactatgtgattgagaagctggagcagtgtggcttctttgatgacaacatcaggaaggacaccttcttcctgactgtgcatgatgccatcctgtacctgcagaaccaggtgaagagccaggagggccagggcagcatcctggagaccatcaccctcatccaggactgcaaggacaccctggagctgattgaaacagagctgacagaggaggagctggatgtgcaggatgaggccatgaggaccctggccagctag

SEQ ID NO: 170545 - DNA, 396 bp, synthetic construct
  misc_feature 1..396: note = Description of Artificial Sequence: Synthetic coding sequence
  source 1..396: mol_type = other DNA
atggccgcccctgggggccgctctgagcccccccagctgcctgagtacagctgcagctacatggtgtccaggcctgtgtacagcgagctggccttccagcagcagcacgagcggcggctgcaggagaggaagaccctgcgggagagcctggccaagtgctgcagctgcagcaggaagagggccttcggcgtgctgaagaccctggtgcccatcctggagtggctgcccaagtacagagtgaaggagtggctgctgagtgatgtgatcagcggcgtgtccacaggcctggtggccaccctgcagggcatggcctatgccctgctggccgctgtgcctgtgggctacggcctgtacagcgccttcttccccatcctgacctacttcatcttcggctag

SEQ ID NO: 170546 - DNA, 1026 bp, synthetic construct
  misc_feature 1..1026: note = Description of Artificial Sequence: Synthetic coding sequence
  source 1..1026: mol_type = other DNA
atgagacatggcctggccgtgcccagcgtgctggccgctgtggtgattgccaacctgaagggcatgttcatgcagctgtgtgacatcccccggctgtggaggcagaacaagattgatgctgtgatctgggtgttcacctgcatcgtgtccatcatcctgggcctggacctgggcctgctggccggcctcatcttcggcctgctgactgtggtgctgcgggtgcagttccccagctggaatggcctgggcagcatccccagcacagacatctacaagagcaccaagaactacaagaacatcgaggagccccagggcgtgaagatcctgcgcttcagcagccccatcttctatggaaatgtggatggcttcaagaagtgcatcaagagcacagtgggctttgatgccatccgggtgtacaacaagaggctgaaggccctgaggaagatccagaagctgatcaagagcggccagctgcgggccaccaagaatggcatcatcagtgatgctgtgtccaccaacaatgcctttgagccagatgaggacatcgaggacctggaggagctggacatccccaccaaggagattgagatccaggtggactggaacagcgagctgcctgtgaaggtgaatgtgcccaaggtgcccatccacagcctggtgctggactgtggggccatctccttcctggatgtggtgggcgtgcgcagcctgcgggtcatcgtgaaggagttccagagaattgatgtgaatgtgtactttgccagcctgcaggactatgtgattgagaagctggagcagtgtggcttctttgatgacaacatcaggaaggacaccttcttcctgactgtgcatgatgccatcctgtacctgcagaaccaggtgaagagccaggagggccagggcagcatcctggagaccatcaccctcatccaggactgcaaggacaccctggagctgattgaaacagagctgacagaggaggagctggatgtgcaggatgaggccatgaggaccctggccagctag

SEQ ID NO: 170547 - DNA, 1050 bp, synthetic construct
  misc_feature 1..1050: note = Description of Artificial Sequence: Synthetic coding sequence
  source 1..1050: mol_type = other DNA
atgattgccatcctggccctgggcaagctgctggagcccctgcagaagtctgtgctggccgctgtggtgattgccaacctgaagggcatgttcatgcagctgtgtgacatcccccggctgtggaggcagaacaagattgatgctgtgatctgggtgttcacctgcatcgtgtccatcatcctgggcctggacctgggcctgctggccggcctcatcttcggcctgctgactgtggtgctgcgggtgcagttccccagctggaatggcctgggcagcatccccagcacagacatctacaagagcaccaagaactacaagaacatcgaggagccccagggcgtgaagatcctgcgcttcagcagccccatcttctatggaaatgtggatggcttcaagaagtgcatcaagagcacagtgggctttgatgccatccgggtgtacaacaagaggctgaaggccctgaggaagatccagaagctgatcaagagcggccagctgcgggccaccaagaatggcatcatcagtgatgctgtgtccaccaacaatgcctttgagccagatgaggacatcgaggacctggaggagctggacatccccaccaaggagattgagatccaggtggactggaacagcgagctgcctgtgaaggtgaatgtgcccaaggtgcccatccacagcctggtgctggactgtggggccatctccttcctggatgtggtgggcgtgcgcagcctgcgggtcatcgtgaaggagttccagagaattgatgtgaatgtgtactttgccagcctgcaggactatgtgattgagaagctggagcagtgtggcttctttgatgacaacatcaggaaggacaccttcttcctgactgtgcatgatgccatcctgtacctgcagaaccaggtgaagagccaggagggccagggcagcatcctggagaccatcaccctcatccaggactgcaaggacaccctggagctgattgaaacagagctgacagaggaggagctggatgtgcaggatgaggccatgaggaccctggccagctag

SEQ ID NO: 170548 - DNA, 1104 bp, synthetic construct
  misc_feature 1..1104: note = Description of Artificial Sequence: Synthetic coding sequence
  source 1..1104: mol_type = other DNA
atgagacatggcctggccgtgcctgtggccggcatcatctctgctgccatcgtgatgattgccatcctggccctgggcaagctgctggagcccctgcagaagtctgtgctggccgctgtggtgattgccaacctgaagggcatgttcatgcagctgtgtgacatcccccggctgtggaggcagaacaagattgatgctgtgatctgggtgttcacctgcatcgtgtccatcatcctgggcctggacctgggcctgctggccggcctcatcttcggcctgctgactgtggtgctgcgggtgcagttccccagctggaatggcctgggcagcatccccagcacagacatctacaagagcaccaagaactacaagaacatcgaggagccccagggcgtgaagatcctgcgcttcagcagccccatcttctatggaaatgtggatggcttcaagaagtgcatcaagagcacagtgggctttgatgccatccgggtgtacaacaagaggctgaaggccctgaggaagatccagaagctgatcaagagcggccagctgcgggccaccaagaatggcatcatcagtgatgctgtgtccaccaacaatgcctttgagccagatgaggacatcgaggacctggaggagctggacatccccaccaaggagattgagatccaggtggactggaacagcgagctgcctgtgaaggtgaatgtgcccaaggtgcccatccacagcctggtgctggactgtggggccatctccttcctggatgtggtgggcgtgcgcagcctgcgggtcatcgtgaaggagttccagagaattgatgtgaatgtgtactttgccagcctgcaggactatgtgattgagaagctggagcagtgtggcttctttgatgacaacatcaggaaggacaccttcttcctgactgtgcatgatgccatcctgtacctgcagaaccaggtgaagagccaggagggccagggcagcatcctggagaccatcaccctcatccaggactgcaaggacaccctggagctgattgaaacagagctgacagaggaggagctggatgtgcaggatgaggccatgaggaccctggccagctag

SEQ ID NO: 170549 - DNA, 2235 bp, synthetic construct
  misc_feature 1..2235: note = Description of Artificial Sequence: Synthetic coding sequence
  source 1..2235: mol_type = other DNA
atggaccacgccgaggagaatgagatcctggccgccacccagcgctactacgtggagcggcccatcttcagccaccctgtgctgcaggagcggctgcacaccaaggacaaggtgcctgacagcattgctgacaagctgaagcaggccttcacctgcacccccaagaagatccggaacatcatctacatgttcctgcccatcaccaagtggctgcctgcctacaagttcaaggagtatgtgctgggggacctggtgtctggcatcagcactggagtgctgcagctgccccagggcctggcctttgccatgctggccgctgtgccccccatcttcggcctgtacagcagcttctaccctgtgatcatgtactgcttcctgggcaccagccgccacatcagcatcggcccctttgctgtgatcagcctgatgattggaggagtggccgtgcggctggtgcctgatgacatcgtcatccctggaggagtgaatgccaccaacggcacagaggccagagatgccctgcgggtgaaggtggccatgtctgtgaccctgctgagcggcatcatccagttctgcctgggcgtgtgccgcttcggctttgtggccatctacctgacagagcccctggtgcggggcttcaccacagctgctgctgtgcacgtgttcacctccatgctgaagtacctgtttggagtgaagaccaagcgctacagcggcatcttctctgtggtgtacagcacagtggccgtgctgcagaatgtgaagaacctgaatgtgtgcagcctgggcgtgggcctgatggtgtttggcctgctgctgggcggcaaggagttcaatgaacgcttcaaggagaagctgcctgcccccatccccctggagttctttgctgtggtgatgggcaccggcatctctgctggcttcaacctgaaggagagctacaacgtggatgtggtgggcaccctgcccctgggcctgctgcccccagccaacccagacaccagcctcttccacctggtgtatgtggatgccatcgccatcgccatcgtgggcttctctgtgaccatctccatggccaagaccctggccaacaagcacggctaccaggtggatggcaaccaggagctgattgccctgggcctgtgcaacagcatcggcagcctcttccagaccttcagcatcagctgcagcctgagccgcagcctggtgcaggagggcaccggcggcaagacccagctggccggctgcctggccagcctgatgatcctgctggtgatcctggccaccggcttcctgtttgagagcctgccccaggccgtgctgagcgccatcgtgattgtgaacctgaagggcatgttcatgcagttcagtgacctgcccttcttctggaggaccagcaagattgagctgaccatctggctgaccacctttgtgagcagcctcttcctgggcctggactatggcctcatcacagctgtgatcatcgccctgctgaccgtcatctaccgcacccagagccccagctacaaggtgctgggcaagctgcctgagacagatgtgtacattgatattgatgcctatgaggaggtgaaggagatccctggcatcaagatcttccagatcaatgcccccatctactatgccaacagcgacctgtacagcaatgccctgaagaggaagacaggagtgaacccagctgtgatcatgggcgcccggaggaaggccatgaggaaatatgccaaggaggtgggcaatgccaacatggccaatgccaccgtggtgaaggcagatgctgaggtggatggagaagatgccaccaagccagaggaggaggatggagaggtgaagtacccacccatcgtcatcaagagcaccttccctgaggagatgcagcgcttcatgcctcctggggacaacgtgcacacagtcatcctggacttcacccaggtgaacttcatcgacagcgtgggcgtgaagaccctggccggcatcgtgaaggagtatggagatgtgggcatctacgtgtacctggccggctgcagcgcccaggtggtgaatgacctgaccaggaaccgcttctttgagaacccagccctgtgggagctgctcttccacagcatccatgatgctgtgctgggcagccagctgcgggaggccctggccgagcaggaggccagcgccccacccagccaggaggacctggagcccaatgccaccccagccaccccagaggcctag

SEQ ID NO: 170550 - DNA, 2058 bp, synthetic construct
  misc_feature 1..2058: note = Description of Artificial Sequence: Synthetic coding sequence
  source 1..2058: mol_type = other DNA
atggaccacgccgaggagaatgagatcctggccgccacccagcgctactacgtggagcggcccatcttcagccaccctgtgctgcaggagcggctgcacaccaaggacaaggtgcctgacagcattgctgacaagctgaagcaggccttcacctgcacccccaagaagatccggaacatcatctacatgttcctgcccatcaccaagtggctgcctgcctacaagttcaaggagtatgtgctgggggacctggtgtctggcatcagcactggagtgctgcagctgccccagggcctggcctttgccatgctggccgctgtgccccccatcttcggcctgtacagcagcttctaccctgtgatcatgtactgcttcctgggcaccagccgccacatcagcatcggcccctttgctgtgatcagcctgatgattggaggagtggccgtgcggctggtgcctgatgacatcgtcatccctggaggagtgaatgccaccaacggcacagaggccagagatgccctgcgggtgaaggtggccatgtctgtgaccctgctgagcggcatcatccagttctgcctgggcgtgtgccgcttcggctttgtggccatctacctgacagagcccctggtgcggggcttcaccacagctgctgctgtgcacgtgttcacctccatgctgaagtacctgtttggagtgaagaccaagcgctacagcggcatcttctctgtggtgtacagcacagtggccgtgctgcagaatgtgaagaacctgaatgtgtgcagcctgggcgtgggcctgatggtgtttggcctgctgctgggcggcaaggagttcaatgaacgcttcaaggagaagctgcctgcccccatccccctggagttctttgctgtggtgatgggcaccggcatctctgctggcttcaacctgaaggagagctacaacgtggatgtggtgggcaccctgcccctgggcctgctgcccccagccaacccagacaccagcctcttccacctggtgtatgtggatgccatcgccatcgccatcgtgggcttctctgtgaccatctccatggccaagaccctggccaacaagcacggctaccaggtggatggcaaccaggagctgattgccctgggcctgtgcaacagcatcggcagcctcttccagaccttcagcatcagctgcagcctgagccgcagcctggtgcaggagggcaccggcggcaagacccagctggccggctgcctggccagcctgatgatcctgctggtgatcctggccaccggcttcctgtttgagagcctgccccaggccgtgctgagcgccatcgtgattgtgaacctgaagggcatgttcatgcagttcagtgacctgcccttcttctggaggaccagcaagattgagctgaccatctggctgaccacctttgtgagcagcctcttcctgggcctggactatggcctcatcacagctgtgatcatcgccctgctgaccgtcatctaccgcacccagagccccagctacaaggtgctgggcaagctgcctgagacagatgtgtacattgatattgatgcctatgaggaggtgaaggagatccctggcatcaagatcttccagatcaatgcccccatctactatgccaacagcgacctgtacagcaatgccctgaagaggaagacaggagtgaacccagctgtgatcatgggcgcccggaggaaggccatgaggaaatatgccaaggaggtgggcaatgccaacatggccaatgccaccgtggtgaaggcagatgctgaggtggatggagaagatgccaccaagccagaggaggaggatggagaggtgaagtacccacccatcgtcatcaagagcaccttccctgaggagatgcagcgcttcatgcctcctggggacaacgtgcacacagtcatcctggacttcacccaggtgaacttcatcgacagcgtgggcgtgaagaccctggccggcatcgtgaaggagtatggagatgtgggcatctacgtgtacctggccggctgcagcgccttcatccagaggtag

SEQ ID NO: 170551 - DNA, 534 bp, synthetic construct
  misc_feature 1..534: note = Description of Artificial Sequence: Synthetic coding sequence
  source 1..534: mol_type = other DNA
atgggcgcccggaggaaggccatgaggaaatatgccaaggaggtgggcaatgccaacatggccaatgccaccgtggtgaaggcagatgctgaggtggatggagaagatgccaccaagccagaggaggaggatggagaggtgaagtacccacccatcgtcatcaagagcaccttccctgaggagatgcagcgcttcatgcctcctggggacaacgtgcacacagtcatcctggacttcacccaggtgaacttcattgattctgtgggcgtgaagaccctggccggcatcgtgaaggagtatggagatgtgggcatctacgtgtacctggccggctgcagcgcccaggtggtgaatgacctgaccaggaaccgcttctttgaaaatcctgccctgtgggagctgctcttccacagcatccatgatgctgtgctgggcagccagctgcgggaggccctggccgagcaggaggccagcgccccacccagccaggaggacctggagcccaatgccaccccagccaccccagaggcctag

SEQ ID NO: 170552 - DNA, 1008 bp, synthetic construct
  misc_feature 1..1008: note = Description of Artificial Sequence: Synthetic coding sequence
  source 1..1008: mol_type = other DNA
atggaccacgccgaggagaatgagatcctggccgccacccagcgctactacgtggagcggcccatcttcagccaccctgtgctgcaggagcggctgcacaccaaggacaaggtgcctgacagcattgctgacaagctgaagcaggccttcacctgcacccccaagaagatccggaacatcatctacatgttcctgcccatcaccaagtggctgcctgcctacaagttcaaggagtatgtgctgggggacctggtgtctggcatcagcactggagtgctgcagctgccccagggcctggcctttgccatgctggccgctgtgccccccatcttcggcctgtacagcagcttctaccctgtgatcatgtactgcttcctgggcaccagccgccacatcagcatcggcccctttgctgtgatcagcctgatgattggaggagtggccgtgcggctggtgcctgatgacatcgtcatccctggaggagtgaatgccaccaacggcacagaggccagagatgccctgcgggtgaaggtggccatgtctgtgaccctgctgagcggcatcatccagttctgcctgggcgtgtgccgcttcggctttgtggccatctacctgacagagcccctggtgcggggcttcaccacagctgctgctgtgcacgtgttcacctccatgctgaagtacctgtttggagtgaagaccaagcgctacagcggcatcttctctgtggtgtacagcacagtggccgtgctgcagaatgtgaagaacctgaatgtgtgcagcctgggcgtgggcctgatggtgtttggcctgctgctgggcggcaaggagttcaatgaacgcttcaaggagaagctgcctgcccccatccccctggagttctttgctgtggtgatgggcaccggcatctctgctggcttcaacctgaaggagagctacaacgtggatgtggtgggcaccctgcccctgggcttccacacagagatgacccggcgctggaggccctag

SEQ ID NO: 170553 - DNA, 2145 bp, synthetic construct
  misc_feature 1..2145: note = Description of Artificial Sequence: Synthetic coding sequence
  source 1..2145: mol_type = other DNA
atggaccacgccgaggagaatgagatcctggccgccacccagcgctactacgtggagcggcccatcttcagccaccctgtgctgcaggagcggctgcacaccaaggacaaggtgcctgacagcattgctgacaagctgaagcaggccttcacctgcacccccaagaagatccggaacatcatctacatgttcctgcccatcaccaagtggctgcctgcctacaagttcaaggagtatgtgctgggggacctggtgtctggcatcagcactggagtgctgcagctgccccagggcctggcctttgccatgctggccgctgtgccccccatcttcggcctgtacagcagcttctaccctgtgatcatgtactgcttcctgggcaccagccgccacatcagcatcggcccctttgctgtgatcagcctgatgattggaggagtggccgtgcggctggtgcctgatgacatcgtcatccctggaggagtgaatgccaccaacggcacagaggccagagatgccctgcgggtgaaggtggccatgtctgtgaccctgctgagcggcatcatccagttctgcctgggcgtgtgccgcttcggctttgtggccatctacctgacagagcccctggtgcggggcttcaccacagctgctgctgtgcacgtgttcacctccatgctgaagtacctgtttggagtgaagaccaagcgctacagcggcatcttctctgtggtgtacagcacagtggccgtgctgcagaatgtgaagaacctgaatgtgtgcagcctgggcgtgggcctgatggtgtttggcctgctgctgggcggcaaggagttcaatgaacgcttcaaggagaagctgcctgcccccatccccctggagttctttgctgtggtgatgggcaccggcatctctgctggcttcaacctgaaggagagctacaacgtggatgtggtgggcaccctgcccctgggcctgctgcccccagccaacccagacaccagcctcttccacctggtgtatgtggatgccatcgccatcgccatcgtgggcttctctgtgaccatctccatggccaagaccctggccaacaagcacggctaccaggtggatggcaaccaggagctgattgccctgggcctgtgcaacagcatcggcagcctcttccagaccttcagcatcagctgcagcctgagccgcagcctggtgcaggagggcaccggcggcaagacccagctggccggctgcctggccagcctgatgatcctgctggtgatcctggccaccggcttcctgtttgagagcctgccccagaccatctggctgaccacctttgtgagcagcctcttcctgggcctggactatggcctcatcacagctgtgatcatcgccctgctgaccgtcatctaccgcacccagagccccagctacaaggtgctgggcaagctgcctgagacagatgtgtacattgatattgatgcctatgaggaggtgaaggagatccctggcatcaagatcttccagatcaatgcccccatctactatgccaacagcgacctgtacagcaatgccctgaagaggaagacaggagtgaacccagctgtgatcatgggcgcccggaggaaggccatgaggaaatatgccaaggaggtgggcaatgccaacatggccaatgccaccgtggtgaaggccacccaggatgctgaggtggatggagaagatgccaccaagccagaggaggaggatggagaggtgaagtacccacccatcgtcatcaagagcaccttccctgaggagatgcagcgcttcatgcctcctggggacaacgtgcacacagtcatcctggacttcacccaggtgaacttcatcgacagcgtgggcgtgaagaccctggccggcatcgtgaaggagtatggagatgtgggcatctacgtgtacctggccggctgcagcgcccaggtggtgaatgacctgaccaggaaccgcttctttgagaacccagccctgtgggagctgctcttccacagcatccatgatgctgtgctgggcagccagctgcgggaggccctggccgagcaggaggccagcgccccacccagccaggaggacctggagcccaatgccaccccagccaccccagaggcctag

SEQ ID NO: 170554 - DNA, 2241 bp, synthetic construct
  misc_feature 1..2241: note = Description of Artificial Sequence: Synthetic coding sequence
  source 1..2241: mol_type = other DNA
atggaccacgccgaggagaatgagatcctggccgccacccagcgctactacgtggagcggcccatcttcagccaccctgtgctgcaggagcggctgcacaccaaggacaaggtgcctgacagcattgctgacaagctgaagcaggccttcacctgcacccccaagaagatccggaacatcatctacatgttcctgcccatcaccaagtggctgcctgcctacaagttcaaggagtatgtgctgggggacctggtgtctggcatcagcactggagtgctgcagctgccccagggcctggcctttgccatgctggccgctgtgccccccatcttcggcctgtacagcagcttctaccctgtgatcatgtactgcttcctgggcaccagccgccacatcagcatcggcccctttgctgtgatcagcctgatgattggaggagtggccgtgcggctggtgcctgatgacatcgtcatccctggaggagtgaatgccaccaacggcacagaggccagagatgccctgcgggtgaaggtggccatgtctgtgaccctgctgagcggcatcatccagttctgcctgggcgtgtgccgcttcggctttgtggccatctacctgacagagcccctggtgcggggcttcaccacagctgctgctgtgcacgtgttcacctccatgctgaagtacctgtttggagtgaagaccaagcgctacagcggcatcttctctgtggtgtacagcacagtggccgtgctgcagaatgtgaagaacctgaatgtgtgcagcctgggcgtgggcctgatggtgtttggcctgctgctgggcggcaaggagttcaatgaacgcttcaaggagaagctgcctgcccccatccccctggagttctttgctgtggtgatgggcaccggcatctctgctggcttcaacctgaaggagagctacaacgtggatgtggtgggcaccctgcccctgggcctgctgcccccagccaacccagacaccagcctcttccacctggtgtatgtggatgccatcgccatcgccatcgtgggcttctctgtgaccatctccatggccaagaccctggccaacaagcacggctaccaggtggatggcaaccaggagctgattgccctgggcctgtgcaacagcatcggcagcctcttccagaccttcagcatcagctgcagcctgagccgcagcctggtgcaggagggcaccggcggcaagacccagctggccggctgcctggccagcctgatgatcctgctggtgatcctggccaccggcttcctgtttgagagcctgccccaggccgtgctgagcgccatcgtgattgtgaacctgaagggcatgttcatgcagttcagtgacctgcccttcttctggaggaccagcaagattgagctgaccatctggctgaccacctttgtgagcagcctcttcctgggcctggactatggcctcatcacagctgtgatcatcgccctgctgaccgtcatctaccgcacccagagccccagctacaaggtgctgggcaagctgcctgagacagatgtgtacattgatattgatgcctatgaggaggtgaaggagatccctggcatcaagatcttccagatcaatgcccccatctactatgccaacagcgacctgtacagcaatgccctgaagaggaagacaggagtgaacccagctgtgatcatgggcgcccggaggaaggccatgaggaaatatgccaaggaggtgggcaatgccaacatggccaatgccaccgtggtgaaggccacccaggatgctgaggtggatggagaagatgccaccaagccagaggaggaggatggagaggtgaagtacccacccatcgtcatcaagagcaccttccctgaggagatgcagcgcttcatgcctcctggggacaacgtgcacacagtcatcctggacttcacccaggtgaacttcatcgacagcgtgggcgtgaagaccctggccggcatcgtgaaggagtatggagatgtgggcatctacgtgtacctggccggctgcagcgcccaggtggtgaatgacctgaccaggaaccgcttctttgagaacccagccctgtgggagctgctcttccacagcatccatgatgctgtgctgggcagccagctgcgggaggccctggccgagcaggaggccagcgccccacccagccaggaggacctggagcccaatgccaccccagccaccccagaggcctag

SEQ ID NO: 170555 - DNA, 2124 bp, synthetic construct
  misc_feature 1..2124: note = Description of Artificial Sequence: Synthetic coding sequence
  source 1..2124: mol_type = other DNA
atggaccacgccgaggagaatgagatcctggccgccacccagcgctactacgtggagcggcccatcttcagccaccctgtgctgcaggagcggctgcacaccaaggacaaggtgcctgacagcattgctgacaagctgaagcaggccttcacctgcacccccaagaagatccggaacatcatctacatgttcctgcccatcaccaagtggctgcctgcctacaagttcaaggagtatgtgctgggggacctggtgtctggcatcagcactggagtgctgcagctgccccagggcccctttgctgtgatcagcctgatgattggaggagtggccgtgcggctggtgcctgatgacatcgtcatccctgggggcgtgaatgccaccaatggaacagaggccagagatgccctgcgggtgaaggtggccatgtctgtgaccctgctgagcggcatcatccagttctgcctgggcgtgtgccgctttggatttgtggccatctacctgacagagcccctggtgcggggcttcaccacagctgctgctgtgcacgtgttcacctccatgctgaagtacctgtttggagtgaagaccaagcgctacagcggcatcttctctgtggtgtacagcacagtggccgtgctgcagaatgtgaagaacctgaatgtgtgcagcctgggcgtgggcctgatggtgtttggcctgctgctgggcggcaaggagttcaatgaacgcttcaaggagaagctgcctgcccccatccccctggagttctttgctgtggtgatgggcaccggcatctctgctggcttcaacctgaaggagagctacaacgtggatgtggtgggcaccctgcccctgggcctgctgcccccagccaacccagacaccagcctcttccacctggtgtatgtggatgccatcgccatcgccatcgtgggcttctctgtgaccatctccatggccaagaccctggccaacaagcacggctaccaggtggatggcaaccaggagctgattgccctgggcctgtgcaacagcatcggcagcctcttccagaccttcagcatcagctgcagcctgagccgcagcctggtgcaggagggcactggaggcaagacccagctggccggctgcctggccagcctgatgatcctgctggtgatcctggccaccggcttcctgtttgagagcctgccccaggccgtgctgagcgccatcgtcatcgtgaacctgaagggcatgttcatgcagttcagtgacctgcccttcttctggaggaccagcaagattgagctgaccatctggctgaccacctttgtgagcagcctcttcctgggcctggactatggcctcatcacagctgtgatcatcgccctgctgaccgtcatctaccgcacccagagccccagctacaaggtgctgggcaagctgcctgagacagatgtgtacatcgacattgatgcctatgaggaggtgaaggagatccctggcatcaagatcttccagatcaatgcccccatctactatgccaacagcgacctgtacagcaatgccctgaagaggaagacaggagtgaacccagctgtgatcatgggcgcccggaggaaggccatgaggaaatatgccaaggaggtgggcaatgccaacatggccaatgccaccgtggtgaaggcagatgctgaggtggatggagaagatgccaccaagccagaggaggaggatggagaggtgaagtacccacccatcgtcatcaagagcaccttccctgaggagatgcagcgcttcatgcctcctggggacaacgtgcacacagtcatcctggacttcacccaggtgaacttcattgattctgtgggcgtgaagaccctggccggcatcgtgaaggagtatggagatgtgggcatctacgtgtacctggccggctgcagcgcccaggtggtgaatgacctgaccaggaaccgcttctttgaaaatcctgccctgtgggagctgctcttccacagcatccatgatgctgtgctgggcagccagctgcgggaggccctggccgagcaggaggccagcgccccacccagccaggaggacctggagcccaatgccaccccagccaccccagaggcctag

SEQ ID NO: 170556 - DNA, 2139 bp, synthetic construct
  misc_feature 1..2139: note = Description of Artificial Sequence: Synthetic coding sequence
  source 1..2139: mol_type = other DNA
atggaccacgccgaggagaatgagatcctggccgccacccagcgctactacgtggagcggcccatcttcagccaccctgtgctgcaggagcggctgcacaccaaggacaaggtgcctgacagcattgctgacaagctgaagcaggccttcacctgcacccccaagaagatccggaacatcatctacatgttcctgcccatcaccaagtggctgcctgcctacaagttcaaggagtatgtgctgggggacctggtgtctggcatcagcactggagtgctgcagctgccccagggcctggcctttgccatgctggccgctgtgccccccatcttcggcctgtacagcagcttctaccctgtgatcatgtactgcttcctgggcaccagccgccacatcagcatcggcccctttgctgtgatcagcctgatgattggaggagtggccgtgcggctggtgcctgatgacatcgtcatccctggaggagtgaatgccaccaacggcacagaggccagagatgccctgcgggtgaaggtggccatgtctgtgaccctgctgagcggcatcatccagttctgcctgggcgtgtgccgcttcggctttgtggccatctacctgacagagcccctggtgcggggcttcaccacagctgctgctgtgcacgtgttcacctccatgctgaagtacctgtttggagtgaagaccaagcgctacagcggcatcttctctgtggtgtacagcacagtggccgtgctgcagaatgtgaagaacctgaatgtgtgcagcctgggcgtgggcctgatggtgtttggcctgctgctgggcggcaaggagttcaatgaacgcttcaaggagaagctgcctgcccccatccccctggagttctttgctgtggtgatgggcaccggcatctctgctggcttcaacctgaaggagagctacaacgtggatgtggtgggcaccctgcccctgggcctgctgcccccagccaacccagacaccagcctcttccacctggtgtatgtggatgccatcgccatcgccatcgtgggcttctctgtgaccatctccatggccaagaccctggccaacaagcacggctaccaggtggatggcaaccaggagctgattgccctgggcctgtgcaacagcatcggcagcctcttccagaccttcagcatcagctgcagcctgagccgcagcctggtgcaggagggcaccggcggcaagacccagctggccggctgcctggccagcctgatgatcctgctggtgatcctggccaccggcttcctgtttgagagcctgccccagaccatctggctgaccacctttgtgagcagcctcttcctgggcctggactatggcctcatcacagctgtgatcatcgccctgctgaccgtcatctaccgcacccagagccccagctacaaggtgctgggcaagctgcctgagacagatgtgtacattgatattgatgcctatgaggaggtgaaggagatccctggcatcaagatcttccagatcaatgcccccatctactatgccaacagcgacctgtacagcaatgccctgaagaggaagacaggagtgaacccagctgtgatcatgggcgcccggaggaaggccatgaggaaatatgccaaggaggtgggcaatgccaacatggccaatgccaccgtggtgaaggcagatgctgaggtggatggagaagatgccaccaagccagaggaggaggatggagaggtgaagtacccacccatcgtcatcaagagcaccttccctgaggagatgcagcgcttcatgcctcctggggacaacgtgcacacagtcatcctggacttcacccaggtgaacttcatcgacagcgtgggcgtgaagaccctggccggcatcgtgaaggagtatggagatgtgggcatctacgtgtacctggccggctgcagcgcccaggtggtgaatgacctgaccaggaaccgcttctttgagaacccagccctgtgggagctgctcttccacagcatccatgatgctgtgctgggcagccagctgcgggaggccctggccgagcaggaggccagcgccccacccagccaggaggacctggagcccaatgccaccccagccaccccagaggcctag

SEQ ID NO: 170557 - DNA, 1551 bp, synthetic construct
  misc_feature 1..1551: note = Description of Artificial Sequence: Synthetic coding sequence
  source 1..1551: mol_type = other DNA
atggaccacgccgaggagaatgagatcctggccgccacccagcgctactacgtggagcggcccatcttcagccaccctgtgctgcaggagcggctgcacaccaaggacaaggtgcctgacagcattgctgacaagctgaagcaggccttcacctgcacccccaagaagatccggaacatcatctacatgttcctgcccatcaccaagtggctgcctgcctacaagttcaaggagtatgtgctgggggacctggtgtctggcatcagcactggagtgctgcagctgccccagggcctggcctttgccatgctggccgctgtgccccccatcttcggcctgtacagcagcttctaccctgtgatcatgtactgcttcctgggcaccagccgccacatcagcatcggcccctttgctgtgatcagcctgatgattggaggagtggccgtgcggctggtgcctgatgacatcgtcatccctggaggagtgaatgccaccaacggcacagaggccagagatgccctgcgggtgaaggtggccatgtctgtgaccctgctgagcggcatcatccagttctgcctgggcgtgtgccgcttcggctttgtggccatctacctgacagagcccctggtgcggggcttcaccacagctgctgctgtgcacgtgttcacctccatgctgaagtacctgtttggagtgaagaccaagcgctacagcggcatcttctctgtggtgtacagcacagtggccgtgctgcagaatgtgaagaacctgaatgtgtgcagcctgggcgtgggcctgatggtgtttggcctgctgctgggcggcaaggagttcaatgaacgcttcaaggagaagctgcctgcccccatccccctggagttctttgctgtggtgatgggcaccggcatctctgctggcttcaacctgaaggagagctacaacgtggatgtggtgggcaccctgcccctgggcctgctgcccccagccaacccagacaccagcctcttccacctggtgtatgtggatgccatcgccatcgccatcgtgggcttctctgtgaccatctccatggccaagaccctggccaacaagcacggctaccaggtggatggcaaccaggagctgattgccctgggcctgtgcaacagcatcggcagcctcttccagaccttcagcatcagctgcagcctgagccgcagcctggtgcaggagggcaccggcggcaagacccagctggccggctgcctggccagcctgatgatcctgctggtgatcctggccaccggcttcctgtttgagagcctgccccaggccgtgctgagcgccatcgtgattgtgaacctgaagggcatgttcatgcagttcagtgacctgcccttcttctggaggaccagcaagattgagctgaccatctggctgaccacctttgtgagcagcctcttcctgggcctggactatggcctcatcacagctgtgatcatcgccctgctgaccgtcatctaccgcacccagagcttccacacagagatgacccggcgctggaggccctag

SEQ ID NO: 170558 - DNA, 1422 bp, synthetic construct
  misc_feature 1..1422: note = Description of Artificial Sequence: Synthetic coding sequence
  source 1..1422: mol_type = other DNA
atggaccacgccgaggagaatgagatcctggccgccacccagcgctactacgtggagcggcccatcttcagccaccctgtgctgcaggagcggctgcacaccaaggacaaggtgcctgacagcattgctgacaagctgaagcaggccttcacctgcacccccaagaagatccggaacatcatctacatgttcctgcccatcaccaagtggctgcctgcctacaagttcaaggagtatgtgctgggggacctggtgtctggcatcagcactggagtgctgcagctgccccagggcctggcctttgccatgctggccgctgtgccccccatcttcggcctgtacagcagcttctaccctgtgatcatgtactgcttcctgggcaccagccgccacatcagcatcggcccctttgctgtgatcagcctgatgattggaggagtggccgtgcggctggtgcctgatgacatcgtcatccctggaggagtgaatgccaccaacggcacagaggccagagatgccctgcgggtgaaggtggccatgtctgtgaccctgctgagcggcatcatccagttctgcctgggcgtgtgccgcttcggctttgtggccatctacctgacagagcccctggtgcggggcttcaccacagctgctgctgtgcacgtgttcacctccatgctgaagtacctgtttggagtgaagaccaagcgctacagcggcatcttctctgtggtgtacagcacagtggccgtgctgcagaatgtgaagaacctgaatgtgtgcagcctgggcgtgggcctgatggtgtttggcctgctgctgggcggcaaggagttcaatgaacgcttcaaggagaagctgcctgcccccatccccctggagttctttgctgtggtgatgggcaccggcatctctgctggcttcaacctgaaggagagctacaacgtggatgtggtgggcaccctgcccctgggcctgctgcccccagccaacccagacaccagcctcttccacctggtgtatgtggatgccatcgccatcgccatcgtgggcttctctgtgaccatctccatggccaagaccctggccaacaagcacggctaccaggtggatggcaaccaggagctgattgccctgggcctgtgcaacagcatcggcagcctcttccagaccttcagcatcagctgcagcctgagccgcagcctggtgcaggagggcaccggcggcaagacccagctggccggctgcctggccagcctgatgatcctgctggtgatcctggccaccggcttcctgtttgagagcctgccccagaccatctggctgaccacctttgtgagcagcctcttcctgggcctggactatggcctcatcacagctgtgatcatcgccctgctgaccgtcatctaccgcacccagaggtag

SEQ ID NO: 170559 - DNA, 2139 bp, synthetic construct; identical to SEQ ID NO: 170556
  misc_feature 1..2139: note = Description of Artificial Sequence: Synthetic coding sequence
  source 1..2139: mol_type = other DNA

SEQ ID NO: 170560 - DNA, 1344 bp, synthetic construct
  misc_feature 1..1344: note = Description of Artificial Sequence: Synthetic coding sequence
  source 1..1344: mol_type = other DNA
atggaccacgccgaggagaatgagatcctggccgccacccagcgctactacgtggagcggcccatcttcagccaccctgtgctgcaggagcggctgcacaccaaggacaaggtgcctgacagcattgctgacaagctgaagcaggccttcacctgcacccccaagaagatccggaacatcatctacatgttcctgcccatcaccaagtggctgcctgcctacaagttcaaggagtatgtgctgggggacctggtgtctggcatcagcactggagtgctgcagctgccccagggcctggcctttgccatgctggccgctgtgccccccatcttcggcctgtacagcagcttctaccctgtgatcatgtactgcttcctgggcaccagccgccacatcagcatcggcccctttgctgtgatcagcctgatgattggaggagtggccgtgcggctggtgcctgatgacatcgtcatccctggaggagtgaatgccaccaacggcacagaggccagagatgccctgcgggtgaaggtggccatgtctgtgaccctgctgagcggcatcatccagttctgcctgggcgtgtgccgcttcggctttgtggccatctacctgacagagcccctggtgcggggcttcaccacagctgctgctgtgcacgtgttcacctccatgctgaagtacctgtttggagtgaagaccaagcgctacagcggcatcttctctgtggtgtacagcacagtggccgtgctgcagaatgtgaagaacctgaatgtgtgcagcctgggcgtgggcctgatggtgtttggcctgctgctgggcggcaaggagttcaatgaacgcttcaaggagaagctgcctgcccccatccccctggagttctttgctgtggtgatgggcaccggcatctctgctggcttcaacctgaaggagagctacaacgtggatgtggtgggcaccctgcccctgggcctgctgcccccagccaacccagacaccagcctcttccacctggtgtatgtggatgccatcgccatcgccatcgtgggcttctctgtgaccatctccatggccaagaccctggccaacaagcacggctaccaggtggatggcaaccaggagctgattgccctgggcctgtgcaacagcatcggcagcctcttccagaccttcagcatcagctgcagcctgagccgcagcctggtgcaggagggcaccggcggcaagacccagaccatctggctgaccacctttgtgagcagcctcttcctgggcctggactatggcctcatcacagctgtgatcatcgccctgctgaccgtcatctaccgcacccagaggtag

SEQ ID NO: 170561 - DNA, 1956 bp, synthetic construct
  misc_feature 1..1956: note = Description of Artificial Sequence: Synthetic coding sequence
  source 1..1956: mol_type = other DNA
atgggcctggctgatgccagcggcccccgggacacccaggccctgctgagcgccacccaggccatggacctgcggcggcgggactaccacatggagcggcccctgctgaaccaggagcacctggaggagctgggccgctggggcagcgcccccaggacccaccagtggaggacctggctgcagtgcagccgggcccgggcctatgccctgctgctgcagcacctgcctgtgctggtgtggctgccccgctaccctgtgcgggactggctgctgggggacctgctgagcggcctgtctgtggccatcatgcagctgccccagggcctggcctatgccctgctggccggcctgccccctgtgtttggcctgtacagcagcttctaccctgtgttcatctacttcctgtttggcaccagccgccacatctctgtggtgctggaggtgtgctggaagctgccccagagcaaggtgggcaccgtggtgacagctgctgtggccggcgtggtgctggtggtggtgaagctgctgaatgacaagctgcagcagcagctgcccatgcccatccctggagagctgctgaccctcatcggggccaccggcatctcctatggcatgggcctgaagcacagatttgaggtggatgtggtgggcaacatcccagctggcctggtgccccctgtggcccccaacacccagctgttcagcaagctggtgggcagcgccttcaccatcgctgtggtgggctttgccatcgccatcagcctgggcaagatctttgccctgcggcacggctacagagtggacagcaaccaggagctggtggccctgggcctgagcaacctgattggaggcatcttccagtgcttccctgtgtcctgcagcatgagccgcagcctggtgcaggagagcactggaggcaacagccaggtggccggggccatcagcagcctcttcatcctgctgatcatcgtgaagctgggggagctgttccatgacctgcccaaggctgtgctggccgccatcatcatcgtgaacctgaagggcatgctgcggcagctgagtgacatgaggagcctgtggaaggccaacagagctgacctgctgatctggctggtgaccttcaccgccaccatcctgctgaacctggacctgggcctggtggtggccgtcatcttcagcctgctgctggtggtggtgaggacccagatgccccactacagcgtgctgggccaggtgcctgacacagacatctacagagatgtggccgagtacagcgaggccaaggaggtgcggggcgtgaaggtgttccgcagcagcgccaccgtgtactttgccaatgctgagttctacagtgatgccctgaagcagagatgtggggtggatgtggacttcctgatcagccagaagaagaagctgctgaagaagcaggagcagctgaagctgaagcagctgcagaaggaggagaagctgaggaagcaggccgccagccccaagggggcctctgtgtccatcaacgtgaacaccagcctggaggacatgaggagcaacaacgtggaggactgcaagatgatggtgtcctctggggacaagatggaggatgccacagccaacggccaggaggacagcaaggccccagatggcagcaccctgaaggccctgggcctgccccagcctgacttccacagcctcatcctggacctgggcgccctgagctttgtggacacagtgtgcctgaagagcctgaagaacatcttccatgacttccgggagattgaggtggaggtgtacatggccgcctgccacagccctgtggtgtcccagctggaggccggccacttctttgatgccagcatcaccaagaagcacctgtttgcctctgtgcatgatgctgtgacctttgccctgcagcaccccaggcctgtgcctgacagccctgtgtctgtgacccggctgtag

SEQ ID NO: 170562 - DNA, 2217 bp, synthetic construct
  misc_feature 1..2217: note = Description of Artificial Sequence: Synthetic coding sequence
  source 1..2217: mol_type = other DNA
atggacctgcggcggcgggactaccacatggagcggcccctgctgaaccaggagcacctggaggagctgggccgctggggcagcgcccccaggacccaccagtggaggacctggctgcagtgcagccgggcccgggcctatgccctgctgctgcagcacctgcctgtgctggtgtggctgccccgctaccctgtgcgggactggctgctgggggacctgctgagcggcctgtctgtggccatcatgcagctgccccagggcctggcctatgccctgctggccggcctgccccctgtgtttggcctgtacagcagcttctaccctgtgttcatctacttcctgtttggcaccagccgccacatctctgtgggcacctttgctgtgatgtctgtgatggtgggctctgtgacagagagcctggccccccaggccctgaatgacagcatgatcaatgaaacagccagagatgctgcccgggtgcaggtggccagcaccctgtctgtgctggtgggcctcttccaggtgggcctgggcctcatccacttcggctttgtggtgacctacctgtctgagcccctggtgcggggctacaccacagctgctgctgtgcaggtgtttgtgtcccagctgaagtatgtgtttggcctgcacctgagcagccacagcggccccctgagcctcatctacacagtgctggaggtgtgctggaagctgccccagagcaaggtgggcaccgtggtgacagctgctgtggccggcgtggtgctggtggtggtgaagctgctgaatgacaagctgcagcagcagctgcccatgcccatccctggagagctgctgaccctcatcggggccaccggcatctcctatggcatgggcctgaagcacagatttgaggtggatgtggtgggcaacatcccagctggcctggtgccccctgtggcccccaacacccagctgttcagcaagctggtgggcagcgccttcaccatcgctgtggtgggctttgccatcgccatcagcctgggcaagatctttgccctgcggcacggctacagagtggacagcaaccaggagctggtggccctgggcctgagcaacctgattggaggcatcttccagtgcttccctgtgtcctgcagcatgagccgcagcctggtgcaggagagcactggaggcaacagccaggtggccggggccatcagcagcctcttcatcctgctgatcatcgtgaagctgggggagctgttccatgacctgcccaaggctgtgctggccgccatcatcatcgtgaacctgaagggcatgctgcggcagctgagtgacatgaggagcctgtggaaggccaacagagctgacctgctgatctggctggtgaccttcaccgccaccatcctgctgaacctggacctgggcctggtggtggccgtcatcttcagcctgctgctggtggtggtgaggacccagatgccccactacagcgtgctgggccaggtgcctgacacagacatctacagagatgtggccgagtacagcgaggccaaggaggtgcggggcgtgaaggtgttccgcagcagcgccaccgtgtactttgccaatgctgagttctacagtgatgccctgaagcagagatgtggggtggatgtggacttcctgatcagccagaagaagaagctgctgaagaagcaggagcagctgaagctgaagcagctgcagaaggaggagaagctgaggaagcaggccgccagccccaagggggcctctgtgtccatcaacgtgaacaccagcctggaggacatgaggagcaacaacgtggaggactgcaagatgatgcaggtgagcagcggggacaagatggaggatgccacagccaacggccaggaggacagcaaggccccagatggcagcaccctgaaggccctgggcctgccccagcctgacttccacagcctcatcctggacctgggcgccctgagctttgtggacacagtgtgcctgaagagcctgaagaacatcttccatgacttccgggagattgaggtggaggtgtacatggccgcctgccacagccctgtggtgtcccagctggaggccggccacttctttgatgccagcatcaccaagaagcacctgtttgcctctgtgcatgatgctgtgacctttgccctgcagcaccccaggcctgtgcctgacagccctgtgtctgtgacccggctgtag

SEQ ID NO: 170563 - DNA, 2223 bp, synthetic construct
  misc_feature 1..2223: note = Description of Artificial Sequence: Synthetic coding sequence
  source 1..2223: mol_type = other DNA
atgggcctggctgatgccagcggcccccgggacacccaggccctgctgagcgccacccaggccatggacctgcggcggcgggactaccacatggagcggcccctgctgaaccaggagcacctggaggagctgggccgctggggcagcgcccccaggacccaccagtggaggacctggctgcagtgcagccgggcccgggcctatgccctgctgctgcagcacctgcctgtgctggtgtggctgccccgctaccctgtgcgggactggctgctgggggacctgctgagcggcctgtctgtggccatcatgcagctgccccagggcctggcctatgccctgctggccggcctgccccctgtgtttggcctgtacagcagcttctaccctgtgttcatctacttcctgtttggcaccagccgccacatctctgtgggcacctttgctgtgatgtctgtgatggtgggctctgtgacagagagcctggccccccaggccctgaatgacagcatgatcaatgaaacagccagagatgctgcccgggtgcaggtggccagcaccctgtctgtgctggtgggcctcttccaggtgggcctgggcctcatccactttggatttgtggtgacctacctgtctgagcccctggtgcggggctacaccacagctgctgctgtgcaggtgtttgtgtcccagctgaagtatgtgtttggcctgcacctgagcagccacagcggccccctgagcctcatctacacagtgctggaggtgtgctggaagctgccccagagcaaggtgggcaccgtggtgacagctgctgtggccggcgtggtgctggtggtggtgaagctgctgaatgacaagctgcagcagcagctgcccatgcccatccctggagagctgctgaccctgattggagccaccggcatctcctatggcatgggcctgaagcacagatttgaggtggatgtggtgggcaacatcccagctggcctggtgccccctgtggcccccaacacccagctgttcagcaagctggtgggcagcgccttcaccatcgctgtggtgggctttgccatcgccatcagcctgggcaagatctttgccctgcggcacggctacagagtggacagcaaccaggagctggtggccctgggcctgagcaacctgattggaggcatcttccagtgcttccctgtgtcctgcagcatgagccgcagcctggtgcaggagagcactggaggcaacagccaggtggccggggccatcagcagcctcttcatcctgctgatcatcgtgaagctgggggagctgttccatgacctgcccaaggctgtgctggccgccatcatcatcgtgaacctgaagggcatgctgcggcagctgagtgacatgaggagcctgtggaaggccaacagagctgacctgctgatctggctggtgaccttcaccgccaccatcctgctgaacctggacctgggcctggtggtggccgtcatcttcagcctgctgctggtggtggtgaggacccagatgccccactacagcgtgctgggccaggtgcctgacacagacatctacagagatgtggccgagtacagcgaggccaaggaggtgcggggcgtgaaggtgttccgcagcagcgccaccgtgtactttgccaatgctgagttctacagtgatgccctgaagcagagatgtggggtggatgtggacttcctgatcagccagaagaagaagctgctgaagaagcaggagcagctgaagctgaagcagctgcagaaggaggagaagctgaggaagcaggccggccccctgctgagcgcctgcctggccccccagcaggtgagcagcggggacaagatggaggatgccacagccaacggccaggaggacagcaaggccccagatggcagcaccctgaaggccctgggcctgccccagcctgacttccacagcctcatcctggacctgggcgccctgagctttgtggacacagtgtgcctgaagagcctgaagaacatcttccatgacttccgggagattgaggtggaggtgtacatggccgcctgccacagccctgtggtgtcccagctggaggccggccacttctttgatgccagcatcaccaagaagcacctgtttgcctctgtgcatgatgctgtgacctttgccctgcagcaccccaggcctgtgcctgacagccctgtgtctgtgacccggctgtag

SEQ ID NO: 170564 - DNA, 2280 bp, synthetic construct
  misc_feature 1..2280: note = Description of Artificial Sequence: Synthetic coding sequence
  source 1..2280: mol_type = other DNA
atgggcctggctgatgccagcggcccccgggacacccaggccctgctgagcgccacccaggccatggacctgcggcggcgggactaccacatggagcggcccctgctgaaccaggagcacctggaggagctgggccgctggggcagcgcccccaggacccaccagtggaggacctggctgcagtgcagccgggcccgggcctatgccctgctgctgcagcacctgcctgtgctggtgtggctgccccgctaccctgtgcgggactggctgctgggggacctgctgagcggcctgtctgtggccatcatgcagctgccccagggcctggcctatgccctgctggccggcctgccccctgtgtttggcctgtacagcagcttctaccctgtgttcatctacttcctgtttggcaccagccgccacatctctgtgggcacctttgctgtgatgtctgtgatggtgggctctgtgacagagagcctggccccccaggccctgaatgacagcatgatcaatgaaacagccagagatgctgcccgggtgcaggtggccagcaccctgtctgtgctggtgggcctcttccaggtgggcctgggcctcatccactttggatttgtggtgacctacctgtctgagcccctggtgcggggctacaccacagctgctgctgtgcaggtgtttgtgtcccagctgaagtatgtgtttggcctgcacctgagcagccacagcggccccctgagcctcatctacacagtgctggaggtgtgctggaagctgccccagagcaaggtgggcaccgtggtgacagctgctgtggccggcgtggtgctggtggtggtgaagctgctgaatgacaagctgcagcagcagctgcccatgcccatccctggagagctgctgaccctgattggagccaccggcatctcctatggcatgggcctgaagcacagatttgaggtggatgtggtgggcaacatcccagctggcctggtgccccctgtggcccccaacacccagctgttcagcaagctggtgggcagcgccttcaccatcgctgtggtgggctttgccatcgccatcagcctgggcaagatctttgccctgcggcacggctacagagtggacagcaaccaggagctggtggccctgggcctgagcaacctgattggaggcatcttccagtgcttccctgtgtcctgcagcatgagccgcagcctggtgcaggagagcactggaggcaacagccaggtggccggggccatcagcagcctcttcatcctgctgatcatcgtgaagctgggggagctgttccatgacctgcccaaggctgtgctggccgccatcatcatcgtgaacctgaagggcatgctgcggcagctgagtgacatgaggagcctgtggaaggccaacagagctgacctgctgatctggctggtgaccttcaccgccaccatcctgctgaacctggacctgggcctggtggtggccgtcatcttcagcctgctgctggtggtggtgaggacccagatgccccactacagcgtgctgggccaggtgcctgacacagacatctacagagatgtggccgagtacagcgaggccaaggaggtgcggggcgtgaaggtgttccgcagcagcgccaccgtgtactttgccaatgctgagttctacagtgatgccctgaagcagagatgtggggtggatgtggacttcctgatcagccagaagaagaagctgctgaagaagcaggagcagctgaagctgaagcagctgcagaaggaggagaagctgaggaagcaggccgccagccccaagggggcctctgtgtccatcaacgtgaacaccagcctggaggacatgaggagcaacaacgtggaggactgcaagatgatgcaggtgtcctctggggacaagatggaggatgccacagccaacggccaggaggacagcaaggccccagatggcagcaccctgaaggccctgggcctgccccagcctgacttccacagcctcatcctggacctgggcgccctgagctttgtggacacagtgtgcctgaagagcctgaagaacatcttccatgacttccgggagattgaggtggaggtgtacatggccgcctgccacagccctgtggtgtcccagctggaggccggccacttctttgatgccagcatcaccaagaagcacctgtttgcctctgtgcatgatgctgtgacctttgccctgcagcaccccaggcctgtgcctgacagccctgtgtctgtgacccggctgtag

SEQ ID NO: 170565 - DNA, 2277 bp, synthetic construct
  misc_feature 1..2277: note = Description of Artificial Sequence: Synthetic coding sequence
  source 1..2277: mol_type = other DNA
atgggcctggctgatgccagcggcccccgggacacccaggccctgctgagcgccacccaggccatggacctgcggcggcgggactaccacatggagcggcccctgctgaaccaggagcacctggaggagctgggccgctggggcagcgcccccaggacccaccagtggaggacctggctgcagtgcagccgggcccgggcctatgccctgctgctgcagcacctgcctgtgctggtgtggctgccccgctaccctgtgcgggactggctgctgggggacctgctgagcggcctgtctgtggccatcatgcagctgccccagggcctggcctatgccctgctggccggcctgccccctgtgtttggcctgtacagcagcttctaccctgtgttcatctacttcctgtttggcaccagccgccacatctctgtgggcacctttgctgtgatgtctgtgatggtgggctctgtgacagagagcctggccccccaggccctgaatgacagcatgatcaatgaaacagccagagatgctgcccgggtgcaggtggccagcaccctgtctgtgctggtgggcctcttccaggtgggcctgggcctcatccactttggatttgtggtgacctacctgtctgagcccctggtgcggggctacaccacagctgctgctgtgcaggtgtttgtgtcccagctgaagtatgtgtttggcctgcacctgagcagccacagcggccccctgagcctcatctacacagtgctggaggtgtgctggaagctgccccagagcaaggtgggcaccgtggtgacagctgctgtggccggcgtggtgctggtggtggtgaagctgctgaatgacaagctgcagcagcagctgcccatgcccatccctggagagctgctgaccctgattggagccaccggcatctcctatggcatgggcctgaagcacagatttgaggtggatgtggtgggcaacatcccagctggcctggtgccccctgtggcccccaacacccagctgttcagcaagctggtgggcagcgccttcaccatcgctgtggtgggctttgccatcgccatcagcctgggcaagatctttgccctgcggcacggctacagagtggacagcaaccaggagctggtggccctgggcctgagcaacctgattggaggcatcttccagtgcttccctgtgtcctgcagcatgagccgcagcctggtgcaggagagcactggaggcaacagccaggtggccggggccatcagcagcctcttcatcctgctgatcatcgtgaagctgggggagctgttccatgacctgcccaaggctgtgctggccgccatcatcatcgtgaacctgaagggcatgctgcggcagctgagtgacatgaggagcctgtggaaggccaacagagctgacctgctgatctggctggtgaccttcaccgccaccatcctgctgaacctggacctgggcctggtggtggccgtcatcttcagcctgctgctggtggtggtgaggacccagatgccccactacagcgtgctgggccaggtgcctgacacagacatctacagagatgtggccgagtacagcgaggccaaggaggtgcggggcgtgaaggtgttccgcagcagcgccaccgtgtactttgccaatgctgagttctacagtgatgccctgaagcagagatgtggggtggatgtggacttcctgatcagccagaagaagaagctgctgaagaagcaggagcagctgaagctgaagcagctgcagaaggaggagaagctgaggaagcaggccgccagccccaagggggcctctgtgtccatcaacgtgaacaccagcctggaggacatgaggagcaacaacgtggaggactgcaagatgatggtgagcagcggggacaagatggaggatgccacagccaacggccaggaggacagcaaggccccagatggcagcaccctgaaggccctgggcctgccccagcctgacttccacagcctcatcctggacctgggcgccctgagctttgtggacacagtgtgcctgaagagcctgaagaacatcttccatgacttccgggagattgaggtggaggtgtacatggccgcctgccacagccctgtggtgtcccagctggaggccggccacttctttgatgccagcatcaccaagaagcacctgtttgcctctgtgcatgatgctgtgacctttgccctgcagcaccccaggcctgtgcctgacagccctgtgtctgtgacccggctgtag

SEQ ID NO: 170566 - DNA, 2262 bp, synthetic construct
  misc_feature 1..2262: note = Description of Artificial Sequence: Synthetic coding sequence
  source 1..2262: mol_type = other DNA
atgggcctggctgatgccagcggcccccgggacacccaggccctgctgagcgccacccaggccatggacctgcggcggcgggactaccacatggagcggcccctgctgaaccaggagcacctggaggagctgggccgctggggcagcgcccccaggacccaccagtggaggacctggctgcagtgcagccgggcccgggcctatgccctgctgctgcagcacctgcctgtgctggtgtggctgccccgctaccctgtgcgggactggctgctgggggacctgctgagcggcctgtctgtggccatcatgcagctgccccaggacctgctgagccggctgcactgctaccacagcaccctgggcctggcctatgccctgctggccggcctgccccctgtgtttggcctgtacagcagcttctaccctgtgttcatctacttcctgtttggcaccagccgccacatctctgtgggcacctttgctgtgatgtctgtgatggtgggctctgtgacagagagcctggccccccaggccctgaatgacagcatgatcaatgaaacagccagagatgctgcccgggtgcaggtggccagcaccctgtctgtgctggtgggcctcttccaggtgggcctgggcctcatccacttcggctttgtggtgacctacctgtctgagcccctggtgcggggctacaccacagctgctgctgtgcaggtgtttgtgtcccagctgaagtatgtgtttggcctgcacctgagcagccacagcggccccctgagcctcatctacacagtgctggaggtgtgctggaagctgccccagagcaaggtgggcaccgtggtgacagctgctgtggccggcgtggtgctggtggtggtgaagctgctgaatgacaagctgcagcagcagctgcccatgcccatccctggagagctgctgaccctcatcggggccaccggcatctcctatggcatgggcctgaagcacagatttgaggtggatgtggtgggcaacatcccagctggcctggtgccccctgtggcccccaacacccagctgttcagcaagctggtgggcagcgccttcaccatcgctgtggtgggctttgccatcgccatcagcctgggcaagatctttgccctgcggcacggctacagagtggacagcaaccaggagctggtggccctgggcctgagcaacctgattggaggcatcttccagtgcttccctgtgtcctgcagcatgagccgcagcctggtgcaggagagcactggaggcaacagccaggtggccggggccatcagcagcctcttcatcctgctgatcatcgtgaagctgggggagctgttccatgacctgcccaaggctgtgctggccgccatcatcatcgtgaacctgaagggcatgctgcggcagctgagtgacatgaggagcctgtggaaggccaacagagctgacctgctgatctggctggtgaccttcaccgccaccatcctgctgaacctggacctgggcctggtggtggccgtcatcttcagcctgctgctggtggtggtgaggacccagatgccccactacagcgtgctgggccaggtgcctgacacagacatctacagagatgtggccgagtacagcgaggccaaggaggtgcggggcgtgaaggtgttccgcagcagcgccaccgtgtactttgccaatgctgagttctacagtgatgccctgaagcagagatgtggggtggatgtggacttcctgatcagccagaagaagaagctgctgaagaagcaggagcagctgaagctgaagcagctgcagaaggaggagaagctgaggaagcaggccggccccctgctgagcgcctgcctggccccccagcaggtgtcctctggggacaagatggaggatgccacagccaacggccaggaggacagcaaggccccagatggcagcaccctgaaggccctgggcctgccccagcctgacttccacagcctcatcctggacctgggcgccctgagctttgtggacacagtgtgcctgaagagcctgaagaacatcttccatgacttccgggagattgaggtggaggtgtacatggccgcctgccacagccctgtggtgtcccagctggaggccggccacttctttgatgccagcatcaccaagaagcacctgtttgcctctgtgcatgatgctgtgacctttgccctgcagcaccccaggcctgtgcctgacagccctgtgtctgtgacccggctgtag

SEQ ID NO: 170567 - DNA, 2172 bp, synthetic construct
  misc_feature 1..2172: note = Description of Artificial Sequence: Synthetic coding sequence
  source 1..2172: mol_type = other DNA
atgggcctggctgatgccagcggcccccgggacacccaggccctgctgagcgccacccaggccatggacctgcggcggcgggactaccacatggagcggcccctgctgaaccaggagcacctggaggagctgggccgctggggcagcgcccccaggacccaccagtggaggacctggctgcagtgcagccgggcccgggcctatgccctgctgctgcagcacctgcctgtgctggtgtggctgccccgctaccctgtgcgggactggctgctgggggacctgctgagcggcctgtctgtggccatcatgcagctgccccagggcctggcctatgccctgctggccggcctgccccctgtgtttggcctgtacagcagcttctaccctgtgttcatctacttcctgtttggcaccagccgccacatctctgtggccaccccaggccccctgcccctgctgacagcccctggccggcccaccggcggggccggccctgaccccctgcggctgcggggccacctgcctgtgaggaccagctgcccccggctgtaccacagctgcagctgtgccggcctgcggctgacagcccaggtgtgtgtgtggccacccagcgagcagcccctgtgggccaccgtgccccacctgctgctggaggtgtgctggaagctgccccagagcaaggtgggcaccgtggtgacagctgctgtggccggcgtggtgctggtggtggtgaagctgctgaatgacaagctgcagcagcagctgcccatgcccatccctggagagctgctgaccctgattggagccaccggcatctcctatggcatgggcctgaagcacagatttgaggtggatgtggtgggcaacatcccagctggcctggtgccccctgtggcccccaacacccagctgttcagcaagctggtgggcagcgccttcaccatcgctgtggtgggctttgccatcgccatcagcctgggcaagatctttgccctgcggcacggctacagagtggacagcaaccaggagctggtggccctgggcctgagcaacctgattggaggcatcttccagtgcttccctgtgtcctgcagcatgagccgcagcctggtgcaggagagcactggaggcaacagccaggtggccggggccatcagcagcctcttcatcctgctgatcatcgtgaagctgggggagctgttccatgacctgcccaaggctgtgctggccgccatcatcatcgtgaacctgaagggcatgctgcggcagctgagtgacatgaggagcctgtggaaggccaacagagctgacctgctgatctggctggtgaccttcaccgccaccatcctgctgaacctggacctgggcctggtggtggccgtcatcttcagcctgctgctggtggtggtgaggacccagatgccccactacagcgtgctgggccaggtgcctgacacagacatctacagagatgtggccgagtacagcgaggccaaggaggtgcggggcgtgaaggtgttccgcagcagcgccaccgtgtactttgccaatgctgagttctacagtgatgccctgaagcagagatgtggggtggatgtggacttcctgatcagccagaagaagaagctgctgaagaagcaggagcagctgaagctgaagcagctgcagaaggaggagaagctgaggaagcaggccgccagccccaagggggcctctgtgtccatcaacgtgaacaccagcctggaggacatgaggagcaacaacgtggaggactgcaagatgatgcaggtgtcctctggggacaagatggaggatgccacagccaacggccaggaggacagcaaggccccagatggcagcaccctgaaggccctgggcctgccccagcctgacttccacagcctcatcctggacctgggcgccctgagctttgtggacacagtgtgcctgaagagcctgaagaacatcttccatgacttccgggagattgaggtggaggtgtacatggccgcctgccacagccctgtggtgtcccagctggaggccggccacttctttgatgccagcatcaccaagaagcacctgtttgcctctgtgcatgatgctgtgacctttgccctgcagcaccccaggcctgtgcctgacagccctgtgtctgtgacccggctgtag

SEQ ID NO: 170568 - DNA, 1941 bp, synthetic construct
  misc_feature 1..1941: note = Description of Artificial Sequence: Synthetic coding sequence
  source 1..1941: mol_type = other DNA
atgagggcccctggggccggggccgcctctgtggtgtccctggccctgctgtggctgctgggcctgccctggacctggagcgctgctgctgccctgggcgtgtatgtgggcagcggcggctggaggttcctgcgcatcgtgtgcaagacagcccggcgggacctgtttggcctgtctgtgctgatccgggtgcggctggagctgcggcggcaccagagagctggccacaccatcccccgcatcttccaggccgtggtgcagaggcagcctgagcggctggccctggtggatgctggcaccggggagtgctggacctttgcccagctggatgcctacagcaatgctgtggccaacctcttccggcagctgggctttgcccctggagatgtggtggccatcttcctggagggccggcctgagtttgtgggcctgtggctgggcctggccaaggccggcatggaggccgccctgctgaatgtgaacctgcggcgggagcccctggccttctgcctgggcaccagcggggccaaggccctgatctttggaggagagatggtggccgctgtggccgaggtgtctggccacctgggcaagagcctcatcaagttctgcagcggggacctgggccctgagggcatcctgcctgacacccacctgctggaccccctgctgaaggaggccagcacagcccccctggcccagatccccagcaagggcatggatgacaggctcttctacatctacaccagcggcaccaccggcctgcccaaggccgccatcgtggtgcacagccgctactacaggatggccgccttcggccaccacgcctacaggatgcaggccgcagatgtgctgtatgactgcctgcccctgtaccacagcgctggcaacatcattggagtgggccagtgcctgatctacggcctgactgtggtgctgaggaagaagttcagcgccagccgcttctgggatgactgcatcaagtacaactgcaccgtggtgcagtacatcggggagatctgccgctacctgctgaagcagcctgtgcgggaggccgagcggcggcaccgggtgcggctggccgtgggcaatggcctgcggcctgccatctgggaggagttcacagagcgcttcggcgtgcggcagattggagagttctatggagccacagagtgcaactgcagcatcgccaacatggatggcaaggtgggcagctgtggcttcaacagccgcatcctgccccacgtgtaccccatccggctggtgaaggtgaatgaagacaccatggagctgctgagagatgcccagggcctgtgcatcccctgccaggccggggagcccggcctgctggtgggccagatcaaccagcaggaccccctgcggagatttgatggctacgtgtctgagagcgccaccagcaagaagatcgcccacagcgtcttcagcaaaggagacagcgcctacctgtctggagatgtgctggtgatggatgagctgggctacatgtacttccgggacagaagtggggacaccttccgctggagaggagaaaatgtgtccaccacagaggtggagggcgtgctgagccggctgctgggccagacagatgtggccgtgtatggagtggccgtgcctggggtggagggcaaggccggcatggctgctgtggccgacccccacagcctgctggaccccaatgccatctaccaggagctgcagaaggtgctggccccctatgcccggcccatcttcctgcggctgctgccccaggtggacaccaccggcaccttcaagatccagaagacccggctgcagcgggagggctttgacccccggcagaccagtgacaggctcttcttcctggacctgaagcagggccactacctgcccctgaatgaggccgtgtacacccgcatctgcagcggggcctttgccctgtag

SEQ ID NO: 170569 - DNA, 723 bp, synthetic construct
  misc_feature 1..723: note = Description of Artificial Sequence: Synthetic coding sequence
  source 1..723: mol_type = other DNA
cctgagtttgtgggcctgtggctgggcctggccaaggccggcatggaggccgccctgctgaatgtgaacctgcggcgggagcccctggccttctgcctgggcaccagcggggccaaggccctgatctttggaggagagatggtggccgctgtggccgaggtgtctggccacctgggcaagagcctcatcaagttctgcagcggggacctgggccctgagggcatcctgcctgacacccacctgctggaccccctgctgaaggaggccagcacagcccccctggcccagatccccagcaagggcatggatgacaggctcttctacatctacaccagcggcaccaccggcctgcccaaggccgccatcgtggtgcacagccgctactacaggatggccgccttcggccaccacgcctacaggatgcaggccgcagatgtgctgtatgactgcctgcccctgtaccacagcgctggcaacatcattggagtgggccagtgcctgatctacggcctgactgtggtgctgaggaagaagttcagcgccagccgcttctgggatgactgcatcaagtacaactgcacctggcacggccccagctggacagagaagctggagccccagaggaacccctgcctgtctgctgccctggtgcccctgtgcctgccccccctgcctgccttccagcccctgagccccagcatccctgtgcctgtgtggccctag

SEQ ID NO: 170570 - DNA, 1941 bp, synthetic construct; identical to SEQ ID NO: 170568
  misc_feature 1..1941: note = Description of Artificial Sequence: Synthetic coding sequence
  source 1..1941: mol_type = other DNA

SEQ ID NO: 170571 - DNA, 1863 bp, synthetic construct
  misc_feature 1..1863: note = Description of Artificial Sequence: Synthetic coding sequence
  source 1..1863: mol_type = other DNA
atgctgagcgccatctacacagtgctggccggcctgctcttcctgcccctgctggtgaacctgtgctgcccctacttcttccaggacatcggctacttcctgaaggtggccgctgtgggcagaagagtgcgctcctatggcaagagaagacctgcccggaccatcctgcgggccttcctggagaaggcccggcagaccccccacaagcccttcctgctcttcagagatgagaccctgacctacgcccaggtggaccggcgcagcaaccaggtggcccgggccctgcatgaccacctgggcctgcggcagggcgactgtgtggccctgctgatgggaaatgaaccagcctacgtgtggctgtggctgggcctggtgaagctgggctgtgccatggcctgcctgaactacaacatccgggccaagagcctgctgcactgcttccagtgctgcggggccaaggtgctgctggtgtccccagagctgcaggccgctgtggaggagatcctgcccagcctgaagaaggatgatgtgtccatctactacgtgtccaggaccagcaacacagatggcatcgacagcttcctggacaaggtggatgaggtgtccacagagcccatccctgagagctggaggtctgaggtgaccttcagcaccccagccctgtacatctacaccagcggcaccaccggcctgcccaaggccgccatgatcacccaccagaggatctggtacggcaccggcctgacctttgtgtctggcctgaaggcagatgatgtgatctacatcaccctgcccttctaccacagcgctgccctgctgattggcatccacggctgcatcgtggccggggccaccctggccctgcggaccaagttcagcgccagccagttctgggatgactgcaggaagtacaacgtgaccgtcatccagtacatcggggagctgctgcgctacctgtgcaacagcccccagaagcccaatgaccgggaccacaaggtgcggctggccctgggcaatggcctgcggggagatgtgtggaggcagtttgtgaagagatttggagacatctgcatctatgagttctatgctgccacagagggcaacatcggcttcatgaactatgccaggaaggtgggcgctgtgggccgggtgaactacctgcagaagaagatcatcacctatgacctgatcaagtatgatgtggagaaggatgagcctgtgagagatgaaaatggctactgtgtgcgggtgcccaagggggaggtgggcctgctggtgtgcaagatcacccagctgacccccttcaacggctacgccggggccaaggcccagacagagaagaagaagctgagagatgtgttcaagaagggggacctgtacttcaacagcggggacctgctgatggtggaccacgagaacttcatctacttccatgacagagtgggggacaccttccgctggaagggggagaatgtggccaccacagaggtggccgacacagtgggcctggtggactttgtgcaggaggtgaatgtgtatggagtgcacgtgcctgaccacgagggccgcatcggcatggccagcatcaagatgaaggaaaatcatgaatttgatggcaagaagctgttccagcacatcgctgactacctgcccagctatgcccggccccgcttcctgcgcatccaggacaccatcgagatcaccggcaccttcaagcacaggaagatgaccctggtggaggagggcttcaacccagctgtgatcaaggatgccctgtacttcctggatgacacagccaagatgtatgtgcccatgacagaggacatctacaatgccatcagcgccaagaccctgaagctgtag

SEQ ID NO: 170572 - DNA, 1704 bp, synthetic construct
  misc_feature 1..1704: note = Description of Artificial Sequence: Synthetic coding sequence
  source 1..1704: mol_type = other DNA
atgctgagcgccatctacacagtgctggccggcctgctcttcctgcccctgctggtgaacctgtgctgcccctacttcttccaggacatcggctacttcctgaaggtggccgctgtgggcagaagagtgcgctcctatggcaagagaagacctgcccggaccatcctgcgggccttcctggagaaggcccggcagaccccccacaagcccttcctgctcttcagagatgagaccctgacctacgcccaggtggaccggcgcagcaaccaggtggcccgggccctgcatgaccacctgggcctgcggcagggcgactgtgtggccctgctgatgggaaatgaaccagcctacgtgtggctgtggctgggcctggtgaagctgggctgtgccatggcctgcctgaactacaacatccgggccaagagcctgctgcactgcttccagtgctgcggggccaaggtgctgctggtgtccccagagctgcaggccgctgtggaggagatcctgcccagcctgaagaaggatgatgtgtccatctactacgtgtccaggaccagcaacacagatggcatcgacagcttcctggacaaggtggatgaggtgtccacagagcccatccctgagagctggaggtctgaggtgaccttcagcaccccagccctgtacatctacaccagcggcaccactggagccaccctggccctgcggaccaagttcagcgccagccagttctgggatgactgcaggaagtacaacgtgaccgtcatccagtacatcggggagctgctgcgctacctgtgcaacagcccccagaagcccaatgaccgggaccacaaggtgcggctggccctgggcaatggcctgcggggagatgtgtggaggcagtttgtgaagagatttggagacatctgcatctatgagttctacgccgccacagagggcaacatcggcttcatgaactatgccaggaaggtgggcgctgtgggccgggtgaactacctgcagaagaagatcatcacctatgacctgatcaagtatgatgtggagaaggatgagcctgtgagagatgaaaatggctactgtgtgcgggtgcccaagggggaggtgggcctgctggtgtgcaagatcacccagctgacccccttcaacggctacgccggggccaaggcccagacagagaagaagaagctgagagatgtgttcaagaagggggacctgtacttcaacagcggggacctgctgatggtggaccacgagaacttcatctacttccatgacagagtgggggacaccttccgctggaagggagaaaatgtggccaccacagaggtggccgacacagtgggcctggtggactttgtgcaggaggtgaatgtgtatggagtgcacgtgcctgaccacgagggcagaattggcatggccagcatcaagatgaaggagaaccacgagtttgatggcaagaagctgttccagcacatcgctgactacctgcccagctatgcccggccccgcttcctgcgcatccaggacaccatcgagatcaccggcaccttcaagcacaggaagatgaccctggtggaggagggcttcaacccagctgtgatcaaggatgccctgtacttcctggatgacacagccaagatgtatgtgcccatgacagaggacatctacaatgccatcagcgccaagaccctgaagctgtag

SEQ ID NO: 170573 - DNA, 2436 bp, synthetic construct
  misc_feature 1..2436: note = Description of Artificial Sequence: Synthetic coding sequence
  source 1..2436: mol_type = other DNA
atgcccaagccacccaagcccaggaacaacctggaggacagacacaaccctggcatccagggccggcgggagcacaggcctggccctggccgggtgcgggccgccagcagccctgggggcagcgcccccagggctgagcggcggctgtggggcgagggctgggagagcggggccgccccccacccccacagcagccgggtgtctgccctgcggccctgtggggtggtgggcgcctgggtgggcatgggcgtgtgccagaggacccgggccccctggaaggagaagagccagctggagagagctgccctgggcttcagaaaaggaggcagcggcatgtttgccagcggctggaaccagacagtgcccatcgaggaggccggctccatggccgccctgctgctgctgcccctgctgctgctgctgcccctgctgctgctgaagctgcacctgtggccccagctgcgctggctgcctgctgacctggcctttgctgtgcgggccctgtgctgcaagagggccctgcgggcccgggccctggccgctgctgctgctgaccctgagggccctgagggcggctgcagcctggcctggaggctggccgagctggcccagcagagagctgcccacaccttcctgatccacggcagccgccgcttctcctacagcgaggccgagcgggagagcaacagagctgcccgggccttcctgcgggccctgggctgggactggggcccagatggaggagacagcggggagggcagcgctggggagggggagagagctgcccctggagctggagatgctgctgctggcagcggggctgagtttgctggaggagatggagctgcccggggcggcggcgctgctgcccccctgagccctggggccaccgtggccctgctgctgcctgctggccctgagttcctgtggctgtggtttggcctggccaaggccggcctgaggacagcctttgtgcccacagccctgcggcggggccccctgctgcactgcctgcggagctgtggggcccgggccctggtgctggcccctgagttcctggagagcctggagccagacctgcctgccctgcgggccatgggcctgcacctgtgggccgccggccctggcacccaccctgctggcatcagtgacctgctggccgaggtgtctgctgaggtggatggccctgtgcccggctacctgagcagcccccagagcatcacagacacctgcctgtacatcttcaccagcggcaccaccggcctgcccaaggccgcccgcatcagccacctgaagatcctgcagtgccagggcttctaccagctgtgtggggtgcaccaggaggatgtgatctacctggccctgcccctgtaccacatgagcggcagcctgctgggcatcgtgggctgcatgggcattggagccaccgtggtgctgaagagcaagttctctgctggccagttctgggaggactgccagcagcaccgggtgaccgtcttccagtacatcggggagctgtgccgctacctggtgaaccagccccccagcaaggccgagcggggccacaaggtgcggctggccgtgggcagcggcctgcggccagacacctgggagagatttgtgcggcgcttcggccccctgcaggtgctggagacctacggcctgacagagggcaatgtggccaccatcaactacacaggccagagaggagctgtgggccgggcctcctggctgtacaagcacatcttccccttcagcctcatccgctatgatgtgaccaccggggagcccatccgggacccccagggccactgcatggccaccagccctggagagcccggcctgctggtggcccctgtgtcccagcagagccccttcctgggctacgccggcggccctgagctggcccagggcaagctgctgaaggatgtgttccggcctggagatgtgttcttcaacacaggagacctgctggtgtgtgatgaccagggcttcctgcgcttccatgacagaactggagacaccttccgctggaagggagaaaatgtggccaccacagaggtggccgaggtgtttgaggccctggacttcctgcaggaggtgaatgtgtatggagtgacagtgcccggccacgagggccgggccggcatggccgccctggtgctgcggcccccccacgccctggacctgatgcagctgtacacccacgtgtctgagaacctgcccccctatgcccggccccgcttcctgcggctgcaggagagcctggccaccacagagaccttcaagcagcagaaggtgaggatggccaatgaaggatttgaccccagcaccctgagtgaccccctgtatgtgctggaccaggccgtgggcgcctacctgcccctgaccacagcccgctacagcgccctgctggccggcaacctgcgcatctag

SEQ ID NO: 170574 - DNA, 2193 bp, synthetic construct
  misc_feature 1..2193: note = Description of Artificial Sequence: Synthetic coding sequence
  source 1..2193: mol_type = other DNA
atgggcgtgtgccagaggacccgggccccctggaaggagaagagccagctggagcgggccgccctgggcttcaggaagggcggcagcggcatgtttgccagcggctggaaccagacagtgcccatcgaggaggccggctccatggccgccctgctgctgctgcccctgctgctgctgctgcccctgctgctgctgaagctgcacctgtggccccagctgcgctggctgcctgctgacctggcctttgctgtgcgggccctgtgctgcaagagggccctgcgggcccgggccctggccgctgctgctgctgaccctgagggccctgagggcggctgcagcctggcctggaggctggccgagctggcccagcagagagctgcccacaccttcctgattcatggcagccgccgcttctcctacagcgaggccgagcgggagagcaacagagctgcccgggccttcctgcgggccctgggctgggactggggcccagatggaggagacagcggggagggcagcgctggggagggggagcgggccgcccctggagctggagatgctgctgctggcagcggggctgagtttgctggaggagatggagctgcccggggcggcggggccgccgcccccctgagccctggggccaccgtggccctgctgctgcctgctggccctgagttcctgtggctgtggtttggcctggccaaggccggcctgaggacagcctttgtgcccacagccctgcggcggggccccctgctgcactgcctgcggagctgtggggcccgggccctggtgctggcccctgagttcctggagagcctggagccagacctgcctgccctgcgggccatgggcctgcacctgtgggccgccggccctggcacccaccctgctggcatcagtgacctgctggccgaggtgtctgctgaggtggatggccctgtgcccggctacctgagcagcccccagagcatcacagacacctgcctgtacatcttcaccagcggcaccaccggcctgcccaaggccgcccgcatcagccacctgaagatcctgcagtgccagggcttctaccagctgtgtggggtgcaccaggaggatgtgatctacctggccctgcccctgtaccacatgagcggcagcctgctgggcatcgtgggctgcatgggcatcggggccaccgtggtgctgaagagcaagttctctgctggccagttctgggaggactgccagcagcaccgggtgacagtgttccagtacatcggggagctgtgccgctacctggtgaaccagccccccagcaaggccgagcggggccacaaggtgcggctggccgtgggcagcggcctgcggccagacacctgggagagatttgtgagaagatttggccccctgcaggtgctggagacctacggcctgacagagggcaatgtggccaccatcaactacacaggccagagaggagctgtgggccgggcctcctggctgtacaagcacatcttccccttcagcctcatccgctatgatgtgaccactggagagcccatccgggacccccagggccactgcatggccaccagccctggagagcccggcctgctggtggcccctgtgtcccagcagagccccttcctgggctacgccggcggccctgagctggcccagggcaagctgctgaaggatgtgttccggcctggagatgtgttcttcaacacaggagacctgctggtgtgtgatgaccagggcttcctgcgcttccatgacagaactggagacaccttccgctggaagggggagaatgtggccaccacagaggtggccgaggtgtttgaggccctggacttcctgcaggaggtgaatgtgtatggagtgacagtgcccggccacgagggccgggccggcatggccgccctggtgctgcggccccctcatgccctggacctgatgcagctgtacacccacgtgtctgagaacctgcccccctatgcccggccccgcttcctgcggctgcaggagagcctggccaccacagagaccttcaagcagcagaaggtgaggatggccaatgaaggatttgaccccagcaccctgagtgaccccctgtatgtgctggaccaggccgtgggcgcctacctgcccctgaccacagcccgctacagcgccctgctggccggcaacctgcgcatctag

SEQ ID NO: 170575 - DNA, 1932 bp, synthetic construct
  misc_feature 1..1932: note = Description of Artificial Sequence: Synthetic coding sequence
  source 1..1932: mol_type = other DNA
atgctgctgggcgccagcctggtgggcgtgctgctcttcagcaagctggtgctgaagctgccctggacccaggtgggcttcagcctgctcttcctgtacctgggcagcggcggctggaggttcatccgggtcttcatcaagaccatccggcgggacatctttggaggcctggtgctgctgaaggtgaaggccaaggtgcggcagtgcctgcaggagaggagaacagtgcccatcctgtttgccagcacagtgagaagacacccagacaagacagccctgatctttgagggcacagacacccactggaccttccggcagctggatgagtacagcagctctgtggccaacttcctgcaggcccggggcctggccagcggagatgtggccgccatcttcatggagaacagaaatgaatttgtgggcctgtggctgggcatggccaagctgggcgtggaggccgccctgatcaacaccaacctgcggagagatgccctgctgcactgcctgaccaccagccgggcccgggccctggtgtttggaagtgagatggccagcgccatctgtgaggtgcacgccagcctggaccccagcctgagcctcttctgcagcggctcctgggagcccggggctgtgccccccagcacagagcacctggaccccctgctgaaggatgcccccaagcacctgcccagctgcccagacaagggcttcacagacaagctgttctacatctacaccagcggcaccaccggcctgcccaaggccgccatcgtggtgcacagccgctactacaggatggccgccctggtgtactacggcttcaggatgaggcccaatgacatcgtgtatgactgcctgcccctgtaccacagcgctggcaacatcgtgggcatcggccagtgcctgctgcacggcatgacagtggtgatcaggaagaagttcagcgccagccgcttctgggatgactgcatcaagtacaactgcaccatcgtgcagtacatcggggagctgtgccgctacctgctgaaccagcccccccgggaggccgagaaccagcaccaggtgaggatggccctgggcaatggcctgcggcagagcatctggaccaacttcagcagccgcttccacatcccccaggtggccgagttctacggggccacagagtgcaactgcagcctgggcaactttgacagccaggtgggcgcctgtggcttcaacagccgcatcctgagctttgtgtaccccatccggctggtgcgggtgaatgaagacaccatggagctgatccggggcccagatggagtgtgcatcccctgccagcctggagagcccggccagctggtgggccgcatcatccagaaggaccccctgcggagatttgatggctacctgaaccagggcgccaacaacaagaagatcgccaaggatgtgttcaagaagggggaccaggcctacctgactggagatgtgctggtgatggatgagctgggctacctgtacttccgggacagaactggagacaccttccgctggaagggggagaatgtgtccaccacagaggtggagggcaccctgagccggctgctggacatggctgatgtggccgtgtatggagtggaggtgcccggcacagagggccgggccggcatggctgctgtggccagccccactggaaactgtgacctggagagatttgcccaggtgctggagaaggagctgcccctgtatgcccggcccatcttcctgcggctgctgcctgagctgcacaagacaggcacctacaagttccagaagacagagctgaggaaggagggctttgatcctgccatcgtgaaggaccccctcttctacctggatgcccagaagggccgctacgtgcccctggaccaggaggcctacagccgcatccaggccggggaggagaagctgtag

SEQ ID NO: 170576 - DNA, 714 bp, synthetic construct
  misc_feature 1..714: note = Description of Artificial Sequence: Synthetic coding sequence
  source 1..714: mol_type = other DNA
atgcccctgaccctgagcaccctgctgcagcccggccgcatctggacaggccggcgggctgctgagcccaccccaggccacaatgctgcctggagcctgagcggcggcggcgctgctgtgctgcaggccggggctgagacagccctggaccccggcggcatcctgcctgtggtgcccctgctgggcatctggaggctggccctgcaccctggcctgcaccaggaccaccaggcctacctgactggagatgtgctggtgatggatgagctgggctacctgtacttccgggacagaactggagacaccttccgctggaagggggagaatgtgtccaccacagaggtggagggcaccctgagccggctgctggacatggctgatgtggccgtgtatggagtggaggtgcccggcacagagggccgggccggcatggctgctgtggccagccccactggaaactgtgacctggagagatttgcccaggtgctggagaaggagctgcccctgtatgcccggcccatcttcctgcggctgctgcctgagctgcacaagacaggcacctacaagttccagaagacagagctgaggaaggagggctttgatcctgccatcgtgaaggaccccctcttctacctggatgcccagaagggccgctacgtgcccctggaccaggaggcctacagccgcatccaggccggggaggagaagctgtag

SEQ ID NO: 170577 - DNA, 2073 bp, synthetic construct
  misc_feature 1..2073: note = Description of Artificial Sequence: Synthetic coding sequence
  source 1..2073: mol_type = other DNA
atgggcgtgcggcagcagctggccctgctgctgctgctgctgctgctgctgtggggcctgggccagcctgtgtggcctgtggccgtggccctgaccctgcgctggctgctgggggaccccacctgctgcgtgctgctgggcctggccatgctggcccggccctggctgggcccctgggtgccccacggcctgagcctggccgctgctgccctggccctgaccctgctgcctgcccggctgcccccaggcctgcgctggctgcctgcagatgtgatcttcctggccaagatcctgcacctgggcctgaagatccggggctgcctgagccggcagcccccagacacctttgtggatgcctttgagcggcgggcccgggcccagcccggccgggccctgctggtgtggacaggccctggggccggctctgtgacctttggagagctggatgcccgggcctgccaggccgcctgggccctgaaggccgagctgggggaccctgccagcctgtgtgccggggagcccacagccctgctggtgctggccagccaggccgtgcctgccctgtgcatgtggctgggcctggccaagctgggctgccccacagcctggatcaacccccacggccggggcatgcccctggcccacagcgtgctgagcagcggggcccgggtgctggtggtggaccctgacctgcgggagagcctggaggagatcctgcccaagctgcaggccgagaacatccgctgcttctacctgagccacaccagccccaccccaggagtgggcgccctgggcgccgccctggatgctgcccccagccaccctgtgcctgctgacctgcgggccggcatcacctggaggagccctgccctcttcatctacaccagcggcaccaccggcctgcccaagccagccatcctgacccatgagcgggtgctgcagatgagcaagatgctgagcctgagcggggccacagcagatgatgtggtgtacacagtgctgcccctgtaccacgtgatgggcctggtggtgggcatcctgggctgcctggacctgggcgccacctgtgtgctggcccccaagttcagcaccagctgcttctgggatgactgccggcagcacggcgtgaccgtcatcctgtatgtgggggagctgctgcgctacctgtgcaacatcccccagcagcctgaggacaggacccacacagtgcggctggccatgggaaatggcctgcgggcagatgtgtgggagaccttccagcagagatttggccccatccgcatctgggaggtgtatggcagcacagagggcaacatgggcctggtgaactacgtgggccgctgtggggccctgggcaagatgagctgcctgctgaggatgctgagcccctttgagctggtgcagtttgacatggaggccgctgagcctgtgcgggacaaccagggcttctgcatccctgtgggcctgggggagcccggcctgctgctgaccaaggtggtgtcccagcagccctttgtgggctaccggggcccccgggagctgtctgagaggaagctggtgagaaatgtgcggcagagcggagatgtgtactacaacacaggagatgtgctggccatggaccgggagggcttcctgtacttccgggaccggctgggggacaccttccgctggaagggggagaatgtgtccacccatgaggtggagggcgtgctgagccaggtggacttcctgcagcaggtgaatgtgtatggagtgtgtgtgcccggctgtgagggcaaggtgggcatggctgctgtgcagctggcccctggccagacctttgatggagagaagctgtaccagcacgtgcgggcctggctgcctgcctatgccaccccccacttcatccgcatccaggatgccatggaggtgaccagcaccttcaagctgatgaagacccggctggtgcgggagggcttcaacgtgggcatcgtggtggaccccctgtttgtgctggacaacagagcccagagcttccggcccctgacagctgagatgtaccaggccgtgtgtgagggcacctggaggctgtag

SEQ ID NO: 170578 - DNA, 1950 bp, synthetic construct
  misc_feature 1..1950: note = Description of Artificial Sequence: Synthetic coding sequence
  source 1..1950: mol_type = other DNA
atggagaatgaccccagcagaagaagagagagcatcagcctgacccctgtggccaagggcctggagaacatgggcgctgacttcctggagagcctggaggagggccagctgcccaggagtgacctgagccctgctgagatccgcagctcctggagcgaggccgcccccaagcccttcagccgctggaggaacctgcagcctgccctgcgggcccgctccttctgccgggagcacatgcagctgttccgctggattggaacaggcctgctgtgcaccggcctgagcgccttcctgctggtggcctgcctgctggacttccagagggccctggccctgtttgtgctgacctgtgtggtgctgaccttcctgggccaccggctgctgaagaggctgctgggccccaagctgcggcgcttcctgaagccccagggccacccccggctgctgctgtggttcaagaggggcctggccctggccgccttcctgggcctggtgctgtggctgagcctggacaccagccagaggcctgagcagctggtgtcctttgctggcatctgtgtgtttgtggccctgctgtttgcctgcagcaagcaccactgtgctgtgtcctggagggctgtgtcctggggcctgggcctgcagtttgtgctgggcctgctggtgatcagaacagagcccggcttcatcgcctttgagtggctgggggagcagatccgcatcttcctgagctacaccaaggccggcagcagctttgtgtttggagaggccctggtgaaggatgtgtttgccttccaggtgctgcccatcatcgtgttcttcagctgtgtgatctctgtgctgtaccacgtgggcctgatgcagtgggtgatcctgaagatcgcctggctgatgcaggtgaccatgggcaccacagccacagagaccctgtctgtggccggcaacatctttgtgtcccagacagaggcccccctgctgatccggccctacctggccgacatgaccctgtctgaggtgcacgtggtgatgactggaggctacgccaccatcgccggcagcctgctgggcgcctacatcagctttggaattgatgccaccagcctgattgctgcctctgtgatggccgccccctgtgccctggccctgagcaagctggtgtacccagaggtggaggagagcaagttcagaagagaggagggcgtgaagctgacctatggagatgcccagaacctgattgaagctgccagcactggagctgccatctctgtgaaggtggtggccaacattgctgccaacctgattgccttcctggccgtgctggacttcatcaatgctgccctgtcctggctgggggacatggtggacatccagggcctgtccttccagctgatctgcagctacatcctgcggcctgtggccttcctgatgggcgtggcctgggaggactgccctgtggtggccgagctgctgggcatcaagctgttcctgaatgaatttgtggcctaccaggacctgagcaagtacaagcagaggcggctggccggggctgaggagtgggtgggggacaggaagcagtggatctctgtgcgggcagaggtgctgaccacctttgccctgtgtggctttgccaacttcagcagcatcggcatcatgctgggcggcctgacctccatggtgccccagaggaagagtgacttcagccagatcgtgctgcgggccctcttcaccggggcctgtgtgtccctggtgaatgcctgcatggccggcatcctgtacatgcccagaggagctgaggtggactgcatgagcctgctgaacaccaccctgagcagcagcagctttgagatctaccagtgctgccgggaggccttccagagcgtgaaccctgagttcagccctgaggccctggacaactgctgccgcttctacaaccacaccatctgtgcccagtag

SEQ ID NO: 170579 - DNA, 528 bp, synthetic construct
  misc_feature 1..528: note = Description of Artificial Sequence: Synthetic coding sequence
  source 1..528: mol_type = other DNA
atggagaatgaccccagcagaagaagagagagcatcagcctgacccctgtggccaagggcctggagaacatgggcgctgacttcctggagagcctggaggagggccagctgcccaggagtgacctgagccctgctgagatccgcagctcctggagcgaggccgcccccaagcccttcagccgctggaggaacctgcagcctgccctgcgggcccgctccttctgccgggagcacatgcagctgttccgctggattggaacaggcctgctgtgcaccggcctgagcgccttcctgctggtggcctgcctgctggacttccagagggccctggccctgtttgtgctgacctgtgtggtgctgaccttcctgggccaccggctgctgaagaggctgctgggccccaagctgcggcgcttcctgaagccccagggccacccccggctgctgctgtggttcaagagggacccccggccctggagcaaggagggccccaaccagtacctgccccagatcacctggacagtgtag

SEQ ID NO: 170580 - DNA, 1950 bp, synthetic construct; identical to SEQ ID NO: 170578
  misc_feature 1..1950: note = Description of Artificial Sequence: Synthetic coding sequence
  source 1..1950: mol_type = other DNA

SEQ ID NO: 170581 - DNA, 1632 bp, synthetic construct
  misc_feature 1..1632: note = Description of Artificial Sequence: Synthetic coding sequence
  source 1..1632: mol_type = other DNA
atggagaatgaccccagcagaagaagagagagcatcagcctgacccctgtggccaagggcctggagaacatgggcgctgacttcctggagagcctggaggagggccagctgcccaggagtgacctgagccctgctgagatccgcagctcctggagcgaggccgcccccaagcccttcagccgctggaggaacctgcagcctgccctgcgggcccgctccttctgccgggagcacatgcagctgttccgctggattggaacaggcctgctgtgcaccggcctgagcgccttcctgctggtggcctgcctgctggacttccagagggccctggccctgtttgtgctgacctgtgtggtgctgaccttcctgggccaccggctgctgaagaggctgctgggccccaagctgcggcgcttcctgaagccccagggccacccccggctgctgctgtggttcaagaggggcctggccctggccgccttcctgggcctggtgctgtggctgagcctggacaccagccagaggcctgagcagctggtgtcctttgctggcatctgtgtgtttgtggccctgctgtttgcctgcagcaagcaccactgtgctgtgtcctggagggctgtgtcctggggcctgggcctgcagtttgtgctgggcctgctggtgatcagaacagagcccggcttcatcgcctttgagtggctgggggagcagatccgcatcttcctgagctacaccaaggccggcagcagctttgtgtttggagaggccctggtgaaggatgtgtttgccttccaggtgctgcccatcatcgtgttcttcagctgtgtgatctctgtgctgtaccacgtgggcctgatgcagtgggtgatcctgaagatcgcctggctgatgcaggtgaccatgggcaccacagccacagagaccctgtctgtggccggcaacatctttgtgtcccagacagaggcccccctgctgatccggccctacctggccgacatgaccctgtctgaggtgcacgtggtgatgactggaggctacgccaccatcgccggcagcctgctgggcgcctacatcagctttggaattgatgccaccagcctgattgctgcctctgtgatggccgccccctgtgccctggccctgagcaagctggtgtacccagaggtggaggagagcaagttcagaagagaggagggcgtgaagctgacctatggagatgcccagaacctgattgaagctgccagcactggagctgccatctctgtgaaggtggtggccaacattgctgccaacctgattgccttcctggccgtgctggacttcatcaatgctgccctgtcctggctgggggacatggtggacatccagggcctgtccttccagctgatctgcagctacatcctgcggcctgtggccttcctgatgggcgtggcctgggaggactgccctgtggtggccgagctgctgggcatcaagctgttcctgaatgaatttgtggcctaccaggacctgagcaagtacaagcagaggcggctggccggggctgaggagtgggtgggggacaggaagcagtggatcagccggcggggcctggccatgctgacccggctggtgctgaacagctggccctag

SEQ ID NO: 170582 - DNA, 1911 bp, synthetic construct
  misc_feature 1..1911: note = Description of Artificial Sequence: Synthetic coding sequence
  source 1..1911: mol_type = other DNA
atggagaatgaccccagcagaagaagagagagcatcagcctgacccctgtggccaagggcctggagaacatgggcgctgacttcctggagagcctggaggagggccagctgcccaggagtgacctgagccctgctgagatccgcagctcctggagcgaggccgcccccaagcccttcagccgctggaggaacctgcagcctgccctgcgggcccgctccttctgccgggagcacatgcagctgttccgctggattggaacaggcctgctgtgcaccggcctgagcgccttcctgctggtggcctgcctgctggacttccagagggccctggccctgtttgtgctgacctgtgtggtgctgaccttcctgggccaccggctgctgaagaggctgctgggccccaagctgcggcgcttcctgaagccccagggccacccccggctgctgctgtggttcaagaggggcctggccctggccgccttcctgggcctggtgctgtggctgagcctggacaccagccagaggcctgagcagctggtgtcctttgctggcatctgtgtgtttgtggccctgctgtttgcctgcagcaagcaccactgtgctgtgtcctggagggctgtgtcctggggcctgggcctgcagtttgtgctgggcctgctggtgatcagaacagagcccggcttcatcgcctttgagtggctgggggagcagatccgcatcttcctgagctacaccaaggccggcagcagctttgtgtttggagaggccctggtgaaggatgtgtttgccttccaggtgctgcccatcatcgtgttcttcagctgtgtgatctctgtgctgtaccacgtgggcctgatgcagtgggtgatcctgaagatcgcctggctgatgcaggtgaccatgggcaccacagccacagagaccctgtctgtggccggcaacatctttgtgtcccagacagaggcccccctgctgatccggccctacctggccgacatgaccctgtctgaggtgcacgtggtgatgactggaggctacgccaccatcgccggcagcctgctgggcgcctacatcagctttggaattgatgccaccagcctgattgctgcctctgtgatggccgccccctgtgccctggccctgagcaagctggtgtacccagaggtggaggagagcaagttcagaagagaggagggcgtgaagctgacctatggagatgcccagaacctgattgaagctgccagcactggagctgccatctctgtgaaggtggtggccaacattgctgccaacctgattgccttcctggccgtgctggacttcatcaatgctgccctgtcctggctgggggacatggtggacatccagggcctgtccttccagctgatctgcagctacatcctgcggcctgtggccttcctgatgggcgtggcctgggaggactgccctgtggtggccgagctgctgggcatcaagctgttcctgaatgaatttgtggcctaccaggacctgagcaagtacaagcagaggcggctggccggggctgaggagtgggtgggggacaggaagcagtggatctctgtgcgggcagaggtgctgaccacctttgccctgtgtggctttgccaacttcagcagcatcggcatcatgctgggcggcctgacctccatggtgccccagaggaagagtgacttcagccagatcgtgctgcgggccctcttcaccggggcctgtgtgtccctggtgaatgcctgcatggccggcatcctgtacatgcccagaggagctgaggtggactgcatgagcctgctgaacaccaccctgagcagcagcagctttgagatctaccagtgctgccgggaggccttccagaggatcttcaagagcaccccagctgagagccagccctag

SEQ ID NO: 170583 - DNA, 864 bp, synthetic construct
  misc_feature 1..864: note = Description of Artificial Sequence: Synthetic coding sequence
  source 1..864: mol_type = other DNA
atgcagctgttccgctggattggaacaggcctgctgtgcaccggcctgagcgccttcctgctggtggcctgcctgctggacttccagagggccctggccctgtttgtgctgacctgtgtggtgctgaccttcctgggccaccggctgctgaagaggctgctgggccccaagctgcggcgcttcctgaagccccagggccacccccggctgctgctgtggttcaagaggggcctggccctggccgccttcctgggcctggtgctgtggctgagcctggacaccagccagaggcctgagcagctggtgtcctttgctggcatctgtgtgtttgtggccctgctgtttgcctgcagcaagcaccactgtgctgtgtcctggagggctgtgtcctggggcctgggcctgcagtttgtgctgggcctgctggtgatcagaacagagcccggcttcatcgcctttgagtggctgggggagcagatccgcatcttcctgagctacaccaaggccggcagcagctttgtgtttggagaggccctggtgaaggatgtgtttgccttccaggtgctgcccatcatcgtgttcttcagctgtgtgatctctgtgctgtaccacgtgggcctgatgcagtgggtgatcctgaagatcgcctggctgatgcaggtgaccatgggcaccacagccacagagaccctgtctgtggccggcaacatctttgtgtcccagacagaggcccccctgctgatccggccctacctggccgacatgaccctgtctgaggtgcacgtggtgatgactggaggctacgccaccatcgccggcagcctgctgggcgcctacatcagctttggcctggagaagctgtag

SEQ ID NO: 170584 - DNA, 1452 bp, synthetic construct
  misc_feature 1..1452: note = Description of Artificial Sequence: Synthetic coding sequence
  source 1..1452: mol_type = other DNA
atggagaatgaccccagcagaagaagagagagcatcagcctgacccctgtggccaagggcctggagaacatgggcgctgacttcctggagagcctggaggagggccagctgcccaggagtgacctgagccctgctgagatccgcagctcctggagcgaggccgcccccaagcccttcagccgctggaggaacctgcagcctgccctgcgggcccgctccttctgccgggagcacatgcagctgttccgctggattggaacaggcctgctgtgcaccggcctgagcgccttcctgctggtggcctgcctgctggacttccagagggccctggccctgtttgtgctgacctgtgtggtgctgaccttcctgggccaccggctgctgaagaggctgctgggccccaagctgcggcgcttcctgaagccccagggccacccccggctgctgctgtggttcaagaggggcctggccctggccgccttcctgggcctggtgctgtggctgagcctggacaccagccagaggcctgagcagctggtgtcctttgctggcatctgtgtgtttgtggccctgctgtttgcctgcagcaagcaccactgtgctgtgtcctggagggctgtgtcctggggcctgggcctgcagtttgtgctgggcctgctggtgatcagaacagagcccggcttcatcgcctttgagtggctgggggagcagatccgcatcttcctgagctacaccaaggccggcagcagctttgtgtttggagaggccctggtgaaggatgtgtttgccttccaggtgctgcccatcatcgtgttcttcagctgtgtgatctctgtgctgtaccacgtgggcctgatgcagtgggtgatcctgaagatcgcctggctgatgcaggtgaccatgggcaccacagccacagagaccctgtctgtggccggcaacatctttgtgtcccagacagaggcccccctgctgatccggccctacctggccgacatgaccctgtctgaggtgcacgtggtgatgactggaggctacgccaccatcgccggcagcctgctgggcgcctacatcagctttggagtgcgggcagaggtgctgaccacctttgccctgtgtggctttgccaacttcagcagcatcggcatcatgctgggcggcctgacctccatggtgccccagaggaagagtgacttcagccagatcgtgctgcgggccctcttcaccggggcctgtgtgtccctggtgaatgcctgcatggccggcatcctgtacatgcccagaggagctgaggtggactgcatgagcctgctgaacaccaccctgagcagcagcagctttgagatctaccagtgctgccgggaggccttccagagcgtgaaccctgagttcagccctgaggccctggacaactgctgccgcttctacaaccacaccatctgtgcccagtag

SEQ ID NO: 170585 - DNA, 1977 bp, synthetic construct
  misc_feature 1..1977: note = Description of Artificial Sequence: Synthetic coding sequence
  source 1..1977: mol_type = other DNA
atggagaaggccagcggccggcagagcatcgccctgagcacagtggagactggaacagtgaaccctggcctggagctgatggagaaggaggtggagcctgagggcagcaagaggacagatgcccagggccacagcctgggagatggcctgggccccagcacctaccagaggaggagccgctggcccttcagcaaggcccggagcttctgcaagacccacgccagcctcttcaagaagatcctgctgggcctgctgtgcctggcctatgctgcctacctgctggccgcctgcatcctgaacttccagagggccctggccctcttcgtcatcacctgcctggtgatctttgtgctggtgcacagcttcctgaagaagctgctgggcaagaagctgacccgctgcctgaagccctttgagaacagccggctgcggctgtggaccaagtgggtgtttgctggggtgtccctggtgggcctcatcctgtggctggccctggacacagcccagaggcctgagcagctgatcccctttgctggcatctgcatgttcatcctgatcctgtttgcctgcagcaagcaccacagcgctgtgtcctggaggacagtgttcagcggcctgggcctgcagtttgtgtttggcatcctggtgatcagaacagacctgggctacaccgtcttccagtggctgggggagcaggtgcagatcttcctgaactacacagtggccggcagcagctttgtgtttggagacaccctggtgaaggatgtgtttgccttccaggccctgcccatcatcatcttcttcggctgtgtggtgtccatcctgtactacctgggcctggtgcagtgggtggtgcagaaggtggcctggttcctgcagatcaccatgggcaccacagccacagagaccctggccgtggccggcaacatctttgtgggcatgacagaggcccccctgctgatccggccctacctgggggacatgaccctgtctgagatccatgctgtgatgactggaggctttgccaccatctctggaacagtgctgggcgccttcatcgcctttggagtggatgccagcagcctcatcagcgcctctgtgatggccgccccctgtgccctggccagcagcaagctggcctacccagaggtggaggagagcaagttcaagtctgaggagggcgtgaagctgccccggggcaaggagagaaatgtgctggaggccgccagcaatggagctgtggatgccatcggcctggccaccaacgtggccgccaacctgattgccttcctggccgtgctggccttcatcaatgctgccctgtcctggctgggggagctggtggacatccagggcctgaccttccaggtgatctgcagctacctgctgcggcccatggtgttcatgatgggcgtggagtggacagactgccccatggtggccgagatggtgggcatcaagttcttcatcaatgaatttgtggcctaccagcagctgagccagtacaagaacaagaggctgagcggcatggaggagtggattgaaggagagaagcagtggatctctgtgcgggcagagatcatcaccaccttcagcctgtgtggctttgccaacctgagcagcatcggcatcaccctgggcggcctgaccagcatcgtgccccacaggaagagtgacctgagcaaggtggtggtgcgggccctcttcaccggggcctgtgtgtccctcatcagcgcctgcatggccggcatcctgtatgtgcccagaggagctgaggccgactgtgtgtccttccccaacaccagcttcaccaacagaacctatgagacctacatgtgctgccggggcctcttccagagcaccagcctgaatggcaccaacccccccagcttcagcggcccctgggaggacaaggagttcagcgccatggccctgaccaactgctgcggcttctacaacaacacagtgtgtgcctag

SEQ ID NO: 170586 - DNA, 2076 bp, synthetic construct
  misc_feature 1..2076: note = Description of Artificial Sequence: Synthetic coding sequence
  source 1..2076: mol_type = other DNA
atggagctgcggagcacagctgcccccagggctgagggctacagcaatgtgggcttccagaatgaggagaacttcctggagaatgaaaacaccagcggcaacaacagcatccgcagcagagctgtgcagagccgggagcacaccaacaccaagcaggatgaggagcaggtgacagtggagcaggacagccccaggaaccgggagcacatggaggatgatgatgaggagatgcagcagaagggctgcctggagaggagatatgacacagtgtgtggcttctgcaggaagcacaagaccaccctgcggcacatcatctggggcatcctgctggccggctacctggtgatggtgatcagcgcctgtgtgctgaacttccaccgggccctgcccctcttcgtcatcaccgtggccgccatcttctttgtggtgtgggaccacctgatggccaagtatgagcacagaattgatgagatgctgagccctggaagaaggctgctgaacagccactggttctggctgaagtgggtgatctggagcagcctggtgctggccgtcatcttctggctggcctttgacacagccaagctgggccagcagcagctggtgtcctttggaggcctcatcatgtacatcgtgctgctcttcctgttcagcaagtaccccaccagggtgtactggaggcctgtgctgtggggcatcggcctgcagttcctgctgggcctgctgatcctgaggacagaccccggcttcatcgcctttgactggctgggccggcaggtgcagaccttcctggagtacacagatgctggggccagctttgtgtttggagagaagtacaaggaccacttctttgccttcaaggtgctgcccatcgtggtgttcttcagcacagtgatgtccatgctgtactacctgggcctgatgcagtggatcatcaggaaggtgggctggatcatgctggtgaccaccggcagcagccccatcgagagcgtggtggccagcggcaacatctttgtgggccagacagagagccccctgctggtgcggccctacctgccctacatcaccaagtctgagctgcacgccatcatgacagctggcttcagcaccatcgccggctctgtgctgggcgcctacatcagctttggagtgcccagcagccacctgctgacagcctctgtgatgtctgccccagccagcctggccgccgccaagctgttctggccagagacagagaagcccaagatcaccctgaagaatgccatgaagatggagagcggggacagcggcaacctgctggaggccgccacccagggcgccagcagcagcatcagcctggtggccaacattgctgtgaacctgattgccttcctggccctgctgtccttcatgaacagcgccctgtcctggtttggaaacatgtttgactacccccagctgagctttgagctgatctgcagctacatcttcatgcccttctccttcatgatgggcgtggagtggcaggacagcttcatggtggcccggctgattggctacaagaccttcttcaatgaatttgtggcctatgagcacctgagcaagtggatccacctgaggaaggagggcggccccaagtttgtgaatggagtgcagcagtacatcagcatccgctctgagatcatcgccacctacgccctgtgtggctttgccaacatcggcagcctgggcatcgtgattggaggcctgacctccatggcccccagcaggaagagggacatcgccagcggggctgtgcgggccctgattgctggcaccgtggcctgcttcatgacagcctgcatcgccggcatcctgagcagcacccctgtggacatcaactgccaccacgtgctggagaatgccttcaacagcaccttccctggcaacaccaccaaggtgattgcctgctgccagagcctgctgagcagcacagtggccaagggccctggagaggtgattcctgggggcaaccacagcctgtacagcctgaagggctgctgcaccctgctgaaccccagcaccttcaactgcaatggcatcagcaacaccttctag

SEQ ID NO: 170587 - DNA, 1869 bp, synthetic construct
  misc_feature 1..1869: note = Description of Artificial Sequence: Synthetic coding sequence
  source 1..1869: mol_type = other DNA
atggaggatgatgatgaggagatgcagcagaagggctgcctggagcggcgctatgacacagtgtgtggcttctgcaggaagcacaagaccaccctgcggcacatcatctggggcatcctgctggccggctacctggtgatggtgatcagcgcctgtgtgctgaacttccaccgggccctgcccctgtttgtgatcaccgtggccgccatcttctttgtggtgtgggaccacctgatggccaagtatgagcacagaattgatgagatgctgagccctggccggcggctgctgaacagccactggttctggctgaagtgggtgatctggagcagcctggtgctggccgtcatcttctggctggcctttgacacagccaagctgggccagcagcagctggtgtcctttggaggcctcatcatgtacatcgtgctgctcttcctgttcagcaagtaccccaccagggtgtactggaggcctgtgctgtggggcatcggcctgcagttcctgctgggcctgctgatcctgaggacagatcctggcttcatcgcctttgactggctgggccggcaggtgcagaccttcctggagtacacagatgctggggccagctttgtgtttggagagaagtacaaggaccacttctttgccttcaaggtgctgcccatcgtggtgttcttcagcacagtgatgtccatgctgtactacctgggcctgatgcagtggatcatcaggaaggtgggctggatcatgctggtgaccaccggcagcagccccattgaatctgtggtggccagcggcaacatctttgtgggccagacagagagccccctgctggtgcggccctacctgccctacatcaccaagtctgagctgcacgccatcatgacagctggcttcagcaccatcgccggctctgtgctgggcgcctacatcagctttggagtgcccagcagccacctgctgacagcctctgtgatgtctgccccagccagcctggccgccgccaagctgttctggccagagacagagaagcccaagatcaccctgaagaatgccatgaagatggagagcggggacagcggcaacctgctggaggccgccacccagggcgccagcagcagcatcagcctggtggccaacattgctgtgaacctgattgccttcctggccctgctgtccttcatgaacagcgccctgtcctggtttggaaacatgtttgactacccccagctgagctttgagctgatctgcagctacatcttcatgcccttctccttcatgatgggcgtggagtggcaggacagcttcatggtggcccggctcatcggctacaagaccttcttcaatgaatttgtggcctatgagcacctgagcaagtggatccacctgaggaaggagggcggccccaagtttgtgaatggagtgcagcagtacatcagcatccgctctgagatcatcgccacctacgccctgtgtggctttgccaacatcggcagcctgggcatcgtcatcggcggcctgacctccatggcccccagcaggaagagggacatcgccagcggggctgtgcgggccctgattgctggcaccgtggcctgcttcatgacagcctgcatcgccggcatcctgagcagcacccctgtggacatcaactgccaccacgtgctggagaatgccttcaacagcaccttccctggcaacaccaccaaggtgattgcctgctgccagagcctgctgagcagcacagtggccaagggccctggagaggtgattcctgggggcaaccacagcctgtacagcctgaagggctgctgcaccctgctgaaccccagcaccttcaactgcaatggcatcagcaacaccttctag

SEQ ID NO: 170588 - DNA, 1608 bp, synthetic construct
  misc_feature 1..1608: note = Description of Artificial Sequence: Synthetic coding sequence
  source 1..1608: mol_type = other DNA
atgaggcgggagaggacccggggcccccaggcctgggagttccccagccccaccaagagcggctgcagcctgcagagcctgagccgggacctgcgggagctgcgggagggggagaagccagaggaccaggccgagacagaggagagctggcagggcctggccaggaagacccctgggaaggcctgtgcccctgagggcggcagctgccagcccgggaagacagagaacaccatcaccatgaccaccagccaccagccccaggaccgctacaaggctgtgtggctgatcttcttcatgctgggcctgggcaccctgctgccctggaacttcttcatgacagccacccagtacttcaccaaccggctggacatgagccagaatgtgtccctggtgacagctgagctgagcaaggatgcccaggccagcgctgccccagctgcccccctgcctgagaggaacagcctgagcgccatcttcaacaacgtgatgaccctgtgtgccatgctgcccctgctgctcttcacctacctgaacagcttcctgcaccagaggatcccccagagcgtgcgcatcctgggcagcctggtggccatcctgctggtgttcctgatcacagccatcctggtgaaggtgcagctggatgccctgcccttctttgtgatcaccatgatcaagatcgtgctgatcaacagctttggagccatcctgcagggcagcctgtttggcctggccggcctgctgcctgccagctacacagcccccatcatgagcggccagggcctggccggcttctttgcctctgtggccatgatctgtgccatcgccagcggcagcgagctgtctgagagcgccttcggctacttcatcacagcctgtgctgtgatcatcctgaccatcatctgctacctgggcctgccccggctggagttctaccgctactaccagcagctgaagctggagggccctggagagcaggagaccaagctggacctgatcagcaagggggaggagccccgggccggcaaggaggagagcggcgtgtctgtgagcaacagccagcccaccaatgaaagccacagcatcaaggccatcctgaagaacatctctgtgctggccttctctgtgtgcttcatcttcaccatcaccatcggcatgtttcctgctgtgacagtggaggtgaagagcagcattgctggcagcagcacctgggagcgctacttcatccctgtgtcctgcttcctgaccttcaacatctttgactggctgggccgcagcctgacagctgtgttcatgtggccaggcaaggacagccgctggctgcccagcctggtgctggcccggctggtgtttgtgcccctgctgctgctgtgcaacatcaagccccggcgctacctgactgtggtgtttgaacatgatgcctggttcatcttcttcatggccgcctttgccttcagcaatggctacctggccagcctgtgcatgtgcttcggccccaagaaggtgaagccagctgaggccgagacagctggggccatcatggccttcttcctgtgcctgggcctggccctgggcgctgtgttctccttcctgttccgggccatcgtgtag

SEQ ID NO: 170589 - DNA, 1371 bp, synthetic construct
  misc_feature 1..1371: note = Description of Artificial Sequence: Synthetic coding sequence
  source 1..1371: mol_type = other DNA
atgaccaccagccaccagccccaggaccgctacaaggctgtgtggctgatcttcttcatgctgggcctgggcaccctgctgccctggaacttcttcatgacagccacccagtacttcaccaaccggctggacatgagccagaatgtgtccctggtgacagctgagctgagcaaggatgcccaggccagcgctgccccagctgcccccctgcctgagaggaacagcctgagcgccatcttcaacaacgtgatgaccctgtgtgccatgctgcccctgctgctcttcacctacctgaacagcttcctgcaccagaggatcccccagagcgtgcgcatcctgggcagcctggtggccatcctgctggtgttcctgatcacagccatcctggtgaaggtgcagctggatgccctgcccttcttcgtcatcaccatgatcaagatcgtgctgatcaacagctttggagccatcctgcagggcagcctgtttggcctggccggcctgctgcctgccagctacacagcccccatcatgagcggccagggcctggccggcttctttgcctctgtggccatgatctgtgccatcgccagcggcagcgagctgtctgagagcgccttcggctacttcatcacagcctgtgccgtcatcatcctgaccatcatctgctacctgggcctgccccggctggagttctaccgctactaccagcagctgaagctggagggccctggagagcaggagaccaagctggacctgatcagcaaaggagaggagcccagggctgggaaggaggagagcggcgtgtctgtgagcaacagccagcccaccaatgaaagccacagcatcaaggccatcctgaagaacatctctgtgctggccttctctgtgtgcttcatcttcaccatcaccatcggcatgtttcctgctgtgacagtggaggtgaagagcagcattgctggcagcagcacctgggagcgctacttcatccctgtgtcctgcttcctgaccttcaacatctttgactggctgggccgcagcctgacagctgtgttcatgtggccaggcaaggacagccgctggctgcccagcctggtgctggcccggctggtgtttgtgcccctgctgctgctgtgcaacatcaagccccggcgctacctgactgtggtgtttgaacatgatgcctggttcatcttcttcatggccgcctttgccttcagcaatggctacctggccagcctgtgcatgtgcttcggccccaagaaggtgaagccagctgaggccgagacagctggggccatcatggccttcttcctgtgcctgggcctggccctgggcgctgtgttctccttcctgttccgggccatcgtgtag

SEQ ID NO: 170590 - DNA, 1371 bp, synthetic construct; identical to SEQ ID NO: 170589
  misc_feature 1..1371: note = Description of Artificial Sequence: Synthetic coding sequence
  source 1..1371: mol_type = other DNA

SEQ ID NO: 170591 - DNA, 1371 bp, synthetic construct; identical to SEQ ID NO: 170589
  misc_feature 1..1371: note = Description of Artificial Sequence: Synthetic coding sequence
  source 1..1371: mol_type = other DNA

SEQ ID NO: 170592 - DNA, 1371 bp, synthetic construct; identical to SEQ ID NO: 170589
  misc_feature 1..1371: note = Description of Artificial Sequence: Synthetic coding sequence
  source 1..1371: mol_type = other DNA

SEQ ID NO: 170593 - DNA, 1371 bp, synthetic construct; identical to SEQ ID NO: 170589
  misc_feature 1..1371: note = Description of Artificial Sequence: Synthetic coding sequence
  source 1..1371: mol_type = other DNA

SEQ ID NO: 170594 - DNA, 1371 bp, synthetic construct; identical to SEQ ID NO: 170589
  misc_feature 1..1371: note = Description of Artificial Sequence: Synthetic coding sequence
  source 1..1371: mol_type = other DNA

SEQ ID NO: 170595 - DNA, 1371 bp, synthetic construct; identical to SEQ ID NO: 170589
  misc_feature 1..1371: note = Description of Artificial Sequence: Synthetic coding sequence
  source 1..1371: mol_type = other DNA

SEQ ID NO: 170596 - DNA, 1371 bp, synthetic construct; identical to SEQ ID NO: 170589
  misc_feature 1..1371: note = Description of Artificial Sequence: Synthetic coding sequence
  source 1..1371: mol_type = other DNA

SEQ ID NO: 170597 - DNA, 1371 bp, synthetic construct; identical to SEQ ID NO: 170589
  misc_feature 1..1371: note = Description of Artificial Sequence: Synthetic coding sequence
  source 1..1371: mol_type = other DNA

SEQ ID NO: 170598 - DNA, 510 bp, synthetic construct
  misc_feature 1..510: note = Description of Artificial Sequence: Synthetic coding sequence
  source 1..510: mol_type = other DNA
atgaggcgggagaggacccggggcccccaggcctgggagttccccagccccaccaagagcggctgcagcctgcagagcctgagccgctacaaggctgtgtggctgatcttcttcatgctgggcctgggcaccctgctgccctggaacttcttcatgacagccacccagtacttcaccaaccggctggacatgagccagaatgtgtccctggtgacagctgagctgagcaaggatgcccaggccagcgctgccccagctgcccccctgcctgagaggaacagcctgagcgccatcttcaacaacgtgatgaccctgtgtgccatgctgcccctgctgctcttcacctacctgaacagcttcctgcaccagaggatcccccagagcgtgcgcatcctgggcagcctggtggccatcctgctggtgttcctgatcacagccatcctggtgaaggtgcagctggatgccctgcccttctttgtgatcaccatgatcaagatcgtgctgatctag

SEQ ID NO: 170599 - DNA, 1371 bp, synthetic construct
  misc_feature 1..1371: note = Description of Artificial Sequence: Synthetic coding sequence
  source 1..1371: mol_type = other DNA
atggcccggggagatgccccccgggacagctaccacctggtgggcatctccttcttcatcctgggcctgggcaccctgctgccctggaacttcttcatcacagccatcccctacttccaggcccggctggccggggccggcaacagcacagcccgcatcctgagcaccaaccacactggaccagaagatgccttcaacttcaacaactgggtgaccctgctgagccagctgcccctgctgctcttcaccctgctgaacagcttcctgtaccagtgtgtgcctgagaccgtgcgcatcctgggcagcctgctggccatcctgctgctgtttgccctgacagctgccctggtgaaggtggacatgagccctggccccttcttcagcatcaccatggcctctgtgtgcttcatcaacagcttctctgctgtgctgcagggcagcctgtttggccagctgggcaccatgcccagcacctacagcaccctcttcctgagcggccagggcctggccggcatctttgctgccctggccatgctgctgtccatggccagcggcgtggatgctgagaccagcgccctgggctacttcatcaccccctgtgtgggcatcctgatgagcatcgtgtgctacctgagcctgccccacctgaagtttgcccgctactacctggccaacaagagcagccaggcccaggcccaggagctggagaccaaggccgagctgctgcagagtgatgaaaatggcatccccagcagcccccagaaggtggccctgaccctggacctggacctggagaaggagcctgagagcgagccagatgagccccagaagccaggcaagcccagcgtcttcaccgtcttccagaagatctggctgacagccctgtgcctggtgctggtgttcaccgtgaccctgagcgtcttccctgccatcacagccatggtgaccagcagcaccagccctgggaagtggagccagttcttcaaccccatctgctgcttcctgctcttcaacatcatggactggctgggccgcagcctgaccagctacttcctgtggccagatgaggacagccggctgctgcccctgctggtgtgcctgcgcttcctgtttgtgcccctcttcatgctgtgccacgtgccccagaggagccggctgcccatcctcttcccccaggatgcctacttcatcaccttcatgctgctgtttgctgtgtccaatggctacctggtgtccctgaccatgtgcctggccccccggcaggtgctgccccatgagcgggaggtggccggggccctgatgaccttcttcctggccctgggcctgagctgtggggccagcctgtccttcctgttcaaggccctgctgtag

SEQ ID NO: 170600 - DNA, 1371 bp, synthetic construct; identical to SEQ ID NO: 170599
  misc_feature 1..1371: note = Description of Artificial Sequence: Synthetic coding sequence
  source 1..1371: mol_type = other DNA

SEQ ID NO: 170601 - DNA, 1371 bp, synthetic construct; identical to SEQ ID NO: 170599
  misc_feature 1..1371: note = Description of Artificial Sequence: Synthetic coding sequence
  source 1..1371: mol_type = other DNA

SEQ ID NO: 170602 - DNA, 1428 bp, synthetic construct
  misc_feature 1..1428: note = Description of Artificial Sequence: Synthetic coding sequence
  source 1..1428: mol_type = other DNA
atggctgtggtgtctgaagatgacttccagcacagcagcaacagcacctaccgcaccaccagcagcagcctgcgggctgaccaggaggccctgctggagaagctgctggacaggcctcctcctggcctgcagaggccagaagatcgcttctgtggcacctacatcatcttcttcagcctgggcatcggcagcctgctgccctggaacttcttcatcacagccaaggagtactggatgttcaagctgaggaacagcagcagccctgccaccggggaggaccctgagggcagtgacatcctgaactactttgagagctacctggccgtggccagcacagtgcccagcatgctgtgcctggtggccaacttcctgctggtgaacagagtggccgtgcacatccgggtgctggccagcctgaccgtcatcctggccatcttcatggtgatcacagccctggtgaaggtggacaccagctcctggacccggggcttctttgctgtgaccatcgtgtgcatggtgatcctgagcggggccagcaccgtcttcagcagcagcatctacggcatgacaggcagcttccccatgaggaacagccaggccctgatctctggaggagccatgggcggcaccgtgtctgctgtggccagcctggtggacctggccgccagcagtgatgtgagaaattctgccctggccttcttcctgacagccaccgtcttcctggtgctgtgcatgggcctgtacctgctgctgagccggctggagtatgcccgctactacatgaggcctgtgctggccgcccacgtgttttctggagaggaggagctgccccaggacagcctgagcgcccccagcgtggccagccgcttcatcgacagccacaccccacccctgcggcccatcctgaagaagacagccagcctgggcttctgtgtgacctacgtgttcttcatcaccagcctcatctacccagccatctgcaccaacatcgagagcctgaacaagggcagcggcagcctgtggaccaccaagttcttcatccccctgaccaccttcctgctgtacaactttgctgacctgtgtggccggcagctgacagcctggatccaggtgcccggccccaacagcaaggccctgcccggctttgtgctgctgcggacctgcctgatccccctgtttgtgctgtgcaactaccagccccgggtgcacctgaagacagtggtgttccagagtgatgtgtacccagccctgctgagcagcctgctgggcctgagcaatggctacctgagcaccctggccctgctgtatggccccaagatcgtgccccgggagctggccgaggccactggagtggtgatgtccttctacgtgtgcctgggcctgaccctgggcagcgcctgcagcaccctgctggtgcacctgatctag

SEQ ID NO: 170603 - DNA, 1590 bp, synthetic construct
  misc_feature 1..1590: note = Description of Artificial Sequence: Synthetic coding sequence
  source 1..1590: mol_type = other DNA
atgagccaggacacagaggtggacatgaaggaggtggagctgaatgagctggagcctgagaagcagcccatgaatgctgccagcggggccgccatgagcctggccggggctgagaagaatggcctggtgaagatcaaggtggctgaagatgaggccgaggccgctgctgctgccaagttcaccggcctgagcaaggaggagctgctgaaggtggccggcagccctggctgggtgaggacccgctgggccctgctgctgctcttctggctgggctggctgggcatgctggccggggctgtggtgatcatcgtgcgggccccccgctgccgggagctgcctgcccagaagtggtggcacactggagccctgtaccgcatcggggacctgcaggccttccagggccatggagctggcaacctggccggcctgaagggccgcctggactacctgagcagcctgaaggtgaagggcctggtgctgggccccatccacaagaaccagaaggatgatgtggcccagacagacctgctgcagattgaccccaactttggcagcaaagaagattttgacagcctgctgcagagcgccaagaagaagagcatccgggtcatcctggacctgacccccaactacagaggagagaacagctggttcagcacccaggtggacacagtggccaccaaggtgaaggatgccctggagttctggctgcaggccggcgtggatggcttccaggtgcgggacatcgagaacctgaaggatgccagcagcttcctggccgagtggcagaacatcaccaagggcttctctgaagatcggctgctgattgctggcaccaacagcagtgacctgcagcagatcctgagcctgctggagagcaacaaggacctgctgctgaccagcagctacctgagtgacagcggcagcactggagagcacaccaagagcctggtgacccagtacctgaatgccactggaaaccgctggtgctcctggagcctgagccaggcccggctgctgaccagcttcctgcctgcccagctgctgcggctgtaccagctgatgctgttcaccctgcccggcacccctgtgttctcctatggagatgaaattggcctggatgctgctgccctgcccggccagcccatggaggcccctgtgatgctgtgggatgagagcagcttcccagacatccctggagctgtgtctgccaacatgacagtgaagggccagagtgaagatcctggcagcctgctgagcctcttccggcggctgagtgaccagaggagcaaggagaggagcctgctgcatggagacttccacgccttctctgctggccctggcctcttctcctacatccgccactgggaccagaatgaacgcttcctggtggtgctgaactttggagatgtgggcctgtctgctggcctgcaggccagtgacctgcctgccagcgccagcctgcctgccaaggctgacctgctgctgagcacccagcccggccgggaggagggcagccccctggagctggagcggctgaagctggagccccatgagggcctgctgctgcgcttcccctatgctgcctag

SEQ ID NO: 170604 - DNA, 1707 bp, synthetic construct
  misc_feature 1..1707: note = Description of Artificial Sequence: Synthetic coding sequence
  source 1..1707: mol_type = other DNA
atggagctgcagcccccagaggccagcattgctgtggtgtccatcccccggcagctgcccggcagccacagcgaggccggcgtgcagggcctgtctgctggagatgattctggcaccatgagccaggacacagaggtggacatgaaggaggtggagctgaatgagctggagcctgagaagcagcccatgaatgctgccagcggggccgccatgagcctggccggggctgagaagaatggcctggtgaagatcaaggtggccgaggatgaagctgaggccgctgctgctgccaagttcaccggcctgagcaaggaggagctgctgaaggtggccggcagccctggctgggtgaggacccgctgggccctgctgctgctcttctggctgggctggctgggcatgctggccggggctgtggtgatcatcgtgcgggccccccgctgccgggagctgcctgcccagaagtggtggcacactggagccctgtacagaattggagacctgcaggccttccagggccacggggccggcaacctggccggcctgaagggccgcctggactacctgagcagcctgaaggtgaagggcctggtgctgggccccatccacaagaaccagaaggatgatgtggcccagacagacctgctgcagattgaccccaactttggcagcaaggaggactttgacagcctgctgcagagcgccaagaagaagagcatccgggtcatcctggacctgacccccaactacagaggagaaaattcctggttcagcacccaggtggacacagtggccaccaaggtgaaggatgccctggagttctggctgcaggccggcgtggatggcttccaggtgcgggacatcgagaacctgaaggatgccagcagcttcctggccgagtggcagaacatcaccaagggcttcagcgaggaccggctgctgattgctggcaccaacagcagtgacctgcagcagatcctgagcctgctggagagcaacaaggacctgctgctgaccagcagctacctgagtgacagcggcagcactggagagcacaccaagagcctggtgacccagtacctgaatgccaccggcaaccgctggtgctcctggagcctgagccaggcccggctgctgaccagcttcctgcctgcccagctgctgcggctgtaccagctgatgctgttcaccctgcccggcacccctgtgttctcctatggagatgagatcggcctggatgctgctgccctgcccggccagcccatggaggcccctgtgatgctgtgggatgagagcagcttcccagacatccctggagctgtgtctgccaacatgacagtgaagggccagagcgaggaccccggcagcctgctgagcctcttccggcggctgagtgaccagaggagcaaggagaggagcctgctgcacggggacttccacgccttctctgctggccctggcctcttctcctacatccgccactgggaccagaatgaacgcttcctggtggtgctgaactttggagatgtgggcctgtctgctggcctgcaggccagtgacctgcctgccagcgccagcctgcctgccaaggctgacctgctgctgagcacccagcccggccgggaggagggcagccccctggagctggagcggctgaagctggagccccatgagggcctgctgctgcgcttcccctatgctgcctag

SEQ ID NO: 170605 - DNA, 1893 bp, synthetic construct
  misc_feature 1..1893: note = Description of Artificial Sequence: Synthetic coding sequence
  source 1..1893: mol_type = other DNA
atggagctgcagcccccagaggccagcattgctgtggtgtccatcccccggcagctgcccggcagccacagcgaggccggcgtgcagggcctgtctgctggagatgattctgagctgggcagccactgtgtggcccagacaggcctggagctgctggccagcggggaccccctgcccagcgccagccagaatgctgagatgattgagaccggcagtgactgtgtgacccaggccggcctgcagctgctggccagcagtgaccccccagccctggccagcaagaatgctgaggtgacaggcaccatgagccaggacacagaggtggacatgaaggaggtggagctgaatgagctggagcctgagaagcagcccatgaatgctgccagcggggccgccatgagcctggccggggctgagaagaatggcctggtgaagatcaaggtggccgaggatgaagctgaggccgctgctgctgccaagttcaccggcctgagcaaggaggagctgctgaaggtggccggcagccctggctgggtgaggacccgctgggccctgctgctgctcttctggctgggctggctgggcatgctggccggggctgtggtgatcatcgtgcgggccccccgctgccgggagctgcctgcccagaagtggtggcacactggagccctgtacagaattggagacctgcaggccttccagggccacggggccggcaacctggccggcctgaagggccgcctggactacctgagcagcctgaaggtgaagggcctggtgctgggccccatccacaagaaccagaaggatgatgtggcccagacagacctgctgcagattgaccccaactttggcagcaaggaggactttgacagcctgctgcagagcgccaagaagaagagcatccgggtcatcctggacctgacccccaactacagaggagaaaattcctggttcagcacccaggtggacacagtggccaccaaggtgaaggatgccctggagttctggctgcaggccggcgtggatggcttccaggtgcgggacatcgagaacctgaaggatgccagcagcttcctggccgagtggcagaacatcaccaagggcttcagcgaggaccggctgctgattgctggcaccaacagcagtgacctgcagcagatcctgagcctgctggagagcaacaaggacctgctgctgaccagcagctacctgagtgacagcggcagcactggagagcacaccaagagcctggtgacccagtacctgaatgccaccggcaaccgctggtgctcctggagcctgagccaggcccggctgctgaccagcttcctgcctgcccagctgctgcggctgtaccagctgatgctgttcaccctgcccggcacccctgtgttctcctatggagatgagatcggcctggatgctgctgccctgcccggccagcccatggaggcccctgtgatgctgtgggatgagagcagcttcccagacatccctggagctgtgtctgccaacatgacagtgaagggccagagcgaggaccccggcagcctgctgagcctcttccggcggctgagtgaccagaggagcaaggagaggagcctgctgcacggggacttccacgccttctctgctggccctggcctcttctcctacatccgccactgggaccagaatgaacgcttcctggtggtgctgaactttggagatgtgggcctgtctgctggcctgcaggccagtgacctgcctgccagcgccagcctgcctgccaaggctgacctgctgctgagcacccagcccggccgggaggagggcagccccctggagctggagcggctgaagctggagccccatgagggcctgctgctgcgcttcccctatgctgcctag

SEQ ID NO: 170606 - DNA, 1896 bp, synthetic construct
  misc_feature 1..1896: note = Description of Artificial Sequence: Synthetic coding sequence
  source 1..1896: mol_type = other DNA
atggagctgcagcccccagaggccagcattgctgtggtgtccatcccccggcagctgcccggcagccacagcgaggccggcgtgcagggcctgtctgctggagatgattctgaaacaggcagtgactgtgtgacccaggccggcctgcagctgctggccagcagtgaccccccagccctggccagcaagaatgctgaggtgacagtggagaccggcttccaccacgtgtcccaggccgacatcgagttcctgaccagcattgaccccacagccagcgccagcggcagcgctggcatcaccggcaccatgagccaggacacagaggtggacatgaaggaggtggagctgaatgagctggagcctgagaagcagcccatgaatgctgccagcggggccgccatgagcctggccggggctgagaagaatggcctggtgaagatcaaggtggctgaagatgaggccgaggccgctgctgctgccaagttcaccggcctgagcaaggaggagctgctgaaggtggccggcagccctggctgggtgaggacccgctgggccctgctgctgctcttctggctgggctggctgggcatgctggccggggctgtggtgatcatcgtgcgggccccccgctgccgggagctgcctgcccagaagtggtggcacactggagccctgtaccgcatcggggacctgcaggccttccagggccatggagctggcaacctggccggcctgaagggccgcctggactacctgagcagcctgaaggtgaagggcctggtgctgggccccatccacaagaaccagaaggatgatgtggcccagacagacctgctgcagattgaccccaactttggcagcaaagaagattttgacagcctgctgcagagcgccaagaagaagagcatccgggtcatcctggacctgacccccaactacagaggagagaacagctggttcagcacccaggtggacacagtggccaccaaggtgaaggatgccctggagttctggctgcaggccggcgtggatggcttccaggtgcgggacatcgagaacctgaaggatgccagcagcttcctggccgagtggcagaacatcaccaagggcttctctgaagatcggctgctgattgctggcaccaacagcagtgacctgcagcagatcctgagcctgctggagagcaacaaggacctgctgctgaccagcagctacctgagtgacagcggcagcactggagagcacaccaagagcctggtgacccagtacctgaatgccactggaaaccgctggtgctcctggagcctgagccaggcccggctgctgaccagcttcctgcctgcccagctgctgcggctgtaccagctgatgctgttcaccctgcccggcacccctgtgttctcctatggagatgaaattggcctggatgctgctgccctgcccggccagcccatggaggcccctgtgatgctgtgggatgagagcagcttcccagacatccctggagctgtgtctgccaacatgacagtgaagggccagagtgaagatcctggcagcctgctgagcctcttccggcggctgagtgaccagaggagcaaggagaggagcctgctgcatggagacttccacgccttctctgctggccctggcctcttctcctacatccgccactgggaccagaatgaacgcttcctggtggtgctgaactttggagatgtgggcctgtctgctggcctgcaggccagtgacctgcctgccagcgccagcctgcctgccaaggctgacctgctgctgagcacccagcccggccgggaggagggcagccccctggagctggagcggctgaagctggagccccatgagggcctgctgctgcgcttcccctatgctgcctag

SEQ ID NO: 170607 - DNA, 1986 bp, synthetic construct
  misc_feature 1..1986: note = Description of Artificial Sequence: Synthetic coding sequence
  source 1..1986: mol_type = other DNA
atggagctgcagcccccagaggccagcattgctgtggtgtccatcccccggcagctgcccggcagccacagcgaggccggcgtgcagggcctgtctgctggagatgattctgagctgggcagccactgtgtggcccagacaggcctggagctgctggccagcggggaccccctgcccagcgccagccagaatgctgagatgattgagaccggcagtgactgtgtgacccaggccggcctgcagctgctggccagcagtgaccccccagccctggccagcaagaatgctgaggtgacagaaacaggcttccaccacgtgtcccaggccgacatcgagttcctgaccagcattgaccccacagccagcgccagcggcagcgctggcatcaccggcaccatgagccaggacacagaggtggacatgaaggaggtggagctgaatgagctggagcctgagaagcagcccatgaatgctgccagcggggccgccatgagcctggccggggctgagaagaatggcctggtgaagatcaaggtggctgaagatgaggccgaggccgctgctgctgccaagttcaccggcctgagcaaggaggagctgctgaaggtggccggcagccctggctgggtgaggacccgctgggccctgctgctgctcttctggctgggctggctgggcatgctggccggggctgtggtgatcatcgtgcgggccccccgctgccgggagctgcctgcccagaagtggtggcacactggagccctgtaccgcatcggggacctgcaggccttccagggccatggagctggcaacctggccggcctgaagggccgcctggactacctgagcagcctgaaggtgaagggcctggtgctgggccccatccacaagaaccagaaggatgatgtggcccagacagacctgctgcagattgaccccaactttggcagcaaagaagattttgacagcctgctgcagagcgccaagaagaagagcatccgggtcatcctggacctgacccccaactacagaggagagaacagctggttcagcacccaggtggacacagtggccaccaaggtgaaggatgccctggagttctggctgcaggccggcgtggatggcttccaggtgcgggacatcgagaacctgaaggatgccagcagcttcctggccgagtggcagaacatcaccaagggcttctctgaagatcggctgctgattgctggcaccaacagcagtgacctgcagcagatcctgagcctgctggagagcaacaaggacctgctgctgaccagcagctacctgagtgacagcggcagcactggagagcacaccaagagcctggtgacccagtacctgaatgccactggaaaccgctggtgctcctggagcctgagccaggcccggctgctgaccagcttcctgcctgcccagctgctgcggctgtaccagctgatgctgttcaccctgcccggcacccctgtgttctcctatggagatgaaattggcctggatgctgctgccctgcccggccagcccatggaggcccctgtgatgctgtgggatgagagcagcttcccagacatccctggagctgtgtctgccaacatgacagtgaagggccagagtgaagatcctggcagcctgctgagcctcttccggcggctgagtgaccagaggagcaaggagaggagcctgctgcatggagacttccacgccttctctgctggccctggcctcttctcctacatccgccactgggaccagaatgaacgcttcctggtggtgctgaactttggagatgtgggcctgtctgctggcctgcaggccagtgacctgcctgccagcgccagcctgcctgccaaggctgacctgctgctgagcacccagcccggccgggaggagggcagccccctggagctggagcggctgaagctggagccccatgagggcctgctgctgcgcttcccctatgctgcctag

SEQ ID NO: 170608 - DNA, 1536 bp, synthetic construct
  misc_feature 1..1536: note = Description of Artificial Sequence: Synthetic coding sequence
  source 1..1536: mol_type = other DNA
atgagccaggacacagaggtggacatgaaggaggtggagctgaatgagctggagcctgagaagcagcccatgaatgctgccagcggggccgccatgagcctggccggggctgagaagaatggcctggtgaagatcaaggtggctgaagatgaggccgaggccgctgctgctgccaagttcaccggcctgagcaaggaggagctgctcttctggctgggctggctgggcatgctggccggggctgtggtgatcatcgtgcgggccccccgctgccgggagctgcctgcccagaagtggtggcacactggagccctgtaccgcatcggggacctgcaggccttccagggccatggagctggcaacctggccggcctgaagggccgcctggactacctgagcagcctgaaggtgaagggcctggtgctgggccccatccacaagaaccagaaggatgatgtggcccagacagacctgctgcagattgaccccaactttggcagcaaagaagattttgacagcctgctgcagagcgccaagaagaagagcatccgggtcatcctggacctgacccccaactacagaggagagaacagctggttcagcacccaggtggacacagtggccaccaaggtgaaggatgccctggagttctggctgcaggccggcgtggatggcttccaggtgcgggacatcgagaacctgaaggatgccagcagcttcctggccgagtggcagaacatcaccaagggcttctctgaagatcggctgctgattgctggcaccaacagcagtgacctgcagcagatcctgagcctgctggagagcaacaaggacctgctgctgaccagcagctacctgagtgacagcggcagcactggagagcacaccaagagcctggtgacccagtacctgaatgccactggaaaccgctggtgctcctggagcctgagccaggcccggctgctgaccagcttcctgcctgcccagctgctgcggctgtaccagctgatgctgttcaccctgcccggcacccctgtgttctcctatggagatgaaattggcctggatgctgctgccctgcccggccagcccatggaggcccctgtgatgctgtgggatgagagcagcttcccagacatccctggagctgtgtctgccaacatgacagtgaagggccagagtgaagatcctggcagcctgctgagcctcttccggcggctgagtgaccagaggagcaaggagaggagcctgctgcatggagacttccacgccttctctgctggccctggcctcttctcctacatccgccactgggaccagaatgaacgcttcctggtggtgctgaactttggagatgtgggcctgtctgctggcctgcaggccagtgacctgcctgccagcgccagcctgcctgccaaggctgacctgctgctgagcacccagcccggccgggaggagggcagccccctggagctggagcggctgaagctggagccccatgagggcctgctgctgcgcttcccctatgctgcctag

SEQ ID NO: 170609 - DNA, 408 bp, synthetic construct
  misc_feature 1..408: note = Description of Artificial Sequence: Synthetic coding sequence
  source 1..408: mol_type = other DNA
atgagccaggacacagaggtggacatgaaggaggtggagctgaatgagctggagcctgagaagcagcccatgaatgctgccagcggggccgccatgagcctggccggggctgagaagaatggcctggtgaagatcaaggtggctgaagatgaggccgaggccgctgctgctgccaagttcaccggcctgagcaaggaggagctgctgaaggtggccggcagccctggctgggtgaggacccgctgggccctgctgctgctcttctggctgggctggctgggcatgctggccggggctgtggtgatcatcgtgcgggccccccgctgccgggagctgcctgcccagaagtggtggcacactggagccctgtaccgcatcggggacctgcaggccttccagggccactag

SEQ ID NO: 170610 - DNA, 2058 bp, synthetic construct
  misc_feature 1..2058: note = Description of Artificial Sequence: Synthetic coding sequence
  source 1..2058: mol_type = other DNA
atggccgaggacaagagcaagagggacagcattgagatgtccatgaagggctgccagaccaacaacggctttgtgcacaatgaagacatcctggagcagaccccagaccccggcagcagcacagacaacctgaagcacagcacccggggcatcctgggcagccaggagccagacttcaagggcgtgcagccctatgccggcatgcccaaggaggtgctcttccagttcagcggccaggcccgctaccgcatcccccgggagatcctcttctggctgactgtggcctctgtgctggtgctgattgctgccaccatcgccatcatcgccctgagccccaagtgcctggactggtggcaggagggccccatgtaccagatctaccccaggagcttcaaggacagcaacaaggatggaaatggagacctgaagggcatccaggacaagctggactacatcacagccctgaacatcaagacagtgtggatcaccagcttctacaagagcagcctgaaggacttccgctatggagtggaggacttccgggaggtggaccccatcttcggcaccatggaggactttgagaacctggtggccgccatccatgacaagggcctgaagctgatcatcgacttcatccccaaccacaccagtgacaagcacatctggttccagctgagcaggaccaggacaggcaagtacacagactactacatctggcatgactgcacccatgaaaatggcaagaccatcccccccaacaactggctgtctgtgtatggcaacagctcctggcactttgatgaggtgaggaaccagtgctacttccaccagttcatgaaggagcagcctgacctgaacttcaggaacccagatgtgcaggaggagatcaaggagatcctgcgcttctggctgaccaagggcgtggatggcttcagcctggatgctgtgaagttcctgctggaggccaagcacctgagagatgagatccaggtgaacaagacccagatcccagacacagtgacccagtacagcgagctgtaccatgacttcaccaccacccaggtgggcatgcatgacatcgtgcgctccttccggcagaccatggaccagtacagcacagagcccggccgctaccgcttcatgggcacagaggcctatgcagagagcattgacagaacagtgatgtactacggcctgcccttcatccaggaggccgacttccccttcaacaactacctgtccatgctggacacagtgtctggcaacagcgtgtatgaagtcatcacctcctggatggagaacatgcctgagggcaagtggcccaactggatgattggaggccctgacagcagccggctgaccagccggctgggcaaccagtatgtgaatgtgatgaacatgctgctcttcaccctgcccggcacccccatcacctactacggggaggagatcggcatgggcaacatcgtggccgccaacctgaatgaaagctatgacatcaacaccctgcggagcaagagccccatgcagtgggacaacagcagcaatgccggcttcagcgaggccagcaacacctggctgcccaccaacagcgactaccacacagtgaatgtggatgtgcagaagacccagcccaggtctgccctgaagctgtaccaggacctgagcctgctgcacgccaatgagctgctgctgaacagaggctggttctgccacctgagaaatgacagccactacgtggtgtacacccgggagctggatggcatcgaccgcatcttcatcgtggtgctgaactttggagagagcaccctgctgaacctgcacaacatgatcagcggcctgcctgccaagatgaggatccggctgagcaccaacagcgctgacaagggcagcaaggtggacaccagcggcatcttcctggacaagggggagggcctcatctttgagcacaacaccaagaacctgctgcaccggcagacagccttccgggaccgctgctttgtgagcaacagagcctgctacagctctgtgctgaacatcctgtacaccagctgctag

SEQ ID NO: 170611 - DNA, 1866 bp, synthetic construct
  misc_feature 1..1866: note = Description of Artificial Sequence: Synthetic coding sequence
  source 1..1866: mol_type = other DNA
atgaagaccttctggagccggccccgcatccagttcagcggccaggcccgctaccgcatcccccgggagatcctcttctggctgactgtggcctctgtgctggtgctgattgctgccaccatcgccatcatcgccctgagccccaagtgcctggactggtggcaggagggccccatgtaccagatctaccccaggagcttcaaggacagcaacaaggatggaaatggagacctgaagggcatccaggacaagctggactacatcacagccctgaacatcaagacagtgtggatcaccagcttctacaagagcagcctgaaggacttccgctatggagtggaggacttccgggaggtggaccccatcttcggcaccatggaggactttgagaacctggtggccgccatccatgacaagggcctgaagctgatcatcgacttcatccccaaccacaccagtgacaagcacatctggttccagctgagcaggaccaggacaggcaagtacacagactactacatctggcatgactgcacccatgaaaatggcaagaccatcccccccaacaactggctgtctgtgtatggcaacagctcctggcactttgatgaggtgaggaaccagtgctacttccaccagttcatgaaggagcagcctgacctgaacttcaggaacccagatgtgcaggaggagatcaaggagatcctgcgcttctggctgaccaagggcgtggatggcttcagcctggatgctgtgaagttcctgctggaggccaagcacctgagagatgagatccaggtgaacaagacccagatcccagacacagtgacccagtacagcgagctgtaccatgacttcaccaccacccaggtgggcatgcatgacatcgtgcgctccttccggcagaccatggaccagtacagcacagagcccggccgctaccgcttcatgggcacagaggcctatgcagagagcattgacagaacagtgatgtactacggcctgcccttcatccaggaggccgacttccccttcaacaactacctgtccatgctggacacagtgtctggcaacagcgtgtatgaagtcatcacctcctggatggagaacatgcctgagggcaagtggcccaactggatgattggaggccctgacagcagccggctgaccagccggctgggcaaccagtatgtgaatgtgatgaacatgctgctcttcaccctgcccggcacccccatcacctactacggggaggagatcggcatgggcaacatcgtggccgccaacctgaatgaaagctatgacatcaacaccctgcggagcaagagccccatgcagtgggacaacagcagcaatgccggcttcagcgaggccagcaacacctggctgcccaccaacagcgactaccacacagtgaatgtggatgtgcagaagacccagcccaggtctgccctgaagctgtaccaggacctgagcctgctgcacgccaatgagctgctgctgaacagaggctggttctgccacctgagaaatgacagccactacgtggtgtacacccgggagctggatggcatcgaccgcatcttcatcgtggtgctgaactttggagagagcaccctgctgaacctgcacaacatgatcagcggcctgcctgccaagatgaggatccggctgagcaccaacagcgctgacaagggcagcaaggtggacaccagcggcatcttcctggacaagggggagggcctcatctttgagcacaacaccaagaacctgctgcaccggcagacagccttccgggaccgctgctttgtgagcaacagagcctgctacagctctgtgctgaacatcctgtacaccagctgctag

SEQ ID NO: 170612 - DNA, 1656 bp, synthetic construct
  misc_feature 1..1656: note = Description of Artificial Sequence: Synthetic coding sequence
  source 1..1656: mol_type = other DNA
atggccgaggacaagagcaagagggacagcattgagatgtccatgaagggctgccagaccaacaacggctttgtgcacaatgaagacatcctggagcagaccccagaccccggcagcagcacagacaacctgaagcacagcacccggggcatcctgggcagccaggagccagacttcaagggcgtgcagccctatgccggcatgcccaaggaggtgctcttccagttcagcggccaggcccgctaccgcatcccccgggagatcctcttctggctgactgtggcctctgtgctggtgctgattgctgccaccatcgccatcatcgccctgagccccaagtgcctggactggtggcaggagggccccatgtaccagatctaccccaggagcttcaaggacagcaacaaggatggaaatggagacctgaagggcatccaggacaagctggactacatcacagccctgaacatcaagacagtgtggatcaccagcttctacaagagcagcctgaaggacttccgctatggagtggaggacttccgggaggtggaccccatcttcggcaccatggaggactttgagaacctggtggccgccatccatgacaagggcctgaagctgatcatcgacttcatccccaaccacaccagtgacaagcacatctggttccagctgagcaggaccaggacaggcaagtacacagactactacatctggcatgactgcacccatgaaaatggcaagaccatcccccccaacaactggctgtctgtgtatggcaacagctcctggcactttgatgaggtgaggaaccagtgctacttccaccagttcatgaaggagcagcctgacctgaacttcaggaacccagatgtgcaggaggagatcaaggagatcctgcgcttctggctgaccaagggcgtggatggcttcagcctggatgctgtgaagttcctgctggaggccaagcacctgagagatgagatccaggtgaacaagacccagatcccagacacagtgacccagtacagcgagctgtaccatgacttcaccaccacccaggtgggcatgcatgacatcgtgcgctccttccggcagaccatggaccagtacagcacagagcccggccgctaccgcttcatgggcacagaggcctatgcagagagcattgacagaacagtgatgtactacggcctgcccttcatccaggaggccgacttccccttcaacaactacctgtccatgctggacacagtgtctggcaacagcgtgtatgaagtcatcacctcctggatggagaacatgcctgagggcaagtggcccaactggatgattggaggccctgacagcagccggctgaccagccggctgggcaaccagtatgtgaatgtgatgaacatgctgctcttcaccctgcccggcacccccatcacctactacggggaggagatcggcatgggcaacatcgtggccgccaacctgaatgaaagctatgacatcaacaccctgcggagcaagagccccatgcagtgggacaacagcagcaatgccggcttcagcgaggccagcaacacctggctgcccaccaacagcgactaccacacagtgaatgtggatgtgctgctgcggcacccctgcagcagcgctgtggcctag

SEQ ID NO: 170613 - DNA, 1524 bp, synthetic construct
  misc_feature 1..1524: note = Description of Artificial Sequence: Synthetic coding sequence
  source 1..1524: mol_type = other DNA
atgggctgctggggcaggaacagaggccgcctgctgtgcatgctggccctgaccttcatgttcatggtgctggaggtggtggtgtcccgggtgaccagcagcctggccatgctgagtgacagcttccacatgctgagtgatgtgctggccctggtggtggccctggtggccgagagatttgcccggaggacccacgccacccagaagaacaccttcggctggatccgggcagaggtgatgggcgccctggtgaatgccatcttcctgaccggcctgtgctttgccatcctgctggaggccatcgagcgcttcatcgagccccatgagatgcagcagcccctggtggtgctgggcgtgggcgtggccggcctgctggtgaatgtgctgggcctgtgcctcttccaccaccacagcggcttcagccaggacagcggccacggccacagccacggcggccacggccacggccacggcctgcccaagggcccccgggtgaagagcacccggcccggcagcagtgacatcaacgtggcccctggagagcagggccctgaccaggaggagaccaacaccctggtggccaacaccagcaacagcaatggcctgaagctggaccctgctgaccctgagaaccccaggtctggggacacagtggaggtgcaggtgaatggaaacctggtgcgggagccagaccacatggagctggaggaggaccgggccggccagctgaacatgagaggagtcttcctgcacgtgctgggagatgccctgggctctgtgattgtggtggtgaatgccctggtgttctacttctcctggaagggctgcagcgagggggacttctgtgtgaacccctgcttcccagacccctgcaaggcctttgtggagatcatcaacagcacccacgcctctgtgtatgaggccggcccctgctgggtgctgtacctggaccccaccctgtgtgtggtgatggtgtgcatcctgctgtacaccacctaccccctgctgaaggagagcgccctgatcctgctgcagacagtgcccaagcagattgacatccggaacctgatcaaggagctgagaaatgtggagggcgtggaggaggtgcatgagctgcacgtgtggcagctggccggcagccgcatcatcgccacagcccacatcaagtgtgaggaccccaccagctacatggaggtggccaagaccatcaaggatgtgttccacaaccacggcatccacgccaccaccatccagcctgagtttgcctctgtgggcagcaagagctctgtggtgccctgtgagctggcctgcaggacccagtgtgccctgaagcagtgctgcggcaccctgccccaggcccccagcggcaaggatgctgagaagaccccagctgtgtccatcagctgcctggagctgagcaacaacctggagaagaagcccaggaggaccaaggccgagaacatcccagctgtggtgattgagatcaagaacatgcccaacaagcagcctgagagcagcctgtag

SEQ ID NO: 170614 - DNA, 1119 bp, synthetic construct
  misc_feature 1..1119: note = Description of Artificial Sequence: Synthetic coding sequence
  source 1..1119: mol_type = other DNA
atggaggccaaggagaagcagcacctgctggatgcccggcctgccatccgcagctacacaggcagcctgtggcaggagggcgccggctggatccccctgccccggcccggcctggacctgcaggccatcgagctggccgcccagagcaaccaccactgccacgcccagaagggccctgacagccactgtgaccccaagaagggcaaggcccagaggcagctgtatgtggccagcgccatctgcctgctcttcatgattggagaggtggtgggcggctacctggcccacagcctggccgtgatgacagatgctgcccacctgctgacagactttgcctccatgctgatcagcctcttcagcctgtggatgagcagcaggcctgccaccaagaccatgaactttggctggcagagagctgagatcctgggcgccctggtgtctgtgctgagcatctgggtggtgactggagtgctggtgtacctggccgtggagcggctcatcagcggggactatgaaattgatggcggcaccatgctgatcaccagcggctgtgctgtggccgtgaacatcatcatgggcctgaccctgcaccagagcggccacggccacagccacggcaccaccaaccagcaggaggagaaccccagcgtgcgggccgccttcatccacgtgattggagacttcatgcagagcatgggcgtgctggtggccgcctacatcctgtacttcaagccagagtacaagtatgtggaccccatctgcacctttgtgttcagcatcctggtgctgggcaccaccctgaccatcctgagagatgtgatcctggtgctgatggagggcacccccaagggcgtggacttcaccgctgtgcgggacctgctgctgtctgtggagggcgtggaggccctgcacagcctgcacatctgggccctgactgtggcccagcctgtgctgtctgtgcacatcgccatcgcccagaacacagatgcccaggccgtgctgaagacagccagcagccggctgcagggcaagttccacttccacacagtgaccatccagatcgaggactacagcgaggacatgaaggactgccaggcctgccagggccccagcgactag

SEQ ID NO: 170615 - DNA, 972 bp, synthetic construct
  misc_feature 1..972: note = Description of Artificial Sequence: Synthetic coding sequence
  source 1..972: mol_type = other DNA
atggaggccaaggagaagcagcacctgctggatgcccggcctgccatccgcagctacacaggcagcctgtggcaggagggcgccggctggatccccctgccccggcccggcctggacctgcaggccatcgagctggccgcccagagcaaccaccactgccacgcccagaagggccctgacagccactgtgaccccaagaagggcaaggcccagaggcagctgtatgtggccagcgccatctgcctgctcttcatgattggagaggtggtggagatcctgggcgccctggtgtctgtgctgagcatctgggtggtgactggagtgctggtgtacctggccgtggagcggctcatcagcggggactatgaaattgatggcggcaccatgctgatcaccagcggctgtgctgtggccgtgaacatcatcatgggcctgaccctgcaccagagcggccacggccacagccacggcaccaccaaccagcaggaggagaaccccagcgtgcgggccgccttcatccacgtgattggagacttcatgcagagcatgggcgtgctggtggccgcctacatcctgtacttcaagccagagtacaagtatgtggaccccatctgcacctttgtgttcagcatcctggtgctgggcaccaccctgaccatcctgagagatgtgatcctggtgctgatggagggcacccccaagggcgtggacttcaccgctgtgcgggacctgctgctgtctgtggagggcgtggaggccctgcacagcctgcacatctgggccctgactgtggcccagcctgtgctgtctgtgcacatcgccatcgcccagaacacagatgcccaggccgtgctgaagacagccagcagccggctgcagggcaagttccacttccacacagtgaccatccagatcgaggactacagcgaggacatgaaggactgccaggcctgccagggccccagcgactag

SEQ ID NO: 170616 - DNA, 345 bp, synthetic construct
  misc_feature 1..345: note = Description of Artificial Sequence: Synthetic coding sequence
  source 1..345: mol_type = other DNA
atgggccccaggagaagaagcaggaagccagaggcccccaggagaagaagccccagccccacccccaccccaggccccagccggcggggccccagcctgggcgccagcagccaccagcacagcagaagacggcagggctggctgaaggagatcaggaagctgcagaagagcacccacctgctgatcaggaagctgcccttcagccggctggccgctgaggccttcctggtgcacctgtttgaagatgcctacctgctgaccctgcacgccggccgggtgaccctcttccccaaggatgtgcagctggcccggcgcatccggggcctggaggagggcctgggctag

SEQ ID NO: 170617 - DNA, 300 bp, synthetic construct
  misc_feature 1..300: note = Description of Artificial Sequence: Synthetic coding sequence
  source 1..300: mol_type = other DNA
atgcccttccaccactgccaccgggaccccctgcccccacctggcctgaccccagagcggctgcacgcccggcggcagctgtatgctgcctgtgctgtgtgctttgtgttcatggccggggaggtggtgggcggctacctggcccacagcctggccatcatgacagatgctgcccacctgctggctgatgtgggctccatgatgggcagcctcttcagcctgtggctgagcaccaggcctgccaccaggaccatgaccttcggctggcacaggtctgagaccctgggcgccctggcctag

SEQ ID NO: 170618 - DNA, 723 bp, synthetic construct
  misc_feature 1..723: note = Description of Artificial Sequence: Synthetic coding sequence
  source 1..723: mol_type = other DNA
atgcccttccaccactgccaccgggaccccctgcccccacctggcctgaccccagagcggctgcacgcccggcggcagctgtatgctgcctgtgctgtgtgctttgtgttcatggccggggaggtggtgggcggctacctggcccacagcctggccatcatgacagatgctgcccacctgctggctgatgtgggctccatgatgggcagcctcttcagcctgtggctgagcaccaggcctgccaccaggaccatgaccttcggctggcacaggtctgagaccctgggcgccctggcctctgtggtgtccctgtggatggtgacaggcatcctgctgtacctggcctttgtgcggctgctgcacagcgactaccacatcgagggcggggccatgctgctgacagccagcattgctgtgtgtgccaacctgctgatggcctttgtgctgcaccaggccggccccccccacagccacggcagcagaggagcagaatatgcccccctggaggagggccctgaggagcccctgcccctgggcaacacctctgtgcgggccgcctttgtgcacgtgctgggggacctgctgcagagctttggagtgctggccgccagcatcctgatctacttcaagccccagtacaaggctgctgaccccatcagcaccttcctgttcagcatctgtgccctgggcagcacagcccccaccctgagagatgtgctgtag

SEQ ID NO: 170619 - DNA, 1152 bp, synthetic construct
  misc_feature 1..1152: note = Description of Artificial Sequence: Synthetic coding sequence
  source 1..1152: mol_type = other DNA
atgagggtggccgccggggcccggggggagaacatcgagcacctgaagctgcggctggaggcccggccccccaccctgctgctcttcacagagcccagcgagcccctgcctgaggagagcaagcctgtggagatgcccttccaccactgccaccgggaccccctgcccccacctggcctgaccccagagcggctgcacgcccggcggcagctgtatgctgcctgtgctgtgtgctttgtgttcatggccggggaggtggtgggcggctacctggcccacagcctggccatcatgacagatgctgcccacctgctggctgatgtgggctccatgatgggcagcctcttcagcctgtggctgagcaccaggcctgccaccaggaccatgaccttcggctggcacaggtctgagaccctgggcgccctggcctctgtggtgtccctgtggatggtgacaggcatcctgctgtacctggcctttgtgcggctgctgcacagcgactaccacatcgagggcggggccatgctgctgacagccagcattgctgtgtgtgccaacctgctgatggcctttgtgctgcaccaggccggccccccccacagccacggcagcagaggagcagaatatgcccccctggaggagggccctgaggagcccctgcccctgggcaacacctctgtgcgggccgcctttgtgcacgtgctgggggacctgctgcagagctttggagtgctggccgccagcatcctgatctacttcaagccccagtacaaggctgctgaccccatcagcaccttcctgttcagcatctgtgccctgggcagcacagcccccaccctgagagatgtgctgcgcatcctgatggagggcaccccaagaaatgtgggctttgagcctgtgcgggacaccctgctgtctgtgcctggggtgcgggccacccatgagctgcacctgtgggccctgaccctgacctaccacgtggccagcgcccacctggccatcgacagcacagctgaccctgaggccgtgctggccgaggccagcagccggctgtacagcagatttggcttcagcagctgcaccctgcaggtggagcagtaccagcctgagatggcccagtgcctgcgctgccaggagcccccccaggcctag

SEQ ID NO: 170620 - DNA, 336 bp, synthetic construct
  misc_feature 1..336: note = Description of Artificial Sequence: Synthetic coding sequence
  source 1..336: mol_type = other DNA
atgcccttccaccactgccaccgggaccccctgcccccacctggcctgaccccagagcggctgcacgcccggcggcagctgtatgctgcctgtgctgtgtgctttgtgttcatggccggggaggtggtgggcggctacctggcccacagcctggccatcatgacagatgctgcccacctgctggctgatgtgggctccatgatgggcagcctcttcagcctgtggctgagcaccaggcctgccaccaggaccatgaccttcggctggcacaggtctgagaccctgggcgccctggcctctgtggtgtccctgtggatggtgacaggcatcctgtag

SEQ ID NO: 170621 - DNA, 1290 bp, synthetic construct
  misc_feature 1..1290: note = Description of Artificial Sequence: Synthetic coding sequence
  source 1..1290: mol_type = other DNA
atggccggcagcggggcctggaagaggctgaagtccatgctgaggaaggatgatgcccccctcttcctgaatgacaccagcgcctttgacttcagtgatgaagctggagatgagggcctgagccgcttcaacaagctgcgggtggtggtggctgatgatggcagcgaggcccctgagaggcctgtgaatggagcccaccccaccctgcaggctgatgatgacagcctgctggaccaggacctgcccctgaccaacagccagctgagcctgaaggtggacagctgtgacaactgcagcaagcagcgggagatcctgaagcagaggaaggtgaaggcccggctgaccatcgctgctgtgctgtacctgctcttcatgattggagagctggtgggcggctacatcgccaacagcctggccatcatgacagatgccctgcacatgctgacagacctgagcgccatcatcctgaccctgctggccctgtggctgagcagcaagagccccaccaagcgcttcaccttcggcttccaccggctggaggtgctgagcgccatgatctctgtgctgctggtgtacatcctgatgggcttcctgctgtatgaggccgtgcagaggaccatccacatgaactatgagatcaacggggacatcatgctgatcacagctgctgtgggcgtggccgtgaatgtcatcatgggcttcctgctgaaccagagcggccaccgccacagccacagccacagcctgcccagcaacagccccacccggggcagcggctgtgagaggaaccacggccaggacagcctggccgtgcgggccgcctttgtgcacgccctgggggacctggtgcagagcgtgggcgtgctgattgctgcctacatcatccgcttcaagccagagtacaagattgctgaccccatctgcacctacgtgttcagcctgctggtggccttcaccaccttccgcatcatctgggacacagtggtgatcatcctggagggcgtgcccagccacctgaatgtggactacatcaaggaggccctgatgaagattgaagatgtgtacagcgtggaggacctgaacatctggagcctgaccagcggcaagagcacagccatcgtgcacatccagctgatccctggcagcagcagcaagtgggaggaggtgcagagcaaggccaaccacctgctgctgaacaccttcggcatgtaccgctgcaccatccagctgcagagctaccggcaggaggtggacaggacctgtgccaactgccagagcagcagcccctag

SEQ ID NO: 170622 - DNA, 357 bp, synthetic construct
  misc_feature 1..357: note = Description of Artificial Sequence: Synthetic coding sequence
  source 1..357: mol_type = other DNA
atggaggagaagtatggaggagatgtgctggccggccctgggggcggcggcggcctgggccctgtggatgtgcccagcgcccggctgaccaagtacatcgtgctgctgtgcttcaccaagttcctgaaggctgtgggcctgtttgagagctatgacctgctgaaggctgtgcacatcgtgcagttcatcttcatcctgaagctgggcacagccttcttcatggtgctcttccagaagcccttcagcagcggcaagaccatcaccaagcaccagatcatcggcagcctgaagatccctggcaggaaggagttcaaggacaagaagctgaatgaccccaggaagctggtgggcaactag

SEQ ID NO: 170623 - DNA, 2298 bp, synthetic construct
  misc_feature 1..2298: note = Description of Artificial Sequence: Synthetic coding sequence
  source 1..2298: mol_type = other DNA
atggaggagaagtatggaggagatgtgctggccggccctgggggcggcggcggcctgggccctgtggatgtgcccagcgcccggctgaccaagtacatcgtgctgctgtgcttcaccaagttcctgaaggctgtgggcctgtttgagagctatgacctgctgaaggctgtgcacatcgtgcagttcatcttcatcctgaagctgggcacagccttcttcatggtgctcttccagaagcccttcagcagcggcaagaccatcaccaagcaccagtggatcaagatcttcaagcatgctgtggccggctgcatcatcagcctgctgtggttcttcggcctgaccctgtgtggccccctgcggaccctgctgctgtttgagcacagcgacatcgtggtgatcagcctgctgtctgtgctcttcaccagcagcggcggcggccctgccaagaccagaggagctgccttcttcatcatcgctgtgatctgcctgctgctgtttgacaatgatgacctgatggccaagatggccgagcaccctgagggccaccatgattctgccctgacccacatgctgtacacagccatcgccttcctgggcgtggccgaccacaagggcggcgtgctgctgctggtgctggccctgtgctgcaaggtgggcttccacacagccagcaggaagctgtctgtggatgtgggcggggccaagaggctgcaggccctgagccacctggtgtctgtgctgctgctgtgcccctgggtgattgtgctgtctgtgaccacagagagcaaggtggagagctggttcagcctcatcatgccctttgccaccgtcatcttctttgtgatgatcctggacttctacgtggacagcatctgcagcgtgaagatggaggtgtccaaatgtgcccgctatggcagcttccccatcttcatcagcgccctgctgtttggaaacttctggacccaccccatcacagaccagctgcgggccatgaacaaggccgcccaccaggagagcacagagcacgtgctgtctggaggagtggtggtgtctgccatcttcttcatcctgagcgccaacatcctgagcagccccagcaagaggggccagaagggcaccctgattggctacagccctgagggcacccccctgtacaacttcatgggagatgccttccagcacagcagccagagcatcccccgcttcatcaaggagagcctgaagcagatcctggaggagagtgacagccggcagatcttctacttcctgtgcctgaacctgctcttcacctttgtggagctgttctacggcgtgctgaccaacagcctgggcctcatcagtgatggcttccacatgctgtttgactgcagcgccctggtgatgggcctgtttgctgccctgatgagccgctggaaggccacccgcatcttctcctatggctacggccgcatcgagatcctgagcggcttcatcaatggcctcttcctgattgtgattgccttctttgtgttcatggagagcgtggcccggctgattgaccccccagagctggacacccacatgctgacccctgtgtctgtgggcggcctgattgtgaacctgattggcatctgtgccttcagccacgcccacagccacgcccacggggccagccagggcagctgccacagcagtgaccacagccacagccaccacatgcacggccacagcgaccacggccacggccacagccacggcagcgctgggggcggcatgaatgccaacatgagaggagtcttcctgcacgtgctggccgacaccctgggcagcattggagtgattgtgtccacagtgctgattgagcagtttggctggttcatcgctgaccccctgtgcagcctcttcatcgccatcctgatcttcctgtctgtggtgcccctcatcaaggatgcctgccaggtgctgctgctgcggctgcccccagaatatgagaaggagctgcacatcgccctggagaagatccagaagattgagggcctcatctcctacagagacccccacttctggaggcacagcgccagcatcgtggccggcaccatccacatccaggtgaccagtgatgtgctggagcagagaattgtgcagcaggtgacaggcatcctgaaggatgctggggtgaacaacctgaccatccaggtggagaaggaggcctacttccagcacatgagcggcctgagcacaggcttccatgatgtgctggccatgaccaagcagatggagagcatgaagtactgcaaggatggcacctacatcatgtag

SEQ ID NO: 170624 - DNA, 1083 bp, synthetic construct
  misc_feature 1..1083: note = Description of Artificial Sequence: Synthetic coding sequence
  source 1..1083: mol_type = other DNA
atgggagatgccttccagcacagcagccagagcatcccccgcttcatcaaggagagcctgaagcagatcctggaggagagtgacagccggcagatcttctacttcctgtgcctgaacctgctcttcacctttgtggagctgttctatggagtgctgaccaacagcctgggcctcatcagtgatggcttccacatgctgtttgactgcagcgccctggtgatgggcctgtttgctgccctgatgagccgctggaaggccacccgcatcttctcctatggctacggcagaattgagatcctgagcggcttcatcaatggcctcttcctgattgtcatcgccttctttgtgttcatggagagcgtggcccggctgattgatcctcctgagctggacacccacatgctgaccccctgccacagccacgcccatggagccagccagggcagctgccacagcagtgaccacagccacagccaccacatgcacggccacagcgaccacggccacggccacagccacggcagcgctgggggcggcatgaatgccaacatgaggggcgtcttcctgcacgtgctggccgacaccctgggcagcattggagtcatcgtgtccacagtgctgattgagcagtttggctggttcatcgctgaccccctgtgcagcctcttcatcgccatcctgatcttcctgtctgtggtgcccctcatcaaggatgcctgccaggtgctgctgctgcggctgcccccagaatatgagaaggagctgcacatcgccctggagaagatccagaagattgagggcctcatctcctacagagacccccacttctggaggcacagcgccagcatcgtggccggcaccatccacatccaggtgaccagtgatgtgctggagcagagaattgtgcagcaggtgacaggcatcctgaaggatgctggggtgaacaacctgaccatccaggtggagaaggaggcctacttccagcacatgagcggcctgagcacaggcttccatgatgtgctggccatgaccaagcagatggagagcatgaagtactgcaaggatggcacctacatcatgtag

SEQ ID NO: 170625 - DNA, 1386 bp, synthetic construct
  misc_feature 1..1386: note = Description of Artificial Sequence: Synthetic coding sequence
  source 1..1386: mol_type = other DNA
atgggcaccatccacctgttcaggaagccccagaggagcttcttcggcaagctgctgcgggagttccggctggtggccgctgacagaagatcctggaagatcctgctgtttggagtcatcaacctgatctgcaccggcttcctgctgatgtggtgcagcagcaccaacagcatcgccctgacagcctacacctacctgaccatctttgacctcttcagcctgatgacctgcctgatctcctactgggtgaccctgaggaagcccagccctgtgtacagctttggatttgagcggctggaggtgctggccgtgtttgccagcacagtgctggcccagctgggcgccctcttcatcctgaaggagagcgctgagcgcttcctggagcagcctgagatccacacaggccgcctgctggtgggcacctttgtggccctgtgcttcaacctcttcaccatgctgagcatccggaacaagccctttgcctacgtgtctgaggccgccagcacctcctggctgcaggagcacgtggccgacctgagccgcagcctgtgtggcatcatccctggcctgagcagcatcttcctgcccaggatgaacccctttgtgctgattgacctggccggggcctttgccctgtgcatcacctacatgctgattgagatcaacaactactttgctgtggacacagccagcgccatcgccatcgccctgatgaccttcggcaccatgtaccccatgtctgtgtacagcggcaaggtgctgctgcagaccaccccacctcatgtgattggccagctggacaagctgatccgggaggtgtccaccctggatggagtgctggaggtgagaaatgagcacttctggaccctgggcttcggcagcctggccggctctgtgcacgtgcgcatcagaagagatgccaatgagcagatggtgctggcccacgtgaccaaccggctgtacaccctggtgtccaccctgactgtgcagatcttcaaggatgactggatccggcctgccctgctgagcggccctgtggccgccaacgtgctgaacttcagtgaccaccacgtgatccccatgcccctgctgaagggcacagatgacctgaaccctgtgaccagcaccccagccaagcccagcagccccccacctgagttctccttcaacacccctgggaagaatgtgaaccctgtgatcctgctgaacacccagacccggccctacggcttcggcctgaaccacggccacaccccctacagctccatgctgaaccagggcctgggcgtgcccggcattggagccacccagggcctgaggacaggcttcaccaacatccccagccgctatggcaccaacaaccgcatcggccagccccggccctag

SEQ ID NO: 170626 - DNA, 795 bp, synthetic construct
  misc_feature 1..795: note = Description of Artificial Sequence: Synthetic coding sequence
  source 1..795: mol_type = other DNA
atgaacccctttgtgctgattgacctggccggggcctttgccctgtgcatcacctacatgctgattgagatcaacaactactttgctgtggacacagccagcgccatcgccatcgccctgatgaccttcggcaccatgtaccccatgtctgtgtacagcggcaaggtgctgctgcagaccaccccaccccacgtgattggccagctggacaagctgatccgggaggtgtccaccctggatggagtgctggaggtgagaaatgagcacttctggaccctgggcttcggcagcctggccggctctgtgcacgtgcgcatcagaagagatgccaatgagcagatggtgctggcccacgtgaccaacagactctacaccctggtgtccaccctgactgtgcagatcttcaaggatgactggatccggcctgccctgctgagcggccctgtggccgccaacgtgctgaacttcagtgaccaccacgtgatccccatgcccctgctgaagggcacagatgacctgaaccctgtgaccagcaccccagccaagcccagcagccccccacctgagttctccttcaacaccccaggcaagaatgtgaaccctgtgatcctgctgaacacccagacccggccctacggcttcggcctgaaccacggccacaccccctacagctccatgctgaaccagggcctgggcgtgcccggcatcggggccacccagggcctgaggacaggcttcaccaacatccccagccgctatggcaccaacaacagaattggccagccccggccctag

SEQ ID NO: 170627 - DNA, 1506 bp, synthetic construct
  misc_feature 1..1506: note = Description of Artificial Sequence: Synthetic coding sequence
  source 1..1506: mol_type = other DNA
atgggcaccatccacctgttcaggaagccccagaggagcttcttcggcaagctgctgcgggagttccggctggtggccgctgacagaagatcctggaagatcctgctgtttggagtcatcaacctgatctgcaccggcttcctgctgatgtggtgcagcagcaccaacagcatcgccctgacagcctacacctacctgaccatctttgacctcttcagagatggagtgagccccttctggctgggctggagccagaccccagacctgaagtggagcacccacctgggcctgcccaagtgctgggacaacagaagagagctgccctgcctgagcaacagcctgatgacctgcctgatctcctactgggtgaccctgaggaagcccagccctgtgtacagctttggatttgagcggctggaggtgctggccgtgtttgccagcacagtgctggcccagctgggcgccctcttcatcctgaaggagagcgctgagcgcttcctggagcagcctgagatccacacaggccgcctgctggtgggcacctttgtggccctgtgcttcaacctcttcaccatgctgagcatccggaacaagccctttgcctacgtgtctgaggccgccagcacctcctggctgcaggagcacgtggccgacctgagccgcagcctgtgtggcatcatccctggcctgagcagcatcttcctgcccaggatgaacccctttgtgctgattgacctggccggggcctttgccctgtgcatcacctacatgctgattgagatcaacaactactttgctgtggacacagccagcgccatcgccatcgccctgatgaccttcggcaccatgtaccccatgtctgtgtacagcggcaaggtgctgctgcagaccaccccacctcatgtgattggccagctggacaagctgatccgggaggtgtccaccctggatggagtgctggaggtgagaaatgagcacttctggaccctgggcttcggcagcctggccggctctgtgcacgtgcgcatcagaagagatgccaatgagcagatggtgctggcccacgtgaccaaccggctgtacaccctggtgtccaccctgactgtgcagatcttcaaggatgactggatccggcctgccctgctgagcggccctgtggccgccaacgtgctgaacttcagtgaccaccacgtgatccccatgcccctgctgaagggcacagatgacctgaaccctgtgaccagcaccccagccaagcccagcagccccccacctgagttctccttcaacacccctgggaagaatgtgaaccctgtgatcctgctgaacacccagacccggccctacggcttcggcctgaaccacggccacaccccctacagctccatgctgaaccagggcctgggcgtgcccggcattggagccacccagggcctgaggacaggcttcaccaacatccccagccgctatggcaccaacaaccgcatcggccagccccggccctag

SEQ ID NO: 170628 - DNA, 1164 bp, synthetic construct
  misc_feature 1..1164: note = Description of Artificial Sequence: Synthetic coding sequence
  source 1..1164: mol_type = other DNA
atgacctgcctgatctcctactgggtgaccctgaggaagcccagccctgtgtacagctttggatttgagcggctggaggtgctggccgtgtttgccagcacagtgctggcccagctgggcgccctcttcatcctgaaggagagcgctgagcgcttcctggagcagcctgagatccacacaggccgcctgctggtgggcacctttgtggccctgtgcttcaacctcttcaccatgctgagcatccggaacaagccctttgcctacgtgtctgaggccgccagcacctcctggctgcaggagcacgtggccgacctgagccgcagcctgtgtggcatcatccctggcctgagcagcatcttcctgcccaggatgaacccctttgtgctgattgacctggccggggcctttgccctgtgcatcacctacatgctgattgagatcaacaactactttgctgtggacacagccagcgccatcgccatcgccctgatgaccttcggcaccatgtaccccatgtctgtgtacagcggcaaggtgctgctgcagaccaccccacctcatgtgattggccagctggacaagctgatccgggaggtgtccaccctggatggagtgctggaggtgagaaatgagcacttctggaccctgggcttcggcagcctggccggctctgtgcacgtgcgcatcagaagagatgccaatgagcagatggtgctggcccacgtgaccaaccggctgtacaccctggtgtccaccctgactgtgcagatcttcaaggatgactggatccggcctgccctgctgagcggccctgtggccgccaacgtgctgaacttcagtgaccaccacgtgatccccatgcccctgctgaagggcacagatgacctgaaccctgtgaccagcaccccagccaagcccagcagccccccacctgagttctccttcaacacccctgggaagaatgtgaaccctgtgatcctgctgaacacccagacccggccctacggcttcggcctgaaccacggccacaccccctacagctccatgctgaaccagggcctgggcgtgcccggcattggagccacccagggcctgaggacaggcttcaccaacatccccagccgctatggcaccaacaaccgcatcggccagccccggccctag

SEQ ID NO: 170629 - DNA, 1317 bp, synthetic construct
  misc_feature 1..1317: note = Description of Artificial Sequence: Synthetic coding sequence
  source 1..1317: mol_type = other DNA
atgggcaccatccacctgttcaggaagccccagaggagcttcttcggcaagctgctgcgggagttccggctggtggccgctgacagaagatcctggaagatcctgctgtttggagtcatcaacctgatctgcaccggcttcctgctgatgtggtgcagcagcaccaacagcatcgccctgacagcctacacctacctgaccatctttgacctcttcagcctgatgacctgcctgatctcctactgggtgaccctgaggaagcccagccctgtgtacagctttggatttgagcggctggaggtgctggccgtgtttgccagcacagtgctggcccagctgggcgccctcttcatcctgaaggagagcgctgagcgcttcctggagcagcctgagatccacacaggccgcctgctggtgggcacctttgtggccctgtgcttcaacctcttcaccatgctgagcatccggaacaagccctttgcctacgtgtctgaggccgccagcacctcctggctgcaggagcacgtggccgacctgagccgcagcctgtgtggcatcatccctggcctgagcagcatcttcctgcccaggatgaacccctttgtgctgattgacctggccggggcctttgccctgtgcatcacctacatgctgattgagatcaacaactactttgctgtggacacagccagcgccatcgccatcgccctgatgaccttcggcaccatgtaccccatgtctgtgtacagcggcaaggtgctgctgcagaccaccccacctcatgtgattggccagctggacaagctgatccgggaggccggctctgtgcacgtgcgcatcagaagagatgccaatgagcagatggtgctggcccacgtgaccaacagactctacaccctggtgtccaccctgactgtgcagatcttcaaggatgactggatccggcctgccctgctgagcggccctgtggccgccaacgtgctgaacttcagtgaccaccacgtgatccccatgcccctgctgaagggcacagatgacctgaaccctgtgaccagcaccccagccaagcccagcagccccccacctgagttctccttcaacaccccaggcaagaatgtgaaccctgtgatcctgctgaacacccagacccggccctacggcttcggcctgaaccacggccacaccccctacagctccatgctgaaccagggcctgggcgtgcccggcatcggggccacccagggcctgaggacaggcttcaccaacatccccagccgctatggcaccaacaacagaattggccagccccggccctag

SEQ ID NO: 170630 - DNA, 1299 bp, synthetic construct
  misc_feature 1..1299: note = Description of Artificial Sequence: Synthetic coding sequence
  source 1..1299: mol_type = other DNA
atgtcctggaagatcctgctgtttggagtcatcaacctgatctgcaccggcttcctgctgatgtggtgcagcagcaccaacagcatcgccctgacagcctacacctacctgaccatctttgacctcttcagcctgatgacctgcctgatctcctactgggtgaccctgaggaagcccagccctgtgtacagctttggatttgagcggctggaggtgctggccgtgtttgccagcacagtgctggcccagctgggcgccctcttcatcctgaaggagagcgctgagcgcttcctggagcagcctgagatccacacaggccgcctgctggtgggcacctttgtggccctgtgcttcaacctcttcaccatgctgagcatccggaacaagccctttgcctacgtgtctgaggccgccagcacctcctggctgcaggagcacgtggccgacctgagccgcagcctgtgtggcatcatccctggcctgagcagcatcttcctgcccaggatgaacccctttgtgctgattgacctggccggggcctttgccctgtgcatcacctacatgctgattgagatcaacaactactttgctgtggacacagccagcgccatcgccatcgccctgatgaccttcggcaccatgtaccccatgtctgtgtacagcggcaaggtgctgctgcagaccaccccaccccacgtgattggccagctggacaagctgatccgggaggtgtccaccctggatggagtgctggaggtgagaaatgagcacttctggaccctgggcttcggcagcctggccggctctgtgcacgtgcgcatcagaagagatgccaatgagcagatggtgctggcccacgtgaccaacagactctacaccctggtgtccaccctgactgtgcagatcttcaaggatgactggatccggcctgccctgctgagcggccctgtggccgccaacgtgctgaacttcagtgaccaccacgtgatccccatgcccctgctgaagggcacagatgacctgaaccctgtgaccagcaccccagccaagcccagcagccccccacctgagttctccttcaacaccccaggcaagaatgtgaaccctgtgatcctgctgaacacccagacccggccctacggcttcggcctgaaccacggccacaccccctacagctccatgctgaaccagggcctgggcgtgcccggcatcggggccacccagggcctgaggacaggcttcaccaacatccccagccgctatggcaccaacaacagaattggccagccccggccctag

SEQ ID NO: 170631 - DNA, 1131 bp, synthetic construct
  misc_feature 1..1131: note = Description of Artificial Sequence: Synthetic coding sequence
  source 1..1131: mol_type = other DNA
atgctgcccctgagcatcaaggatgatgagtacaagccacccaagttcaacctgtttgggaagatcagcggctggttccgcagcatcctgagtgacaagaccagcaggaacctcttcttcttcctgtgcctgaacctgagctttgcctttgtggagctgctgtatggcatctggagcaactgcctgggcctcatcagtgacagcttccacatgttctttgacagcacagccatcctggccggcctggccgccagcgtcatcagcaagtggagggacaatgatgccttctcctatggctacgtgcgggcagaggtgctggccggctttgtgaatggcctcttcctgatcttcaccgccttcttcatcttcagcgagggcgtggagcgggccctggcccccccagatgtgcaccacgagcggctgctgctggtgtccatcctgggctttgtggtgaacctgattggcatctttgtgttcaagcatggaggccacggccacagccacggcagcggccacggccacagccacagcctcttcaacggggccctggaccaggcccacggccacgtggaccactgccacagccatgaggtgaagcacggggccgcccacagccatgaccacgcccacggccacggccacttccacagccatgatggccccagcctgaaggagaccaccggccccagccggcagatcctgcagggcgtcttcctgcacatcctggccgacaccctgggcagcattggagtcatcgccagcgccatcatgatgcagaactttggcctgatgattgctgaccccatctgcagcatcctgattgccatcctgattgtggtgtctgtcatccccctgctgcgggagagcgtgggcatcctgatgcagaggaccccacccctgctggagaacagcctgccccagtgctaccagagggtgcagcagctgcagggcgtgtacagcctgcaggagcagcacttctggaccctgtgcagtgatgtgtatgtgggcaccctgaagctgattgtggccccagatgctgatgcccgctggatcctgagccagacccacaacatcttcacccaggccggcgtgcggcagctgtatgtgcagattgactttgctgccatgtag

SEQ ID NO: 170632 - DNA, 273 bp, synthetic construct
  misc_feature 1..273: note = Description of Artificial Sequence: Synthetic coding sequence
  source 1..273: mol_type = other DNA
tgagtcatccccctgctgcgggagagcgtgggcatcctgatgcagaggaccccacccctgctggagaacagcctgccccagtgctaccagagggtgcagcagctgcagggcgtgtacagcctgcaggagcagcacttctggaccctgtgcagtgatgtgtatgtgggcaccctgaagctgattgtggccccagatgctgatgcccgctggatcctgagccagacccacaacatcttcacccagaagctggaggaggagaatgaaaacctgtag

SEQ ID NO: 170633 - DNA, 1131 bp, synthetic construct; identical to SEQ ID NO: 170631
  misc_feature 1..1131: note = Description of Artificial Sequence: Synthetic coding sequence
  source 1..1131: mol_type = other DNA

SEQ ID NO: 170634 - DNA, 963 bp, synthetic construct
  misc_feature 1..963: note = Description of Artificial Sequence: Synthetic coding sequence
  source 1..963: mol_type = other DNA
atgtaccactgccacagcggcagcaagcccacagagaagggggccaatgaatatgcctatgccaagtggaagctgtgcagcgccagcgccatctgcttcatcttcatgattgctgaggtggtgggcggccacatcgccggcagcctggccgtggtgacagatgctgcccacctgctgattgacctgaccagcttcctgctgagcctcttcagcctgtggctgagcagcaagccacccagcaagaggctgaccttcggctggcacagagctgagatcctgggcgccctgctgagcatcctgtgcatctgggtggtgactggagtgctggtgtacctggcctgtgagcggctgctgtacccagactaccagatccaggccaccgtgatgatcatcgtgagcagctgtgctgtggccgccaacatcgtgctgactgtggtgctgcaccagcgctgcctgggccacaaccacaaggaggtgcaggccaatgcctctgtgcgggccgcctttgtgcacgccctgggggacctcttccagagcatctctgtgctgatcagcgccctgatcatctacttcaagccagagtacaagattgctgaccccatctgcaccttcatcttcagcatcctggtgctggccagcaccatcaccatcctgaaggacttcagcatcctgctgatggagggcgtgcccaagagcctgaactacagcggcgtgaaggagctgatcctggccgtggatggagtgctgtctgtgcacagcctgcacatctggagcctgaccatgaaccaggtgatcctgagcgcccacgtggccacagctgccagccgggacagccaggtggtgcggcgggagatcgccaaggccctgagcaagagcttcaccatgcacagcctgaccatccagatggagagccctgtggaccaggaccctgactgcctcttctgtgaggacccctgtgactag

SEQ ID NO: 170635 - DNA, 1110 bp, synthetic construct
  misc_feature 1..1110: note = Description of Artificial Sequence: Synthetic coding sequence
  source 1..1110: mol_type = other DNA
atggagttcctggagaggacctacctggtgaatgacaaggccgccaagatgtatgccttcaccctggagagcgtggagctgcagcagaagcctgtgaacaaggaccagtgcccccgggagaggcctgaggagctggagagcggcggcatgtaccactgccacagcggcagcaagcccacagagaagggggccaatgaatatgcctatgccaagtggaagctgtgcagcgccagcgccatctgcttcatcttcatgattgctgaggtggtgggcggccacatcgccggcagcctggccgtggtgacagatgctgcccacctgctgattgacctgaccagcttcctgctgagcctcttcagcctgtggctgagcagcaagccacccagcaagaggctgaccttcggctggcacagagctgagatcctgggcgccctgctgagcatcctgtgcatctgggtggtgactggagtgctggtgtacctggcctgtgagcggctgctgtacccagactaccagatccaggccaccgtgatgatcatcgtgagcagctgtgctgtggccgccaacatcgtgctgactgtggtgctgcaccagcgctgcctgggccacaaccacaaggaggtgcaggccaatgcctctgtgcgggccgcctttgtgcacgccctgggggacctcttccagagcatctctgtgctgatcagcgccctgatcatctacttcaagccagagtacaagattgctgaccccatctgcaccttcatcttcagcatcctggtgctggccagcaccatcaccatcctgaaggacttcagcatcctgctgatggagggcgtgcccaagagcctgaactacagcggcgtgaaggagctgatcctggccgtggatggagtgctgtctgtgcacagcctgcacatctggagcctgaccatgaaccaggtgatcctgagcgcccacgtggccacagctgccagccgggacagccaggtggtgagaagagagatcgccaaggccctgagcaagagcttcaccatgcacagcctgaccatccagatggagagccctgtggaccaggaccctgactgcctcttctgtgaggacccctgtgactag

SEQ ID NO: 170636 - DNA, 1458 bp, synthetic construct
  misc_feature 1..1458: note = Description of Artificial Sequence: Synthetic coding sequence
  source 1..1458: mol_type = other DNA
atgggccgctacagcggcaagacctgccgcctgctcttcatgctggtgctgactgtggccttctttgtggccgagctggtgtctggctacctgggcaacagcatcgccctgctgagtgacagcttcaacatgctgagtgacctgatcagcctgtgtgtgggcctgtctgctggctacatcgcccggcggcccacccggggcttcagcgccacctacggctacgcccgggcagaggtggtgggcgccctgagcaatgctgtgttcctgacagccctgtgcttcaccatctttgtggaggccgtgctgcggctggcccggcctgagagaattgatgatcctgagctggtgctgattgtgggcgtgctgggcctgctggtgaatgtggtgggcctgctgatcttccaggactgtgccgcctggtttgcctgctgcctgcggggccgcagccggcggctgcagcagaggcagcagctggccgagggctgtgtgcctggggcctttggaggcccccagggcgctgaggaccccaggagagctgctgaccccacagcccctggcagtgacagcgctgtgaccctgcggggcacctctgtggagaggaagcgggagaagggggccaccgtgtttgccaacgtggccggggacagcttcaacacccagaatgaacctgaggacatgatgaagaaggagaagaagtctgaggccctgaacatccggggcgtgctgctgcacgtgatgggagatgccctgggctctgtggtggtggtgatcacagccatcatcttctacgtgctgcccctgaagtctgaggacccctgcaactggcagtgctacatcgaccccagcctgactgtgctgatggtgatcatcatcctgagcagcgccttccccctcatcaaggagacagctgccatcctgctgcagatggtgcccaagggcgtgaacatggaggagctgatgagcaagctgtctgctgtgcccggcatcagctctgtgcatgaggtgcacatctgggagctggtgtctgggaagatcatcgccaccctgcacatcaagtaccccaaggaccggggctaccaggatgccagcaccaagatccgggagatcttccaccacgccggcatccacaacgtgaccatccagtttgaaaatgtggacctgaaggagcccctggagcagaaggacctgctgctgctgtgcaacagcccctgcatcagcaagggctgtgccaagcagctgtgctgccccccaggggccctgcccctggcccacgtgaatggctgtgccgagcacaacggcggccccagcctggacacctacggcagtgatggcctgagcagaagagatgcccgggaggtggccatcgaggtgtccctggacagctgcctgagtgaccacggccagagcctgaacaagacccaggaggaccagtgctacgtgaacagaacccacttctag

SEQ ID NO: 170637 - DNA, 723 bp, synthetic construct
  misc_feature 1..723: note = Description of Artificial Sequence: Synthetic coding sequence
  source 1..723: mol_type = other DNA
atgggagatgccctgggctctgtggtggtggtgatcacagccatcatcttctacgtgctgcccctgaagtctgaggacccctgcaactggcagtgctacatcgaccccagcctgactgtgctgatggtgatcatcatcctgagcagcgccttccccctcatcaaggagacagctgccatcctgctgcagatggtgcccaagggcgtgaacatggaggagctgatgagcaagctgtctgctgtgcccggcatcagctctgtgcatgaggtgcacatctgggagctggtgtctgggaagatcatcgccaccctgcacatcaagtaccccaaggaccggggctaccaggatgccagcaccaagatccgggagatcttccaccacgccggcatccacaacgtgaccatccagtttgaaaatgtggacctgaaggagcccctggagcagaaggacctgctgctgctgtgcaacagcccctgcatcagcaagggctgtgccaagcagctgtgctgccccccaggggccctgcccctggcccacgtgaatggctgtgccgagcacaatggaggccccagcctggacacctacggcagtgatggcctgagcagaagagatgcccgggaggtggccatcgaggtgtccctggacagctgcctgagtgaccacggccagagcctgaacaagacccaggaggaccagtgctacgtgaacagaacccacttctag

SEQ ID NO: 170638 - DNA, 672 bp, synthetic construct
  misc_feature 1..672: note = Description of Artificial Sequence: Synthetic coding sequence
  source 1..672: mol_type = other DNA
atgggccgctacagcggcaagacctgccgcctgctcttcatgctggtgctgactgtggccttctttgtggccgagctggtgtctggctacctgggcaacagcatcgccctgctgagtgacagcttcaacatgctgagtgacctgatcagcctgtgtgtgggcctgtctgctggctacatcgcccggcggcccacccggggcttcagcgccacctacggctacgcccgggcagaggtggtgggcgccctgagcaatgctgtgttcctgacagccctgtgcttcaccatctttgtggaggccgtgctgcggctggcccggcctgagagaattgatgatcctgagctggtgctgattgtgggcgtgctgggcctgctggtgaatgtggtgggcctgctgatcttccaggactgtgccgcctggtttgcctgctgcctgcggggccgcagccggcggctgcagcagaggcagcagctggccgagggctgtgtgcctggggcctttggaggcccccagggcgctgaggaccccaggagagctgctgaccccacagcccctggcagtgacagcgctgtgaccctgcggggcacctctgtggagaggaagcgggagaagggggccaccgtgtttgccaacgtggccgagctgatccacaacacccgcttcctgctgtag

SEQ ID NO: 170639 - DNA, 567 bp, synthetic construct
  misc_feature 1..567: note = Description of Artificial Sequence: Synthetic coding sequence
  source 1..567: mol_type = other DNA
atggaccacagccaccacatgggcatgagctacatggacagcaacagcaccatgcagcccagccaccaccaccccaccaccagcgccagccacagccatggaggaggagacagctccatgatgatgatgcccatgaccttctacttcggcttcaagaatgtggagctgctcttcagcggcctggtgatcaacacagctggggagatggccggggcctttgtggccgtgttcctgctggccatgttttatgagggcctgaagatcgcccgggagagcctgctgaggaagagccaggtgtccatccgctacaacagcatgcctgtgcccggccccaacggcaccatcctgatggagacccacaagacagtgggccagcagatgctgtccttcccccacctgctgcagacctgctgggactacagacatgagcccccccacctgagcctgagccccagctactacagcgacctgaactaccccaagaaggccaaggtgctgctgcgggtgtctgtggagctgatgatccaggaggccctgatgatcacagctggggacagcctgtgctag

SEQ ID NO: 170640 - DNA, 573 bp, synthetic construct
  misc_feature 1..573: note = Description of Artificial Sequence: Synthetic coding sequence
  source 1..573: mol_type = other DNA
atggaccacagccaccacatgggcatgagctacatggacagcaacagcaccatgcagcccagccaccaccaccccaccaccagcgccagccacagccatggaggaggagacagctccatgatgatgatgcccatgaccttctacttcggcttcaagaatgtggagctgctcttcagcggcctggtgatcaacacagctggggagatggccggggcctttgtggccgtgttcctgctggccatgttttatgagggcctgaagatcgcccgggagagcctgctgaggaagagccaggtgtccatccgctacaacagcatgcctgtgcccggccccaacggcaccatcctgatggagacccacaagacagtgggccagcagatgctgtccttcccccacctgctgcagacagtgctgcacatcatccaggtggtgatctcctacttcctgatgctgatcttcatgacctacaacggctacctgtgcatcgctgtggccgccggggccggcaccggctacttcctgttctcctggaagaaggctgtggtggtggacatcacagagcactgccactag

SEQ ID NO: 170641 - DNA, 432 bp, synthetic construct
  misc_feature 1..432: note = Description of Artificial Sequence: Synthetic coding sequence
  source 1..432: mol_type = other DNA
atggccatgcacttcatcttcagtgacacagctgtgctgctgtttgacttctggagcgtgcacagccctgctggcatggccctgtctgtgctggtgctgctgctgctggccgtgctgtatgagggcatcaaggtgggcaaggccaagctgctgaaccaggtgctggtgaacctgcccaccagcatcagccagcagaccatcgccgagacagatggagacagcgctggcagtgacagcttccctgtgggccgcacccaccaccgctggtacctgtgccacttcggccagagcctcatccacgtgatccaggtggtgattggctacttcatcatgctggccgtgatgagctacaacacctggatcttcctgggcgtggtgctgggcagcgctgtgggctactacctggcctaccccctgctgagcacagcctag

SEQ ID NO: 170642 - DNA, 1650 bp, synthetic construct
  misc_feature 1..1650: note = Description of Artificial Sequence: Synthetic coding sequence
  source 1..1650: mol_type = other DNA
atgagccccaccatcagccacaaggacagcagccggcagaggcggcccggcaacttcagccacagcctggacatgaagagcggccccctgcccccaggcggctgggatgacagccacctggacagcgctggccgggagggggaccgggaggccctgctgggggacaccggcaccggggacttcctgaaggccccccagagcttccgggcagagctgagcagcatcctgctgctgctcttcctgtatgtgctgcagggcatccccctgggcctggccggcagcatccccctcatcctgcagagcaagaatgtgtcctacacagaccaggccttcttctcctttgtgttctggcccttcagcctgaagctgctgtgggcccccctggtggatgctgtgtatgtgaagaactttggaagaaggaagtcctggctggtgcccacccagtacatcctgggcctcttcatgatctacctgagcacccaggtggaccggctgctgggcaacacagatgacaggaccccagatgtgattgccctgactgtggccttcttcctgtttgagttcctggccgccacccaggacattgctgtggatggctgggccctgaccatgctgagccgggagaatgtgggctacgccagcacctgcaacagcgtgggccagacagctggctacttcctgggcaatgtgctcttcctggccctggagagcgctgacttctgcaacaagtacctgcgcttccagccccagccccggggcatcgtgaccctgagtgacttcctgttcttctggggcaccgtcttcctgatcaccaccaccctggtggccctgctgaagaaggaaaatgaggtgtctgtggtgaaggaggagacccagggcatcacagacacctacaagctgctgtttgccatcatcaagatgcctgctgtgctgaccttctgcctgctgatcctgacagccaagattggcttctctgctgctgatgctgtgacaggcctgaagctggtggaggagggcgtgcccaaggagcacctggccctgctggccgtgcccatggtgcccctgcagatcatcctgcccctcatcatcagcaagtacacagctggcccccagcccctgaacaccttctacaaggccatgccctaccgcctgctgctgggcctggagtatgccctgctggtgtggtggacccccaaggtggagcaccagggcggcttccccatctactactacatcgtggtgctgctgtcctatgccctgcaccaggtgacagtgtacagcatgtatgtgtccatcatggccttcaatgccaaggtgtctgaccccctcatcggcggcacctacatgaccctgctgaacacagtgagcaacctgggcggcaactggcccagcacagtggccctgtggctggtggaccccctgactgtgaaggaatgtgtgggcgccagcaaccagaactgcaggaccccagatgctgtggagctgtgcaagaagctgggcggcagctgtgtgacagccctggatggctactacgtggagagcatcatctgtgtgttcatcggcttcggctggtggttcttcctgggccccaagttcaagaagctgcaggatgagggcagcagctcctggaagtgcaagaggaacaactag

SEQ ID NO: 170643 - DNA, 1650 bp, synthetic construct; identical to SEQ ID NO: 170642
  misc_feature 1..1650: note = Description of Artificial Sequence: Synthetic coding sequence
  source 1..1650: mol_type = other DNA

SEQ ID NO: 170644 - DNA, 1920 bp, synthetic construct
  misc_feature 1..1920: note = Description of Artificial Sequence: Synthetic coding sequence
  source 1..1920: mol_type = other DNA
atgctgtcctatggagagcggctgggcagccctgctgtgagccccctgcctgtgcggggcggccacgtgatgaggggcacagcctttgcctacgtgcccagcccccaggtgctgcaccgcatccctggcaccagcgcctatgccttccccagcctgggccctgtggccctggccgagcacacctgcccctgtggggaggtgctggagagacatgagcccctgcctgccaagctggccctggaggaggagcagaagccagagagccggctggtgcccaagctgcggcaggccggggccatgctgctgaaggtgcccctgatgctgaccttcctgtacctgtttgtgtgcagcctggacatgctgagcagcgccttccagctggccggcggcaaggtggccggggacatcttcaaggacaatgccatcctgagcaaccctgtggccggcctggtggtgggcatcctggtgacagtgctggtgcagagcagcagcaccagcaccagcatcatcgtgtccatggtgagcagcggcctgctggaggtgtcctctgccatccccatcatcatgggcagcaacatcggcacctctgtgaccaacaccatcgtggccctgatgcaggccggggacagaacagacttccggcgggcctttgctggggccaccgtgcatgactgcttcaactggctgtctgtgctggtgctgctgcccctggaggccgccaccggctacctgcaccacatcacccggctggtggtggccagcttcaacatccacggcggcagagatgccccagacctgctgaagatcatcacagagcccttcaccaagctgatcatccagctggatgagagcgtcatcaccagcatcgccactggagatgagagcctgaggaaccacagcctcatccagatctggtgccacccagacagcctgcaggcccccacctccatgagcagagctgaggccaacagcagccagaccctgggcaatgccaccatggagaagtgcaaccacatctttgtggacaccggcctgcctgacctggccgtgggcctcatcctgctggccggcagcctggtgctgctgtgcacctgcctgatcctgctggtgaagatgctgaacagcctgctgaagggccaggtggccaaggtgatccagaaggtgatcaacacagacttccctgcccccttcacctgggtgacaggctactttgccatggtggtgggcgcctccatgacctttgtggtgcagagcagcagcgtcttcaccagcgccatcacccccctcatcggcctgggcgtcatcagcattgagcgggcctaccccctgaccctgggcagcaacatcggcaccaccaccacagccatcctggccgccctggccagcccccgggagaagctgagcagcgccttccagatcgccctgtgccacttcttcttcaacatcagcggcatcctgctgtggtaccctgtgccctgcacccggctgcccatccgcatggccaaggccctgggcaagaggacagccaagtaccgctggtttgctgtgctgtacctgctggtgtgcttcctgctgctgcccagcctggtgtttggcatctccatggccggctggcaggtgatggtgggcgtgggcaccccatttggagccctgctggcctttgtggtgctgatcaacgtgctgcagagccgcagccctggccacctgcccaagtggctgcagacctgggacttcctgccccgctggatgcacagcctgaagcccctggaccacctgatcacccgggccaccctgtgctgtgcccggcctgagcccaggagcccccccctgccccccagggtcttcctggaggagctgcccccagccacccccagcccccggctggccctgcctgcccaccacaatgccacccggctgtag

SEQ ID NO: 170645 - DNA, 330 bp, synthetic construct
  misc_feature 1..330: note = Description of Artificial Sequence: Synthetic coding sequence
  source 1..330: mol_type = other DNA
atgctgtcctatggagagcggctgggcagccctgctgtgagccccctgcctgtgcggggcggccacgtgatgaggggcacagcctttgcctacgtgcccagcccccaggtgctgcaccgcatccctggcaccagcgcctatgccttccccagcctgggccctgtggccctggccgagcacacctgcccctgtggggaggtgctggagagacatgagcccctgcctgccaagctggccctggaggaggagcagaagccagagagccggctggtgcccaagctgcggcaggccggggccatgctgctgaaggtgcccctgatgctgacctag

SEQ ID NO: 170646 - DNA, 1023 bp, synthetic construct
  misc_feature 1..1023: note = Description of Artificial Sequence: Synthetic coding sequence
  source 1..1023: mol_type = other DNA
atgctgtcctatggagagcggctgggcagccctgctgtgagccccctgcctgtgcggggcggccacgtgatgaggggcacagcctttgcctacgtgcccagcccccaggtgctgcaccgcatccctggcaccagcgcctatgccttccccagcctgggccctgtggccctggccgagcacacctgcccctgtggggaggtgctggagagacatgagcccctgcctgccaagctggccctggaggaggagcagaagccagagagccggctggtgcccaagctgcggcaggccggggccatgctgctgaaggtgcccctgatgctgaccttcctgtacctgtttgtgtgcagcctggacatgctgagcagcgccttccagctggccggcggcaaggtggccggggacatcttcaaggacaatgccatcctgagcaaccctgtggccggcctggtggtgggcatcctggtgacagtgctggtgcagagcagcagcaccagcaccagcatcatcgtgtccatggtgagcagcggcctgctggaggtgtcctctgccatccccatcatcatgggcagcaacatcggcacctctgtgaccaacaccatcgtggccctgatgcaggccggggacagaacagacttccggcgggcctttgctggggccaccgtgcatgactgcttcaactggctgtctgtgctggtgctgctgcccctggaggccgccaccggctacctgcaccacatcacccggctggtggtggccagcttcaacatccacggcggcagagatgccccagacctgctgaagatcatcacagagcccttcaccaagctgatcatccagctggatgagagcgtcatcaccagcatcgccactggagatgagagcctgaggaaccacagcctcatccagatctggtgccacccagacagcctgcagcagaacctggagggccgggagatcacccactttgacctgaggaagaagcaggccatggaggacagctctgtgccccactgcccctag

SEQ ID NO: 170647 - DNA, 2073 bp, synthetic construct
  misc_feature 1..2073: note = Description of Artificial Sequence: Synthetic coding sequence
  source 1..2073: mol_type = other DNA
atggccccctggccagagctgggagatgcccagcccaacccagacaagtacctggagggcgccgccggccagcagcccacagccccagacaagagcaaggagaccaacaagacagacaacacagaggcccctgtgaccaagattgagctgctgcccagctacagcacagccaccctgattgatgagcccacagaggtggatgacccctggaacctgcccaccctgcaggacagcggcatcaagtggagcgagcgggacaccaagggcaagatcctgtgcttcttccagggcatcggccgcctcatcctgctgctgggcttcctgtacttctttgtgtgcagcctggacatcctgagcagcgccttccagctggtgggcggcaagatggccggccagttcttcagcaacagcagcatcatgagcaaccccctgctgggcctggtgattggagtgctggtgacagtgctggtgcagagcagcagcaccagcaccagcatcgtggtgtccatggtgagcagcagcctgctgactgtgcgggccgccatccccatcatcatgggcgccaacatcggcaccagcatcaccaacaccatcgtggccctgatgcaggtgggggacagaagtgagttcagaagagcctttgctggggccaccgtgcatgacttcttcaactggctgtctgtgctggtgctgctgcctgtggaggtggccacccactacctggagatcatcacccagctgattgtggagagcttccacttcaagaatggagaagatgccccagacctgctgaaggtgatcaccaagcccttcaccaagctgattgtgcagctggacaagaaggtgatcagccagatcgccatgaatgatgagaaggccaagaacaagagcctggtgaagatctggtgcaagaccttcaccaacaagacccagatcaacgtgacagtgcccagcacagccaactgcaccagccccagcctgtgctggacagatggcatccagaactggaccatgaagaatgtgacctacaaggaaaatattgccaagtgccagcacatctttgtgaacttccacctgcctgacctggccgtgggcaccatcctgctgatcctgagcctgctggtgctgtgtggctgcctgatcatgattgtgaagatcctgggctctgtgctgaagggccaggtggccaccgtcatcaagaagaccatcaacacagacttccccttcccctttgcctggctgaccggctacctggccatcctggtgggcgccggcatgaccttcatcgtgcagagcagcagcgtcttcaccagcgccctgacccccctcatcggcatcggggtcatcaccatcgagcgggcctaccccctgaccctgggcagcaacatcggcaccaccaccacagccatcctggccgccctggccagccctggaaatgccctgcggagcagcctgcagatcgccctgtgccacttcttcttcaacatcagcggcatcctgctgtggtaccccatccccttcacccggctgcccatccgcatggccaagggcctgggcaacatcagcgccaagtaccgctggtttgctgtgttctacctgatcatcttcttcttcctgatccccctgactgtgtttggcctgagcctggccggctggagggtgctggtgggcgtgggcgtgcctgtggtgttcatcatcatcctggtgctgtgcctgcggctgctgcagagccgctgcccccgggtgctgcccaagaagctgcagaactggaacttcctgcccctgtggatgaggagcctgaagccctgggatgctgtggtgtccaagttcaccggctgcttccagatgcgctgctgctgctgctgccgggtgtgctgccgggcctgctgcctgctgtgtgactgccccaagtgctgccgctgcagcaagtgctgtgaggacctggaggaggcccaggagggccaggatgtgcctgtgaaggcccctgagacctttgacaacatcaccatcagccgggaggcccagggcgaggtgcctgccagtgacagcaagacagagtgcacagccctgtag

SEQ ID NO: 170648 - DNA, 2070 bp, synthetic construct
  misc_feature 1..2070: note = Description of Artificial Sequence: Synthetic coding sequence
  source 1..2070: mol_type = other DNA
atggccccctggccagagctgggagatgcccagcccaacccagacaagtacctggagggcgccgccggccagcagcccacagccccagacaagagcaaggagaccaacaagaacaacacagaggcccctgtgaccaagattgagctgctgcccagctacagcacagccaccctgattgatgagcccacagaggtggatgacccctggaacctgcccaccctgcaggacagcggcatcaagtggagcgagcgggacaccaagggcaagatcctgtgcttcttccagggcatcggccgcctcatcctgctgctgggcttcctgtacttctttgtgtgcagcctggacatcctgagcagcgccttccagctggtgggcggcaagatggccggccagttcttcagcaacagcagcatcatgagcaaccccctgctgggcctggtgattggagtgctggtgacagtgctggtgcagagcagcagcaccagcaccagcatcgtggtgtccatggtgagcagcagcctgctgactgtgcgggccgccatccccatcatcatgggcgccaacatcggcaccagcatcaccaacaccatcgtggccctgatgcaggtgggggacagaagtgagttccggcgggcctttgctggggccaccgtgcatgacttcttcaactggctgtctgtgctggtgctgctgcctgtggaggtggccacccactacctggagatcatcacccagctgattgtggagagcttccacttcaagaatggagaagatgccccagacctgctgaaggtgatcaccaagcccttcaccaagctgattgtgcagctggacaagaaggtgatcagccagatcgccatgaatgatgagaaggccaagaacaagagcctggtgaagatctggtgcaagaccttcaccaacaagacccagatcaacgtgacagtgcccagcacagccaactgcaccagccccagcctgtgctggacagatggcatccagaactggaccatgaagaatgtgacctacaaggagaacatcgccaagtgccagcacatctttgtgaacttccacctgcctgacctggccgtgggcaccatcctgctgatcctgagcctgctggtgctgtgtggctgcctgatcatgattgtgaagatcctgggctctgtgctgaagggccaggtggccaccgtcatcaagaagaccatcaacacagacttccccttcccctttgcctggctgaccggctacctggccatcctggtgggcgccggcatgaccttcatcgtgcagagcagctctgtgttcaccagcgccctgacccccctgattggaattggagtcatcaccatcgagcgggcctaccccctgaccctgggcagcaacatcggcaccaccaccacagccatcctggccgccctggccagccctggaaatgccctgcggagcagcctgcagatcgccctgtgccacttcttcttcaacatcagcggcatcctgctgtggtaccccatccccttcacccggctgcccatccgcatggccaagggcctgggcaacatcagcgccaagtaccgctggtttgctgtgttctacctgatcatcttcttcttcctgatccccctgactgtgtttggcctgagcctggccggctggagggtgctggtgggcgtgggcgtgcctgtggtgttcatcatcatcctggtgctgtgcctgcggctgctgcagagccgctgcccccgggtgctgcccaagaagctgcagaactggaacttcctgcccctgtggatgaggagcctgaagccctgggatgctgtggtgtccaagttcaccggctgcttccagatgcgctgctgctgctgctgccgggtgtgctgccgggcctgctgcctgctgtgtgactgccccaagtgctgccgctgcagcaagtgctgtgaggacctggaggaggcccaggagggccaggatgtgcctgtgaaggcccctgagacctttgacaacatcaccatcagccgggaggcccagggcgaggtgcctgccagtgacagcaagacagaatgtacagccctgtag

SEQ ID NO: 170649 - DNA, 2070 bp, synthetic construct; identical to SEQ ID NO: 170648
  misc_feature 1..2070: note = Description of Artificial Sequence: Synthetic coding sequence
  source 1..2070: mol_type = other DNA

SEQ ID NO: 170650 - DNA, 486 bp, synthetic construct
  misc_feature 1..486: note = Description of Artificial Sequence: Synthetic coding sequence
  source 1..486: mol_type = other DNA
atggccccctggccagagctgggagatgcccagcccaacccagacaagtacctggagggcgccgccggccagcagcccacagccccagacaagagcaaggagaccaacaagacagacaacacagaggcccctgtgaccaagattgagctgctgcccagctacagcacagccaccctgattgatgagcccacagaggtggatgacccctggaacctgcccaccctgcaggacagcggcatcaagtggagcgagcgggacaccaagggcaagatcctgtgcttcttccagggcatcggccgcctcatcctgctgctgggcttcctgtacttctttgtgtgcagcctggacatcctgagcagcgccttccagctggtgggcggcaagatggccggccagttcttcagcaacagcagcatcatgagcaaccccctgctgggcctggtgattggagtgctggtgacagtgctggtgcagagcagcagctag

SEQ ID NO: 170651 - DNA, 492 bp, synthetic construct
  misc_feature 1..492: note = Description of Artificial Sequence: Synthetic coding sequence
  source 1..492: mol_type = other DNA
atggccccctggccagagctgggagatgcccagcccaacccagacaagtacctggagggcgccgccggccagcagcccacagccccagacaagagcaaggagaccaacaagaacaacacagaggcccctgtgaccaagattgagctgctgcccagctacagcacagccaccctgattgatgagcccacagaggtggatgacccctggaacctgcccaccctgcaggacagcggcatcaagtggagcgagcgggacaccaagggcaagatcctgtgcttcttccagggcatcggccgcctcatcctgctgctgggcttcctgtacttctttgtgtgcagcctggacatcctgagcagcgccttccagctggtgggcggcaagatggccggccagttcttcagcaacagcagcatcatgagcaaccccctgctgggcctggtgattggagtgctggtgacagtgctggtgcagagcagcagcaccagcacctag

SEQ ID NO: 170652 - DNA, 1800 bp, synthetic construct
  misc_feature 1..1800: note = Description of Artificial Sequence: Synthetic coding sequence
  source 1..1800: mol_type = other DNA
atgcccagcagcctgcccggcagccaggtgccccaccccaccctggatgctgtggacctggtggagaagaccctgagaaatgaaggcaccagcagcagcgcccctgtgctggaggagggggacacagacccctggaccctgccccagctgaaggacaccagccagccctggaaggagctgcgggtggccggccgcctgcggcgggtggccggctctgtgctgaaggcctgtggcctgctgggcagcctgtacttcttcatctgcagcctggatgtgctgagcagcgccttccagctgctgggcagcaaggtggccggggacatcttcaaggacaacgtggtgctgagcaaccctgtggccggcctggtgattggagtgctggtgacagccctggtgcagagcagcagcaccagcagcagcatcgtggtgtccatggtggccgccaagctgctgactgtgcgggtgtctgtgcccatcatcatgggcgtgaatgtgggcaccagcatcaccagcaccctggtgtccatggcccagagcggggacagagatgagttccagagggccttcagcggcagcgctgtgcacggcatcttcaactggctgactgtgctggtgctgctgcccctggagagcgccacagccctgctggagcggctgtctgagctggccctgggcgccgccagcctgaccccccgggcccaggccccagacatcctgaaggtgctgaccaagcccctgacccacctgattgtgcagctggacagcgacatgatcatgagcagcgccactggaaatgccaccaacagcagcctcatcaagcactggtgtggcaccaccggccagcccacccaggagaacagcagctgtggggccttcggcccctgcacagagaagaacagcacagccccagctgaccggctgccctgccgccacctgtttgctggaacagagctgacagacctggccgtgggctgcatcctgctggccggcagcctgctggtgctgtgtggctgcctggtgctgattgtgaagctgctgaacagcgtgctgcggggccgggtggcccaggtggtgaggacagtcatcaatgctgacttccccttccccctgggctggctgggcggctacctggccgtgctggccggggccggcctgacctttgccctgcagagcagctctgtgttcaccgctgctgtggtgcccctgatgggcgtgggcgtcatcagcctggaccgggcctaccccctgctgctgggcagcaacatcggcaccaccaccacagccctgctggccgccctggccagccctgctgacaggatgctgagcgccctgcaggtggccctgatccacttcttcttcaacctggccggcatcctgctgtggtacctggtgcctgccctgcggctgcccatccccctggcccggcactttggagtggtgacagcccgctaccgctgggtggccggcgtgtacctgctgctgggcttcctgctgctgcccctggccgccttcggcctgagcctggccggcggcatggagctggccgctgtgggcggccccctggtgggcctggtgctgctggtgatcctggtgacagtgctgcagaggagaagacctgcctggctgcctgtgcggctgcgctcctgggcctggctgcctgtgtggctgcacagcctggagccctgggaccggctggtgacccgctgctgcccctgcaatgtgtgcagcccccccaaggccaccaccaaggaggcctactgctatgaaaatcctgagatcctggccagccagcagctgtag

SEQ ID NO: 170653 - DNA, 1800 bp, synthetic construct; identical to SEQ ID NO: 170652
  misc_feature 1..1800: note = Description of Artificial Sequence: Synthetic coding sequence
  source 1..1800: mol_type = other DNA

SEQ ID NO: 170654 - DNA, 570 bp, synthetic construct
  misc_feature 1..570: note = Description of Artificial Sequence: Synthetic coding sequence
  source 1..570: mol_type = other DNA
atgaccctgatggctgctgtgtacaccatcgccctgcgctacaccaggaccagtgacaaggagctgtacttcagcaccacagctgtgtgcatcacagaggtgatcaagctgctgctgtctgtgggcatcctggccaaggagaccggcagcctgggccgcttcaaggccagcctgcgggagaatgtgctgggcagccccaaggagctgctgaagctgtctgtgcccagcctggtgtatgctgtgcagaacaacatggccttcctggccctgagcaacctggatgctgctgtgtaccaggtgacctaccagctgaagatcccctgcacagccctgtgcaccgtgctgatgctgaacagaaccctgagcaagctgcagtgggtgtctgtgttcatgctgtgtgccggcgtgaccctggtgcagtggaagccagcccaggccaccaaggtggtggagtacatcctgaagaagttcaaggagttccgctacttcagcctgggggagaagcacagcaatgtgtccatccgggactactgtgacatctcctggaggctgctggtgcgctggagctag

SEQ ID NO: 170655 - DNA, 1014 bp, synthetic construct
  misc_feature 1..1014: note = Description of Artificial Sequence: Synthetic coding sequence
  source 1..1014: mol_type = other DNA
atggccgccccccgggacaacgtgaccctgctcttcaagctgtactgcctggccgtgatgaccctgatggctgctgtgtacaccatcgccctgcgctacaccaggaccagtgacaaggagctgtacttcagcaccacagctgtgtgcatcacagaggtgatcaagctgctgctgtctgtgggcatcctggccaaggagaccggcagcctgggccgcttcaaggccagcctgagagaaaatgtgctgggcagccccaaggagctgctgaagctgtctgtgcccagcctggtgtatgctgtgcagaacaacatggccttcctggccctgagcaacctggatgctgctgtgtaccaggtgacctaccagctgaagatcccctgcacagccctgtgcaccgtgctgatgctgaacagaaccctgagcaagctgcagtgggtgtctgtgttcatgctgtgtgccggcgtgaccctggtgcagtggaagccagcccaggccaccaaggtggtggtggagcagaaccccctgctgggctttggagccatcgccatcgctgtgctgtgcagcggctttgctggggtgtactttgagaaggtgctgaagagcagtgacaccagcctgtgggtgaggaacatccagatgtacctgagcggcatcatcgtgaccctggccggcgtgtacctgagtgatggagctgagatcaaggagaagggcttcttctacggctacacctactacgtgtggtttgtgatcttcctggcctctgtgggcggcctgtacacctctgtggtggtgaagtacacagacaacatcatgaagggcttctctgctgctgctgccatcgtgctgagcaccatcgcctctgtgatgctgtttggcctgcagatcaccctgacctttgccctgggcaccctgctggtgtgtgtgtccatctacctgtatggcctgccccggcaggacaccaccagcatccagcagggcgagacagccagcaaggagcgggtgattggagtgtag

SEQ ID NO: 170656 - DNA, 837 bp, synthetic construct
  misc_feature 1..837: note = Description of Artificial Sequence: Synthetic coding sequence
  source 1..837: mol_type = other DNA
atggccgccccccgggacaacgtgaccctgctcttcaagctgtactgcctggccgtgatgaccctgatggctgctgtgtacaccatcgccctgcgctacaccaggaccagtgacaaggagctgtacttcagcaccacagctgtgtgcatcacagaggtgatcaagctgctgctgtctgtgggcatcctggccaaggagaccggcagcctgggccgcttcaaggccagcctgagagaaaatgtgctgggcagccccaaggagctgctgaagctgtctgtgcccagcctggtgtatgctgtgcagaacaacatggccttcctggccctgagcaacctggatgctgctgtgtaccaggtgacctaccagctgaagatcccctgcacagccctgtgcaccgtgctgatgctgaacagaaccctgagcaagctgcagtgggtgtctgtgttcatgctgtgtgccggcgtgaccctggtgcagtggaagccagcccaggccaccaaggtggtggtggagcagaaccccctgctgggctttggagccatcgccatcgctgtgctgtgcagcggctttgctgtgctggcctctgtgggcggcctgtacacctctgtggtggtgaagtacacagacaacatcatgaagggcttctctgctgctgctgccatcgtgctgagcaccatcgcctctgtgatgctgtttggcctgcagatcaccctgacctttgccctgggcaccctgctggtgtgtgtgtccatctacctgtatggcctgccccggcaggacaccaccagcatccagcagggcgagacagccagcaaggagagggtcatcggcgtgtag

SEQ ID NO: 170657 - DNA, 570 bp, synthetic construct
  misc_feature 1..570: note = Description of Artificial Sequence: Synthetic coding sequence
  source 1..570: mol_type = other DNA
atggccgccccccgggacaacgtgaccctgctcttcaagctgtactgcctggccgtgatgaccctgatggctgctgtgtacaccatcgccctgcgctacaccaggaccagtgacaaggagctgtacttcagcaccacagctgtgtgcatcacagaggtgatcaagctgctgctgtctgtgggcatcctggccaaggagaccggcagcctgggccgcttcaaggccagcctgagagaaaatgtgctgggcagccccaaggagctgctgaagctgtctgtgcccagcctggtgtatgctgtgcagaacaacatggccttcctggccctgagcaacctggatgctgctgtgtaccaggtgacctaccagctgaagatcccctgcacagccctgtgcaccgtgctgatgctgaacagaaccctgagcaagctgcagtgggtgtctgtgttcatgctgtgtgccggcgtgaccctggtgcagtggaagccagcccaggccaccaaggtggtgttcctgcaggtgctggtggccagcaccctgctgctgtggctgagcacccagaccaccagctag

SEQ ID NO: 170658 - DNA, 537 bp, synthetic construct
  misc_feature 1..537: note = Description of Artificial Sequence: Synthetic coding sequence
  source 1..537: mol_type = other DNA
atggccgccccccgggacaacgtgaccctgctcttcaagctgtactgcctggccgtgatgaccctgatggctgctgtgtacaccatcgccctgcgctacaccaggaccagtgacaaggagctgtacttcagcaccacagctgtgtgcatcacagaggtgatcaagctgctgctgtctgtgggcatcctggccaaggagaccggcagcctgggccgcttcaaggccagcctgagagaaaatgtgctgggcagccccaaggagctgctgaagctgtctgtgcccagcctggtgtatgctgtgcagaacaacatggccttcctggccctgagcaacctggatgctgctgtgtaccaggtgacctaccagctgaagatcccctgcacagccctgtgcaccgtgctgatgctgaacagaaccctgagcaagctgcagaagaaggacttctccatggtgacccacatcatgagcggcctgagctctgtgtccatccaggagctgaaggtgctgagccgctccttcatcttcttcctgtcctag

SEQ ID NO: 170659 - DNA, 612 bp, synthetic construct
  misc_feature 1..612: note = Description of Artificial Sequence: Synthetic coding sequence
  source 1..612: mol_type = other DNA
atgctgaacagaaccctgagcaagctgcagtgggtgtctgtgttcatgctgtgtgccggcgtgaccctggtgcagtggaagccagcccaggccaccaaggtggtggtggagcagaaccccctgctgggctttggagccatcgccatcgctgtgctgtgcagcggctttgctggggtgtactttgagaaggtgctgaagagcagtgacaccagcctgtgggtgaggaacatccagatgtacctgagcggcatcatcgtgaccctggccggcgtgtacctgagtgatggagctgagatcaaggagaagggcttcttctacggctacacctactacgtgtggtttgtgatcttcctggcctctgtgggcggcctgtacacctctgtggtggtgaagtacacagacaacatcatgaagggcttctctgctgctgctgccatcgtgctgagcaccatcgcctctgtgatgctgtttggcctgcagatcaccctgacctttgccctgggcaccctgctggtgtgtgtgtccatctacctgtatggcctgccccggcaggacaccaccagcatccagcagggcgagacagccagcaaggagcgggtgattggagtgtag

SEQ ID NO: 170660 - DNA, 1191 bp, synthetic construct
  misc_feature 1..1191: note = Description of Artificial Sequence: Synthetic coding sequence
  source 1..1191: mol_type = other DNA
atggctgctgtgggcgctgggggcagcacagctgcccctggccctggagctgtgtctgctggggccctggagcctggaacagccagcgctgcccaccggcggctgaagtacatcagcctggccgtgctggtggtgcagaatgccagcctcatcctgagcatccgctatgcccggaccctgcccggggaccgcttctttgccaccacagctgtggtgatggccgaggtgctgaagggcctgacctgcctgctgctgctgtttgcccagaagagaggaaatgtgaagcacctggtgctcttcctgcacgaggccgtgctggtgcagtatgtggacaccctgaagctggccgtgcccagcctcatctacaccctgcagaacaacctgcagtatgtggccatcagcaacctgcctgctgccaccttccaggtgacctaccagctgaagatcctgaccacagccctcttctctgtgctgatgctgaacagaagcctgagccggctgcagtgggccagcctgctgctgctcttcaccggggtggccatcgtgcaggcccagcaggccggcggcggcggcccccggcccctggaccagaaccctggagctggcctggccgctgtggtggccagctgcctgagcagcggctttgctggggtgtactttgagaagatcctgaagggcagcagcggctctgtgtggctgaggaacctgcagctgggcctgtttggaacagccctgggcctggtgggcctgtggtgggccgagggcacagctgtggccacccggggcttcttcttcggctacaccccagctgtgtggggcgtggtgctgaaccaggccttcggcggcctgctggtggccgtggtggtgaagtatgctgacaacatcctgaagggctttgccaccagcctgagcatcgtgctgagcacagtggccagcatccggctgtttggcttccacgtggaccccctgtttgccctgggcgccggcctggtgattggagctgtgtacctgtacagcctgcccaggggggccgccaaggccatcgccagcgccagcgccagcgccagcggcccctgtgtgcaccagcagcccccaggccagcccccaccaccccagctgagcagccacagaggagacctgatcacagagcccttcctgcccaagctgctgaccaaggtgaagggcagctag

SEQ ID NO: 170661 - DNA, 492 bp, synthetic construct
  misc_feature 1..492: note = Description of Artificial Sequence: Synthetic coding sequence
  source 1..492: mol_type = other DNA
atggctgctgtgggcgctgggggcagcacagctgcccctggccctggagctgtgtctgctggggccctggagcctggaacagccagcgctgcccaccggcggctgaagtacatcagcctggccgtgctggtggtgcagaatgccagcctcatcctgagcatccgctatgcccggaccctgcccggggaccgcttctttgccaccacagctgtggtgatggccgaggtgctgaagggcctgacctgcctgctgctgctgtttgcccagaagagaggaaatgtgaagcacctggtgctcttcctgcacgaggccgtgctggtgcagtatgtggacaccctgaagctggccgtgcccagcctcatctacaccctgcagaacaacctgcagtatgtggccatcagcaacctgcctgctgccaccttccaggtgagccccaagcccagcatggcccctgaggagctgaccggcctgggcactggagtgtgggagtag

SEQ ID NO: 170662 - DNA, 657 bp, synthetic construct
  misc_feature 1..657: note = Description of Artificial Sequence: Synthetic coding sequence
  source 1..657: mol_type = other DNA
atgaagctgtgcagagatgcccaccggcggctgaagtacatcagcctggccgtgctggtggtgcagaatgccagcctcatcctgagcatccgctatgcccggaccctgcccggggaccgcttctttgccaccacagctgtggtgatggccgaggtgctgaagggcctgacctgcctgctgctgctgtttgcccagaagagaggaaatgtgaagcacctggtgctcttcctgcacgaggccgtgctggtgcagtatgtggacaccctgaagctggccgtgcccagcctcatctacaccctgcagaacaacctgcagtatgtggccatcagcaacctgcctgctgccaccttccagcccagcccccgctgcagccagagccacagcctgtgcctgtgcctgcggctgcgggccctgcggagccctgctgccagccgggccgccaccaccacagctgctgtgtttcctccctggaggccccaccacggggccctgagcgccaaggtgtctgctggggaggtgcgggccggcagcaatggaggcacccagggccggggcaccggggtggagggcgtgggccacctgcaggaccccagccgccaccccccaggccctggcagcagcggcttcggccgctggagcttcctgcccggccactag

SEQ ID NO: 170663 - DNA, 1182 bp, synthetic construct
  misc_feature 1..1182: note = Description of Artificial Sequence: Synthetic coding sequence
  source 1..1182: mol_type = other DNA
atggctgctgtgggcgctgggggcagcacagctgcccctggccctggagctgtgtctgctggggccctggagcctggaacagccagcgctgcccaccggcggctgaagtacatcagcctggccgtgctggtggtgcagaatgccagcctcatcctgagcatccgctatgcccggaccctgcccggggaccgcttctttgccaccacagctgtggtgatggccgaggtgctgaagggcctgacctgcctgctgctgctgtttgcccagaagagaggaaatgtgaagcacctggtgctcttcctgcacgaggccgtgctggtgcagtatgtggacaccctgaagctggccgtgcccagcctcatctacaccctgcagaacaacctgcagtatgtggccatcagcaacctgcctgctgccaccttccaggtgacctaccagctgaagatcctgaccacagccctcttctctgtgctgatgctgaacagaagcctgagccggctgcagtgggccagcctgctgctgctcttcaccggggtggccatcgtgcaggcccagcaggccggcggcggcggcccccggcccctggaccagaaccctggagctggcctggccgctgtggtggccagctgcctgagcagcggctttgctggggtgtactttgagaagatcctgaagggcagcagcggctctgtgtggctgaggaacctgcagctgggcctgtttggaacagccctgggcctggtgggcctgtggtgggccgagggcacagctgtggccacccggggcttcttcttcggctacaccccagctgtgtggggcgtggtgctgaaccaggccttcggcggcctgctggtggccgtggtggtgaagtatgctgacaacatcctgaagggctttgccaccagcctgagcatcgtgctgagcacagtggccagcatccggctgtttggcttccacgtggaccccctgtttgccctgggcgccggcctggtgattggagctgtgtacctgtacagcctgcccaggggggccgccaaggccatcgccagcgccagcgccagcgccagcggcccctgtgtgcaccagcagcccccaggccagcccccaccaccccagctgagcagccacagaggagacctgatcacagagcccttcctgcccaagtctgtgctggtgaagtag

SEQ ID NO: 170664 - DNA, 675 bp, synthetic construct
  misc_feature 1..675: note = Description of Artificial Sequence: Synthetic coding sequence
  source 1..675: mol_type = other DNA
atggctgctgtgggcgctgggggcagcacagctgcccctggccctggagctgtgtctgctggggccctggagcctggaacagccagcgctgcccaccggcggctgaagtacatcagcctggccgtgctggtggtgcagaatgccagcctcatcctgagcatccgctatgcccggaccctgcccggggaccgcttctttgccaccacagctgtggtgatggccgaggtgctgaagggcctgacctgcctgctgctgctgtttgcccagaagagaggaaatgtgaagcacctggtgctcttcctgcacgaggccgtgctggtgcagtatgtggacaccctgaagctggccgtgcccagcctcatctacaccctgcagaacaacctgcagtatgtggccatcagcaacctgcctgctgccaccttccagcccagcccccgctgcagccagagccacagcctgtgcctgtgcctgcggctgcgggccctgcggagccctgctgccagccgggccgccaccaccacagctgctgtgtttcctccctggaggccccaccacggggccctgagcgccaaggtggcccaccagggcgagggcttcctggccgccggcattgaagatattggcctggccagcttcagcctgctggccctgggccctgctggcaccaagctgtag

SEQ ID NO: 170665 - DNA, 999 bp, synthetic construct
  misc_feature 1..999: note = Description of Artificial Sequence: Synthetic coding sequence
  source 1..999: mol_type = other DNA
atggctgctgtgggcgctgggggcagcacagctgcccctggccctggagctgtgtctgctggggccctggagcctggaacagccagcgctggaaatgtgaagcacctggtgctcttcctgcatgaagctgtgctggtgcagtatgtggacaccctgaagctggccgtgcccagcctcatctacaccctgcagaacaacctgcagtatgtggccatcagcaacctgcctgctgccaccttccaggtgacctaccagctgaagatcctgaccacagccctcttctctgtgctgatgctgaacagaagcctgagccggctgcagtgggccagcctgctgctgctcttcaccggggtggccatcgtgcaggcccagcaggccggcggcggcggcccccggcccctggaccagaaccctggggccggcctggccgctgtggtggccagctgcctgagcagcggctttgctggggtgtactttgagaagatcctgaagggcagcagcggctctgtgtggctgaggaacctgcagctgggcctgtttggaacagccctgggcctggtgggcctgtggtgggccgagggcacagctgtggccacccggggcttcttcttcggctacaccccagctgtgtggggcgtggtgctgaaccaggcctttggaggcctgctggtggccgtggtggtgaagtatgctgacaacatcctgaagggctttgccaccagcctgagcatcgtgctgagcacagtggccagcatccggctgtttggcttccacgtggaccccctgtttgccctgggcgccggcctggtgattggagctgtgtacctgtacagcctgcccagaggagctgccaaggccatcgccagcgccagcgccagcgccagcggcccctgtgtgcaccagcagcccccaggccagcccccaccaccccagctgagcagccacagaggagacctgatcacagagcccttcctgcccaagtctgtgctggtgaagtag

SEQ ID NO: 170666 - DNA, 729 bp, synthetic construct
  misc_feature 1..729: note = Description of Artificial Sequence: Synthetic coding sequence
  source 1..729: mol_type = other DNA
atggctgctgtgggcgctgggggcagcacagctgcccctggccctggagctgtgtctgctggggccctggagcctggaacagccagcgctgcccaccggcggctgaagtacatcagcctggccgtgctggtggtgcagaatgccagcctcatcctgagcatccgctatgcccggaccctgcccggggaccgcttctttgccaccacagctgtggtgatggccgaggtgctgaagggcctgacctgcctgctgctgctgtttgcccagaagagaggaaatgtgaagcacctggtgctcttcctgcacgaggccgtgctggtgcagtatgtggacaccctgaagctggccgtgcccagcctcatctacaccctgcagaacaacctgcagtatgtggccatcagcaacctgcctgctgccaccttccagcccagcccccgctgcagccagagccacagcctgtgcctgtgcctgcggctgcgggccctgcggagccctgctgccagccgggccgccaccaccacagctgctgtgtttcctccctggaggccccaccacggggccctgagcgccaaggtgtctgctggggaggtgcgggccggcagcaatggaggcacccagggccggggcaccggggtggagggcgtgggccacctgcaggaccccagccgccaccccccaggccctggcagcagcggcttcggccgctggagcttcctgcccggccactag

SEQ ID NO: 170667 - DNA, 531 bp, synthetic construct
  misc_feature 1..531: note = Description of Artificial Sequence: Synthetic coding sequence
  source 1..531: mol_type = other DNA
atggccgaggtgctgaagggcctgacctgcctgctgctgctgtttgcccagaagagaggaaatgtgaagcacctggtgctcttcctgcacgaggccgtgctggtgcagtatgtggacaccctgaagctggccgtgcccagcctcatctacaccctgcagaacaacctgcagtatgtggccatcagcaacctgcctgctgccaccttccaggtgacctaccagctgaagatcctgaccacagccctcttctctgtgctgatgctgaacagaagcctgagccggctgcagtgggccagcctgctgctgctcttcaccggggtggccatcgtgcaggcccagcaggccggcggcggcggcccccggcccctggaccagaaccctggagctggcctggccgctgtggtggccagctgcctgagcagcggctttgctggggtgtactttgagaagatcctgaagggcagcagcggctctgtgtggctgaggaacctgcagctgggcctgtttggaacagccctgggcctggtgtag

SEQ ID NO: 170668 - DNA, 1266 bp, synthetic construct
  misc_feature 1..1266: note = Description of Artificial Sequence: Synthetic coding sequence
  source 1..1266: mol_type = other DNA
atggctgctgtgggcgctgggggcagcacagctgcccctggccctggagctgtgtctgctggggccctggagcctggaacagccagcgctgagctgctgctgacctgggaggaggccgaggcccggggccagggcctgccccagcccctgcctgacacctctgtgcgcatcccagcccaccggcggctgaagtacatcagcctggccgtgctggtggtgcagaatgccagcctcatcctgagcatccgctatgcccggaccctgcccggggaccgcttctttgccaccacagctgtggtgatggccgaggtgctgaagggcctgacctgcctgctgctgctgtttgcccagaagagaggaaatgtgaagcacctggtgctcttcctgcacgaggccgtgctggtgcagtatgtggacaccctgaagctggccgtgcccagcctcatctacaccctgcagaacaacctgcagtatgtggccatcagcaacctgcctgctgccaccttccaggtgacctaccagctgaagatcctgaccacagccctcttctctgtgctgatgctgaacagaagcctgagccggctgcagtgggccagcctgctgctgctcttcaccggggtggccatcgtgcaggcccagcaggccggcggcggcggcccccggcccctggaccagaaccctggagctggcctggccgctgtggtggccagctgcctgagcagcggctttgctggggtgtactttgagaagatcctgaagggcagcagcggctctgtgtggctgaggaacctgcagctgggcctgtttggaacagccctgggcctggtgggcctgtggtgggccgagggcacagctgtggccacccggggcttcttcttcggctacaccccagctgtgtggggcgtggtgctgaaccaggccttcggcggcctgctggtggccgtggtggtgaagtatgctgacaacatcctgaagggctttgccaccagcctgagcatcgtgctgagcacagtggccagcatccggctgtttggcttccacgtggaccccctgtttgccctgggcgccggcctggtgattggagctgtgtacctgtacagcctgcccaggggggccgccaaggccatcgccagcgccagcgccagcgccagcggcccctgtgtgcaccagcagcccccaggccagcccccaccaccccagctgagcagccacagaggagacctgatcacagagcccttcctgcccaagtctgtgctggtgaagtag

SEQ ID NO: 170669 - DNA, 1068 bp, synthetic construct
  misc_feature 1..1068: note = Description of Artificial Sequence: Synthetic coding sequence
  source 1..1068: mol_type = other DNA
atggccgaggtgcaccggcggcagcacgcccgggtgaagggggaggccccagccaagagcagcaccctgagagatgaggaggagctgggcatggccagcgctgagaccctgaccgtcttcctgaagctgctggccgccggcttctatggagtgtcctccttcctgattgtggtggtgaacaagtctgtgctgaccaactaccgcttccccagcagcctgtgtgtgggcctgggccagatggtggccaccgtggccgtgctgtgggtgggcaaggccctgcgggtggtgaagttcccagacctggacagaaatgtgcccaggaagaccttccccctgcccctgctgtactttggaaaccagatcaccggcctcttcagcaccaagaagctgaacctgcccatgttcaccgtgctgcggcgcttcagcatcctcttcaccatgtttgctgagggcgtgctgctgaagaagaccttctcctggggcatcaagatgacagtgtttgccatgatcattggagcctttgtggccgccagcagtgacctggcctttgacctggagggctacgccttcatcctgatcaatgatgtgctgacagctgccaatggagcctacgtgaagcagaagctggacagcaaggagctgggcaagtatggcctgctgtactacaatgccctcttcatgatcctgcccaccctggccatcgcctacttcaccggagatgcccagaaggctgtggagtttgagggctgggccgacaccctcttcctgctgcagttcaccctgagctgtgtgatgggcttcatcctgatgtatgccaccgtgctgtgcacccagtacaacagcgccctgaccaccaccatcgtgggctgcatcaagaacatcctgatcacctacatcggcatggtgtttggaggagactacatcttcacctggaccaacttcatcggcctgaacatcagcattgctggcagcctggtgtacagctacatcaccttcacagaggagcagctgagcaagcagagcgaggccaacaacaagctggacatcaagggcaaaggagctgtgtag

SEQ ID NO: 170670 - DNA, 783 bp, synthetic construct
  misc_feature 1..783: note = Description of Artificial Sequence: Synthetic coding sequence
  source 1..783: mol_type = other DNA
atggtggccaccgtggccgtgctgtgggtgggcaaggccctgcgggtggtgaagttcccagacctggacagaaatgtgcccaggaagaccttccccctgcccctgctgtacttcggcaaccagatcaccggcctcttcagcaccaagaagctgaacctgcccatgttcaccgtgctgcggcgcttcagcatcctcttcaccatgtttgctgagggcgtgctgctgaagaagaccttctcctggggcatcaagatgacagtgtttgccatgatcatcggggcctttgtggccgccagcagtgacctggcctttgacctggagggctacgccttcatcctgatcaatgatgtgctgacagctgccaacggggcctacgtgaagcagaagctggacagcaaggagctgggcaagtatggcctgctgtactacaatgccctcttcatgatcctgcccaccctggccatcgcctacttcaccggagatgcccagaaggctgtggagtttgagggctgggccgacaccctcttcctgctgcagttcaccctgagctgtgtgatgggcttcatcctgatgtatgccaccgtgctgtgcacccagtacaacagcgccctgaccaccaccatcgtgggctgcatcaagaacatcctgatcacctacatcggcatggtgtttggaggagactacatcttcacctggaccaacttcatcggcctgaacatcagctgcatctgccaccggggcctgtgtgagctgcgggtgggcagcgccaccctgggcggctag

SEQ ID NO: 170671 - DNA, 1104 bp, synthetic construct
  misc_feature 1..1104: note = Description of Artificial Sequence: Synthetic coding sequence
  source 1..1104: mol_type = other DNA
atgagcagccgctctgtgctgagccctgtggtgggcacagatgccccagaccagcacctggagctgaagaagccccaggagctgaaggagatggagcggctgcccctggccaatgaagacaagaccatgtttgccaacctgaagtatgtgtccctgggcatcctggtgttccagaccaccagcctggtgctgaccatgagatacagcaggaccctgaaggaggagggcccccgctacctgagcagcacagctgtggtggtggccgagctgctgaagatcatggcctgcatcctgctggtgtacaaggacagcaagtgcagcctgcgggccctgaacagagtgctgcatgatgagatcctgaacaagcccatggagaccctgaagctggccatccccagcggcatctacaccctgcagaacaacctgctgtatgtggccctgagcaacctggatgctgccacctaccaggtgacctaccagctgaagatcctgaccacagccctcttctctgtgtccatgctgagcaagaagctgggcgtgtaccagtggctgagcctggtgatcctgatgactggagtggcctttgtgcagtggcccagcgacagccagctggacagcaaggagctgtctgctggcagccagtttgtgggcctgatggctgtgctgacagcctgcttcagcagcggctttgctggggtgtactttgagaagatcctgaaggagaccaagcagagcgtgtggatccggaacatccagctgggcttcttcggcagcatcttcggcctgatgggcgtgtacatctatgatggagagctggtgtccaagaatggcttcttccagggctacaaccggctgacctggatcgtggtggtgctgcaggccctgggcggcctggtgattgctgctgtgatcaagtatgctgacaacatcctgaagggctttgccaccagcctgagcatcatcctgagcaccctcatctcctacttctggctgcaggactttgtgcccaccagcgtcttcttcctgggcgccatcctggtgatcacagccaccttcctgtatggctatgaccccaagccagctggcaaccccaccaaggcctag

SEQ ID NO: 170672 - DNA, 978 bp, synthetic construct
  misc_feature 1..978: note = Description of Artificial Sequence: Synthetic coding sequence
  source 1..978: mol_type = other DNA
atgtttgccaacctgaagtatgtgtccctgggcatcctggtgttccagaccaccagcctggtgctgaccatgagatacagcaggaccctgaaggaggagggcccccgctacctgagcagcacagctgtggtggtggccgagctgctgaagatcatggcctgcatcctgctggtgtacaaggacagcaagtgcagcctgcgggccctgaacagagtgctgcatgatgagatcctgaacaagcccatggagaccctgaagctggccatccccagcggcatctacaccctgcagaacaacctgctgtatgtggccctgagcaacctggatgctgccacctaccaggtgacctaccagctgaagatcctgaccacagccctcttctctgtgtccatgctgagcaagaagctgggcgtgtaccagtggctgagcctggtgatcctgatgactggagtggcctttgtgcagtggcccagcgacagccagctggacagcaaggagctgtctgctggcagccagtttgtgggcctgatggctgtgctgacagcctgcttcagcagcggctttgctggggtgtactttgagaagatcctgaaggagaccaagcagagcgtgtggatccggaacatccagctgggcttcttcggcagcatcttcggcctgatgggcgtgtacatctatgatggagagctggtgtccaagaatggcttcttccagggctacaaccggctgacctggatcgtggtggtgctgcaggccctgggcggcctggtgattgctgctgtgatcaagtatgctgacaacatcctgaagggctttgccaccagcctgagcatcatcctgagcaccctcatctcctacttctggctgcaggactttgtgcccaccagcgtcttcttcctgggcgccatcctggtgatcacagccaccttcctgtatggctatgaccccaagccagctggcaaccccaccaaggcctag

SEQ ID NO: 170673 - DNA, 675 bp, synthetic construct
  misc_feature 1..675: note = Description of Artificial Sequence: Synthetic coding sequence
  source 1..675: mol_type = other DNA
atgtttgccaacctgaagtatgtgtccctgggcatcctggtgttccagaccaccagcctggtgctgaccatgagatacagcaggaccctgaaggaggagggcccccgctacctgagcagcacagctgtggtggtggccgagctgctgaagatcatggcctgcatcctgctggtgtacaaggacagcaagtgcagcctgcgggccctgaacagagtgctgcatgatgagatcctgaacaagcccatggagaccctgaagctggccatccccagcggcatctacaccctgcagaacaacctgctgtatgtggccctgagcaacctggatgctgccacctaccaggtgacctaccagctgaagatcctgaccacagccctcttctctgtgtccatgctgagcaagaagctgggcgtgtaccagtggctgagcctggtgatcctgatgactggagtggcctttgtgcagtggcccagcgacagccagctggacagcaaggagctgtctgctggcagccagtttgtgggcctgatggctgtgctgacagcctgcttcagcagcggctttgctggggtgtactttgagaagatcctgaaggagaccaagcagagcgtgtggatccggaacatccagctgggcttcttcggcagcatcttcggcctgatgggcgtgtactag

SEQ ID NO: 170674 - DNA, 978 bp, synthetic construct; identical to SEQ ID NO: 170672
  misc_feature 1..978: note = Description of Artificial Sequence: Synthetic coding sequence
  source 1..978: mol_type = other DNA

SEQ ID NO: 170675 - DNA, 663 bp, synthetic construct
  misc_feature 1..663: note = Description of Artificial Sequence: Synthetic coding sequence
  source 1..663: mol_type = other DNA
atgtttgccaacctgaagtatgtgtccctgggcatcctggtgttccagaccaccagcctggtgctgaccatgagatacagcaggaccctgaaggaggagggcccccgctacctgagcagcacagctgtggtggtggccgagctgctgaagatcatggcctgcatcctgctggtgtacaaggacagcaagtgcagcctgcgggccctgaacagagtgctgcatgatgagatcctgaacaagcccatggagaccctgaagctggccatccccagcggcatctacaccctgcagaacaacctgctgtatgtggccctgagcaacctggatgctgccacctaccaggtgacctaccagctgaagatcctgaccacagccctcttctctgtgtccatgctgagcaagaagctgggcgtgtaccagtggctgagcctggtgatcctgatgactggagtggcctttgtgcagtggcccagcgacagccagctggacagcaaggagctgtctgctggcagccagtttgtgggcctgatggctgtgctgacagcctgcttcagcagcggctttgctggggtgtactttgagaagatcctgaaggagaccaagcagagcgtgtggatccggaacatccagctggtgtccttcagcctggagcccagcctgtag

SEQ ID NO: 170676 - DNA, 258 bp, synthetic construct
  misc_feature 1..258: note = Description of Artificial Sequence: Synthetic coding sequence
  source 1..258: mol_type = other DNA
atgtttgccaacctgaagtatgtgtccctgggcatcctggtgttccagaccaccagcctggtgctgaccatgagatacagcaggaccctgaaggaggagggcccccgctacctgagcagcacagctgtggtggtggccgagctgctgaagatcatggcctgcatcctgctggtgtacaaggacagcaagtgcagcctgcgggccctgaacagagtgctgcatgatgagatcctgaacaagcccatggagaccctgtag

SEQ ID NO: 170677 - DNA, 1104 bp, synthetic construct; identical to SEQ ID NO: 170671
  misc_feature 1..1104: note = Description of Artificial Sequence: Synthetic coding sequence
  source 1..1104: mol_type = other DNA

SEQ ID NO: 170678 - DNA, 969 bp, synthetic construct
  misc_feature 1..969: note = Description of Artificial Sequence: Synthetic coding sequence
  source 1..969: mol_type = other DNA
atggccagcagcagcagcctggtgcctgaccggctgcggctgcccctgtgcttcctgggcgtgtttgtgtgctacttctactacggcatcctgcaggagaagatcacccggggcaagtacggggagggcgccaagcaggagaccttcacctttgccctgaccctggtgttcatccagtgtgtgatcaatgctgtgtttgccaagatcctgatccagttctttgacacagcccgggtggacaggaccaggtcctggctgtatgctgcctgcagcatctcctacctgggcgccatggtgagcagcaacagcgccctgcagtttgtgaactaccccacccaggtgctgggcaagagctgcaagcccatccctgtgatgctgctgggcgtgaccctgctgaagaagaagtaccccctggccaagtacctgtgtgtgctgctgattgtggccggcgtggccctcttcatgtacaagcccaagaaggtggtgggcatcgaggagcacacagtgggctatggagagctgctgctgctgctgagcctgaccctggatggcctgactggagtgtcccaggaccacatgagggcccactaccagacaggcagcaaccacatgatgctgaacatcaacctgtggagcaccctgctgctgggcatgggcatcctcttcaccggggagctgtgggagttcctgagctttgctgagcgctacccagccatcatctacaacatcctgctgtttggcctgaccagcgccctgggccagagcttcatcttcatgacagtggtgtacttcggccccctgacctgcagcatcatcaccaccaccaggaagttcttcaccatcctggccagcgtcatcctgtttgccaaccccatcagccccatgcagtgggtgggcaccgtgctggtgttcctgggcctgggcctggatgccaagtttggaaaaggagccaagaagaccagccactag

SEQ ID NO: 170679 - DNA, 450 bp, synthetic construct
  misc_feature 1..450: note = Description of Artificial Sequence: Synthetic coding sequence
  source 1..450: mol_type = other DNA
ccccagagctgcctgattggcaagatcagccgggcccgggaccagagccggggctgccgcttcccctggcccagcggcatggagcccaggaccagggtgggccccctgctggtgctgcctgatgcctgcaagcagcccatccggccccggccctggtgccacagcaggaacacagtgagcagctgcctgggcacccggggcaagtatggagagggcgccaagcaggagaccttcacctttgccctgaccctggtgttcatccagtgtgtgatcaatgctgtgtttgccaagatctggtggatcgtgcctggagctggctccatgctgcctgtgctgagccccatctgggtgccctggagccctgccatccagcactacagcctgagcaccacccagctgcggagcctggtgaacccagccagccagagccagagctgcagcctgggctag

SEQ ID NO: 170680 - DNA, 1080 bp, synthetic construct
  misc_feature 1..1080: note = Description of Artificial Sequence: Synthetic coding sequence
  source 1..1080: mol_type = other DNA
atgaggcccctgccccctgtgggagatgtgcggctggagctgagccccccaccacccctgctgcctgtgcctgtggtgtctggcagccctgtgggcagcagcggccgcctgatggccagcagcagcagcctggtgcctgaccggctgcggctgcccctgtgcttcctgggcgtgtttgtgtgctacttctactacggcatcctgcaggagaagatcacccggggcaagtatggagagggcgccaagcaggagaccttcacctttgccctgaccctggtgttcatccagtgtgtgatcaatgctgtgtttgccaagatcctgatccagttctttgacacagcccgggtggacaggaccaggtcctggctgtatgctgcctgcagcatctcctacctgggcgccatggtgagcagcaacagcgccctgcagtttgtgaactaccccacccaggtgctgggcaagagctgcaagcccatccctgtgatgctgctgggcgtgaccctgctgaagaagaagtaccccctggccaagtacctgtgtgtgctgctgattgtggccggcgtggccctcttcatgtacaagcccaagaaggtggtgggcatcgaggagcacacagtgggctacggggagctgctgctgctgctgagcctgaccctggatggcctgactggagtgtcccaggaccacatgagggcccactaccagacaggcagcaaccacatgatgctgaacatcaacctgtggagcaccctgctgctgggcatgggcatcctcttcaccggggagctgtgggagttcctgagctttgctgagcgctacccagccatcatctacaacatcctgctgtttggcctgaccagcgccctgggccagagcttcatcttcatgacagtggtgtacttcggccccctgacctgcagcatcatcaccaccaccaggaagttcttcaccatcctggccagcgtcatcctgtttgccaaccccatcagccccatgcagtgggtgggcaccgtgctggtgttcctgggcctgggcctggatgccaagtttgggaagggggccaagaagaccagccactag

SEQ ID NO: 170681 - DNA, 720 bp, synthetic construct
  misc_feature 1..720: note = Description of Artificial Sequence: Synthetic coding sequence
  source 1..720: mol_type = other DNA
atggccagcagcagcagcctggtgcctgaccggctgcggctgcccctgtgcttcctgggcgtgtttgtgtgctacttctactacggcatcctgcaggagaagatcacccggggcaagtacggggagggcgccaagcaggagaccttcacctttgccctgaccctggtgttcatccagtgtgtgatcaatgctgtgtttgccaagatcctgatccagttctttgacacagcccgggtggacaggaccaggtcctggctgtatgctgcctgcagcatctcctacctgggcgccatggtgagcagcaacagcgccctgcagtttgtgaactaccccacccaggtgctgggcaagagctgcaagcccatccctgtgatgctgctgggcgtgaccctgctgaagaagaagtaccccctggccaagtacctgtgtgtgctgctgattgtggccggcgtggccctcttcatgtacaagcccaagaaggtggtgggcatcgaggagcacacagtgggctatggagagctgctgctgctgctgagcctgaccctggatggcctgactggagtgtcccaggaccacatgagggcccactaccagacaggcagcaaccacatgatgctgaacatcaacctgtggagcaccctgctgctgggcatgggagagagccagttctgctgcagcagccacgtgtccccagagggccgcctgcccagcagcttctag

SEQ ID NO: 170682 - DNA, 597 bp, synthetic construct
  misc_feature 1..597: note = Description of Artificial Sequence: Synthetic coding sequence
  source 1..597: mol_type = other DNA
atgctgctgggcgtgaccctgctgaagaagaagtaccccctggccaagtacctgtgtgtgctgctgattgtggccggcgtggccctcttcatgtacaagcccaagaaggtggtgggcatcgaggagcacacagtgggctatggagagctgctgctgctgctgagcctgaccctggatggcctgactggagtgtcccaggaccacatgagggcccactaccagacaggcagcaaccacatgatgctgaacatcaacctgtggagcaccctgctgctgggcatgggcatcctcttcaccggggagctgtgggagttcctgagctttgctgagcgctacccagccatcatctacaacatcctgctgtttggcctgaccagcgccctgggccagagcttcatcttcatgacagtggtgtacttcggccccctgacctgcagcatcatcaccaccaccaggaagttcttcaccatcctggccagcgtcatcctgtttgccaaccccatcagccccatgcagtgggtgggcaccgtgctggtgttcctgggcctgggcctggatgccaagtttggaaaaggagccaagaagaccagccactag

SEQ ID NO: 170683 - DNA, 570 bp, synthetic construct
  misc_feature 1..570: note = Description of Artificial Sequence: Synthetic coding sequence
  source 1..570: mol_type = other DNA
atgctgctgggcgtgaccctgctgaagaagaagtaccccctggccaagtacctgtgtgtgctgctgattgtggccggcgtggccctcttcatgtacaagcccaagaaggtggtgggcatcgaggagcacacagtgggctatggagagctgctgctgctgctgagcctgaccctggatggcctgactggagtgtcccaggaccacatgagggcccactaccagacaggcagcaaccacatgatgctgaacatcaacctgtggagcaccctgctgctgggcatgggcatcctcttcaccggggagctgtgggagttcctgagctttgctgagcgctacccagccatcatctacaacatcctgctgtttggcctgaccagcgccctgggccagagcttcatcttcatgacagtggtgtacttcggccccctgacctgcagcatcatcaccaccaccaggaagttcttcaccatcctggccagcgtcatcctgtttgccaaccccatcagccccatgcagtgggtgggcaccgtgctggtgttcctggccatgggcagctgctgcgtggcctag

SEQ ID NO: 170684 - DNA, 1179 bp, synthetic construct
  misc_feature 1..1179: note = Description of Artificial Sequence: Synthetic coding sequence
  source 1..1179: mol_type = other DNA
atggatgcccgctggtgggccgtggtggtgctggccgccttccccagcctgggcgccggcggggagaccccagaggcccctcctgagagctggacccagctgtggttcttccgctttgtggtgaatgctgctggctacgccagcttcatggtgcccggctacctgctggtgcagtacttccggaggaagaactacctggagaccggccggggcctgtgcttccccctggtgaaggcctgtgtgtttggaaatgagcccaaggccagtgatgaggtgcccctggcccccaggacagaggccgctgagaccacccccatgtggcaggccctgaagctgctcttctgtgccaccggcctgcaggtgtcctacctgacctggggcgtgctgcaggagcgggtgatgaccaggagctatggagccacagccaccagccctggagagcgcttcacagacagccagttcctggtgctgatgaacagagtgctggccctgattgtggccggcctgagctgtgtgctgtgcaagcagcccaggcatggagcccccatgtaccgctacagctttgccagcctgagcaatgtgctgagctcctggtgccagtatgaggccctgaagtttgtgtccttccccacccaggtgctggccaaggccagcaaggtgattcctgtgatgctgatgggcaagctggtgagccgccgctcctatgagcactgggagtacctgacagccaccctcatcagcattggagtgtccatgttcctgctgagcagcggccctgagcccaggagcagccctgccaccaccctgagcggcctcttcaccgtgggcagcctgctggagcagggcgccctgctggagggcacccgcttcatgggccgccacagcgagtttgctgcccacgccctgctgctgagcatctgcagcgcctgtggccagctgttcatcttctacaccatcggccagtttggagctgctgtgttcaccatcatcatgaccctgcggcaggcctttgccatcctgctgagctgcctgctgtatggccacacagtgacagtggtgggcggcctgggcgtggccgtggtgtttgctgccctgctgctgcgggtgtatgcccggggccgcctgaagcagaggggcaagaaggctgtgcctgtggagagccctgtgcagaaggtgtag

SEQ ID NO: 170685 - DNA, 1299 bp, synthetic construct
  misc_feature 1..1299: note = Description of Artificial Sequence: Synthetic coding sequence
  source 1..1299: mol_type = other DNA
atggatgcccgctggtgggccgtggtggtgctggccgccttccccagcctgggcgccggcggggagaccccagaggcccctcctgagagctggacccagctgtggttcttccgctttgtggtgaatgctgctggctacgccagcttcatggtgcccggctacctgctggtgcagtacttccggaggaagaactacctggagaccggccggggcctgtgcttccccctggtgaaggcctgtgtgtttggaaatgagcccaaggccagtgatgaggtgcccctggcccccaggacagaggccgctgagaccacccccatgtggcaggccctgaagctgctcttctgtgccaccggcctgcaggtgtcctacctgacctggggcgtgctgcaggagcgggtgatgaccaggagctatggagccacagccaccagccctggagagcgcttcacagacagccagttcctggtgctgatgaacagagtgctggccctgattgtggccggcctgagctgtgtgctgtgcaagcagcccaggcatggagcccccatgtaccgctacagctttgccagcctgagcaatgtgctgagctcctggtgccagtatgaggccctgaagtttgtgtccttccccacccaggtgctggccaaggccagcaaggtgattcctgtgatgctgatgggcaagctggtgagccgccgctcctatgagcactgggagtacctgacagccaccctcatcagcattggagtgtccatgttcctgctgagcagcggccctgagcccaggagcagccctgccaccaccctgagcggcctcatcctgctggccggctacatcgcctttgacagcttcaccagcaactggcaggatgccctgtttgcctacaagatgagctctgtgcagatgatgtttggagtgaacttcttcagctgcctcttcaccgtgggcagcctgctggagcagggcgccctgctggagggcacccgcttcatgggccgccacagcgagtttgctgcccacgccctgctgctgagcatctgcagcgcctgtggccagctgttcatcttctacaccatcggccagtttggagctgctgtgttcaccatcatcatgaccctgcggcaggcctttgccatcctgctgagctgcctgctgtatggccacacagtgacagtggtgggcggcctgggcgtggccgtggtgtttgctgccctgctgctgcgggtgtatgcccggggccgcctgaagcagaggggcaagaaggctgtgcctgtggagagccctgtgcagaaggtgtag

SEQ ID NO: 170686 - DNA, 900 bp, synthetic construct
  misc_feature 1..900: note = Description of Artificial Sequence: Synthetic coding sequence
  source 1..900: mol_type = other DNA
atgaccaggagctatggagccacagccaccagccctggagagcgcttcacagacagccagttcctggtgctgatgaacagagtgctggccctgattgtggccggcctgagctgtgtgctgtgcaagcagcccaggcatggagcccccatgtaccgctacagctttgccagcctgagcaatgtgctgagctcctggtgccagtatgaggccctgaagtttgtgtccttccccacccaggtgctggccaaggccagcaaggtgattcctgtgatgctgatgggcaagctggtgtccagaagaagctatgagcactgggagtacctgacagccaccctcatcagcattggagtgtccatgttcctgctgagcagcggccctgagcccaggagcagccctgccaccaccctgagcggcctcatcctgctggccggctacatcgcctttgacagcttcaccagcaactggcaggatgccctgtttgcctacaagatgagctctgtgcagatgatgtttggagtgaacttcttcagctgcctcttcaccgtgggcagcctgctggagcagggcgccctgctggagggcacccgcttcatgggccgccacagcgagtttgctgcccacgccctgctgctgagcatctgcagcgcctgtggccagctgttcatcttctacaccatcggccagtttggagctgctgtgttcaccatcatcatgaccctgcggcaggcctttgccatcctgctgagctgcctgctgtatggccacacagtgacagtggtgggcggcctgggcgtggccgtggtgtttgctgccctgctgctgcgggtgtatgcccggggccgcctgaagcagaggggcaagaaggctgtgcctgtggagagccctgtgcagaaggtgtag

SEQ ID NO: 170687 - DNA, 1020 bp, synthetic construct
  misc_feature 1..1020: note = Description of Artificial Sequence: Synthetic coding sequence
  source 1..1020: mol_type = other DNA
atgctgctggccatgcctgccctgtggtacctggccacctcctggtgcagcaccagcggcggccgcaccacctggaggcctgtgtcctacctgacctggggcgtgctgcaggagcgggtgatgaccaggagctatggagccacagccaccagccctggagagcgcttcacagacagccagttcctggtgctgatgaacagagtgctggccctgattgtggccggcctgagctgtgtgctgtgcaagcagcccaggcatggagcccccatgtaccgctacagctttgccagcctgagcaatgtgctgagctcctggtgccagtatgaggccctgaagtttgtgtccttccccacccaggtgctggccaaggccagcaaggtgattcctgtgatgctgatgggcaagctggtgtccagaagaagctatgagcactgggagtacctgacagccaccctcatcagcattggagtgtccatgttcctgctgagcagcggccctgagcccaggagcagccctgccaccaccctgagcggcctcatcctgctggccggctacatcgcctttgacagcttcaccagcaactggcaggatgccctgtttgcctacaagatgagctctgtgcagatgatgtttggagtgaacttcttcagctgcctcttcaccgtgggcagcctgctggagcagggcgccctgctggagggcacccgcttcatgggccgccacagcgagtttgctgcccacgccctgctgctgagcatctgcagcgcctgtggccagctgttcatcttctacaccatcggccagtttggagctgctgtgttcaccatcatcatgaccctgcggcaggcctttgccatcctgctgagctgcctgctgtatggccacacagtgacagtggtgggcggcctgggcgtggccgtggtgtttgctgccctgctgctgcgggtgtatgcccggggccgcctgaagcagaggggcaagaaggctgtgcctgtggagagccctgtgcagaaggtgtag

SEQ ID NO: 170688 - DNA, 852 bp, synthetic construct
  misc_feature 1..852: note = Description of Artificial Sequence: Synthetic coding sequence
  source 1..852: mol_type = other DNA
atggacctgacccagcaggccaaggacatccagaacatcaccgtgcaggagaccaacaagaacaacagcgagagcattgaatgttccaagatcaccatggacctgaagttcaacaacagcaggaagtacatcagcatcaccgtgcccagcaagacccagaccatgagcccccacatcaagtctgtggatgatgtggtggtgctgggcatgaacctgagcaagttcaacaagctgacccagttcttcatctgtgtggccggcgtgtttgtgttctacctgatctacggctacctgcaggagctgatcttctctgtggagggcttcaagagctgtggctggtacctgaccctggtgcagtttgccttctacagcatcttcggcctgattgagctgcagctgatccaggacaagagaagacgcatccctgggaagacctacatgatcatcgccttcctgactgtgggcaccatgggcctgagcaacaccagcctgggctacctgaactaccccacccaggtgatcttcaagtgctgcaagctgatccctgtgatgctgggcggcgtcttcatccagggcaagcgctacaacgtggctgatgtgtctgctgccatctgcatgagcctgggcctcatctggttcaccctggccgacagcaccacagcccccaacttcaacctgactggagtggtgctgatcagcctggccctgtgtgctgatgctgtgattggaaatgtgcaggagaaggccatgaagctgcacaatgccagcaacagcgagatgaacatcaccaccagcagctacagcggggtcttcatcttccccaacaagctgaagatccccctggtgctgtag

SEQ ID NO: 170689 - DNA, 1206 bp, synthetic construct
  misc_feature 1..1206: note = Description of Artificial Sequence: Synthetic coding sequence
  source 1..1206: mol_type = other DNA
atggacctgacccagcaggccaaggacatccagaacatcaccgtgcaggagaccaacaagaacaacagcgagagcattgaatgttccaagatcaccatggacctgaagttcaacaacagcaggaagtacatcagcatcaccgtgcccagcaagacccagaccatgagcccccacatcaagtctgtggatgatgtggtggtgctgggcatgaacctgagcaagttcaacaagctgacccagttcttcatctgtgtggccggcgtgtttgtgttctacctgatctacggctacctgcaggagctgatcttctctgtggagggcttcaagagctgtggctggtacctgaccctggtgcagtttgccttctacagcatcttcggcctgattgagctgcagctgatccaggacaagagaagacgcatccctgggaagacctacatgatcatcgccttcctgactgtgggcaccatgggcctgagcaacaccagcctgggctacctgaactaccccacccaggtgatcttcaagtgctgcaagctgatccctgtgatgctgggcggcgtcttcatccagggcaagcgctacaacgtggctgatgtgtctgctgccatctgcatgagcctgggcctcatctggttcaccctggccgacagcaccacagcccccaacttcaacctgactggagtggtgctgatcagcctggccctgtgtgctgatgctgtgattggaaatgtgcaggagaaggccatgaagctgcacaatgccagcaacagcgagatggtgctgtacagctacagcattggatttgtgtacatcctgctgggcctgacctgcaccagcggcctgggccctgctgtgaccttctgtgccaagaaccctgtgaggacctacggctacgccttcctgttcagcctgaccggctacttcggcatcagctttgtgctggccctgatcaagatctttggagccctgattgctgtgacagtgaccactggaaggaaggccatgaccatcgtgctgtccttcatcttctttgccaagcccttcaccttccagtatgtgtggagcggcctgctggtggtgctgggcatcttcctgaatgtgtacagcaagaacatggacaagatccggctgcccagcctgtatgacctgatcaacaagtctgtggaggccaggaagagcaggaccctggcccagacagtgtag

SEQ ID NO: 170690 - DNA, 657 bp, synthetic construct
  misc_feature 1..657: note = Description of Artificial Sequence: Synthetic coding sequence
  source 1..657: mol_type = other DNA
atgctgcggctggcccagaccccccggcggctgcccagccccttccgggtgacctaccggccctggggcacccgggcctttggagccttccctgtgtttggcacccagatcagcagccccccagagaacctggacacagcccacctgccccaccctgagggcgcctttgaggagtggatgaggagcggctggaagaagagggacctgacccagcaggccaaggacatccagaacatcaccgtgcaggagaccaacaagaacaacagcgagagcattgaatgttccaagatcaccatggacctgaagttcaacaacagcaggaagtacatcagcatcaccgtgcccagcaagacccagaccatgagcccccacatcaagtctgtggatgatgtggtggtgctgggcatgaacctgagcaagttcaacaagctgacccagttcttcatctgtgtggccggcgtgtttgtgttctacctgatctacggctacctgcaggagctgatcttctctgtggagggcttcaagagctgtggctggtacctgaccctggtgcagtttgccttctacagcatcttcggcctgattgagctgcagctgatccaggacaagagaagaagatatgtggtgtgcttctacttcctgatcttcctgtactag

SEQ ID NO: 170691 - DNA, 996 bp, synthetic construct
  misc_feature 1..996: note = Description of Artificial Sequence: Synthetic coding sequence
  source 1..996: mol_type = other DNA
atgaggcctgccctggccgtgggcctggtgtttgctggctgctgcagcaatgtcatcttcctggagctgctggccaggaagcaccctggctgcggcaacatcgtgacctttgcccagttcctgttcatcgctgtggagggcttcctgtttgaggccgacctgggcaggaagcccccagccatccccatccgctactatgccatcatggtgaccatgttcttcaccgtgtctgtggtgaacaactatgccctgaacctgaacatcgccatgcccctgcacatgatcttccgcagcggcagcctcatcgccaacatgatcctgggcatcatcatcctgaagaagcgctacagcatcttcaagtacaccagcatcgccctggtgtctgtgggcatcttcatctgcaccttcatgtctgccaagcaggtgaccagccagagcagcctgtctgaaaatgatggcttccaggcctttgtgtggtggctgctgggcatcggggccctgacctttgccctgctgatgtctgccaggatgggcatcttccaggagaccctgtacaagagatttgggaagcacagcaaggaggccctcttctacaaccacgccctgcccctgcccggctttgtgttcctggccagtgacatctatgaccatgctgtgctcttcaacaagtctgagctgtatgagatccctgtgattggagtgaccctgcccatcatgtggttctacctgctgatgaacatcatcacccagtatgtgtgcatccggggcgtcttcatcctgaccacagaatgtgccagcctgactgtgaccctggtggtgaccctgaggaagtttgtgtccctcatcttcagcatcctgtacttccagaaccccttcaccctgtggcactggctgggcaccctgtttgtgttcatcggcaccctgatgtacacagaggtgtggaacaacctgggcaccaccaagtctgagccccagaaggacagcaagaagaactag

SEQ ID NO: 170692 - DNA, 1095 bp, synthetic construct
  misc_feature 1..1095: note = Description of Artificial Sequence: Synthetic coding sequence
  source 1..1095: mol_type = other DNA
atgaacagagcccccctgaagaggagccgcatcctgcacatggccctgactggagccagtgaccccagcgctgaggccgaggccaatggagagaagcccttcctgctgcgggccctgcagatcgccctggtggtgtccctgtactgggtgaccagcatctccatggtgttcctgaacaagtacctgctggacagccccagcctgcggctggacacccccatctttgtgaccttctaccagtgcctggtgaccaccctgctgtgcaagggcctgagcgccctggccgcctgctgccctggagctgtggacttccccagcctgcggctggacctgcgggtggcccggtctgtgctgcccctgtctgtggtgttcatcggcatgatcaccttcaacaacctgtgcctgaagtatgtgggcgtggccttctacaacgtgggccgcagcctgaccaccgtcttcaacgtgctgctgagctacctgctgctgaagcagaccaccagcttctacgccctgctgacctgtggcatcatcatcggcggcttctggctgggcgtggaccaggagggcgctgagggcaccctgtcctggctgggcaccgtgtttggagtgctggccagcctgtgtgtgtccctgaatgccatctacaccaccaaggtgctgcctgctgtggatggcagcatctggaggctgaccttctacaacaacgtgaatgcctgcatcctcttcctgcccctgctgctgctgctgggggagctgcaggccctgcgggactttgcccagctgggcagcgcccacttctggggcatgatgaccctgggcggcctgtttggatttgccatcggctacgtgacaggcctgcagatcaagttcaccagccccctgacccacaacgtgtctggaacagccaaggcctgtgcccagacagtgctggccgtgctgtactatgaggagaccaagagcttcctgtggtggaccagcaacatgatggtgctgggcggcagcagcgcctacacctgggtgcggggctgggagatgaagaagaccccagaggagcccagccccaaggacagcgagaagagcgccatgggcgtgtag

SEQ ID NO: 170693 - DNA, 1056 bp, synthetic construct
  misc_feature 1..1056: note = Description of Artificial Sequence: Synthetic coding sequence
  source 1..1056: mol_type = other DNA
atggccctgaccggggccagtgaccccagcgctgaggccgaggccaacggggagaagcccttcctgctgcgggccctgcagatcgccctggtggtgtccctgtactgggtgaccagcatctccatggtgttcctgaacaagtacctgctggacagccccagcctgcggctggacacccccatctttgtgaccttctaccagtgcctggtgaccaccctgctgtgcaagggcctgagcgccctggccgcctgctgccctggagctgtggacttccccagcctgcggctggacctgcgggtggcccggtctgtgctgcccctgtctgtggtgttcatcggcatgatcaccttcaacaacctgtgcctgaagtatgtgggcgtggccttctacaacgtgggccgcagcctgaccaccgtcttcaacgtgctgctgagctacctgctgctgaagcagaccaccagcttctacgccctgctgacctgtggcatcatcattggaggcttctggctgggcgtggaccaggagggcgctgagggcaccctgtcctggctgggcaccgtgtttggagtgctggccagcctgtgtgtgtccctgaatgccatctacaccaccaaggtgctgcctgctgtggatggcagcatctggaggctgaccttctacaacaacgtgaatgcctgcatcctcttcctgcccctgctgctgctgctgggggagctgcaggccctgcgggactttgcccagctgggcagcgcccacttctggggcatgatgaccctgggcggcctgtttggatttgccatcggctacgtgacaggcctgcagatcaagttcaccagccccctgacccacaacgtgtctggaacagccaaggcctgtgcccagacagtgctggccgtgctgtactatgaggagaccaagagcttcctgtggtggaccagcaacatgatggtgctgggcggcagcagcgcctacacctgggtgcggggctgggagatgaagaagaccccagaggagcccagccccaaggacagcgagaagagcgccatgggcgtgtag

SEQ ID NO: 170694 - DNA, 1056 bp, synthetic construct; identical to SEQ ID NO: 170693
  misc_feature 1..1056: note = Description of Artificial Sequence: Synthetic coding sequence
  source 1..1056: mol_type = other DNA

SEQ ID NO: 170695 - DNA, 219 bp, synthetic construct
  misc_feature 1..219: note = Description of Artificial Sequence: Synthetic coding sequence
  source 1..219: mol_type = other DNA
atggccctgaccggggccagtgaccccagcgctgaggccgaggccaacggggagaagcccttcctgctgcgggccctgcagatcgccctggtggtgtccctgtactgggtgaccagcatctccatggtgttcctgaacaagtacctgctggacagccccagcctgcggctggacacccccatctttgtgaccttctaccagtgcctggtgaccacctag

SEQ ID NO: 170696 - DNA, 498 bp, synthetic construct
  misc_feature 1..498: note = Description of Artificial Sequence: Synthetic coding sequence
  source 1..498: mol_type = other DNA
atggccctgaccggggccagtgaccccagcgctgaggccgaggccaacggggagaagcccttcctgctgcgggccctgcagatcgccctggtggtgtccctgtactgggtgaccagcatctccatggtgttcctgaacaagtacctgctggacagccccagcctgcggctggacacccccatctttgtgaccttctaccagtgcctggtgaccaccctgctgtgcaagggcctgagcgccctggccgcctgctgccctggagctgtggacttccccagcctgcggctggacctgcgggtggcccggtctgtgctgcccctgtctgtggtgttcatcggcatgatcaccttcaacaacctgtgcctgaagtatgtgggcgtggccttctacaacgtgggccgcagcctgaccaccgtcttcaacgtgctgctgagctacctgctgctgaagcagaccaccagcttctacgccctgctgacctgtggcatcatcatctag

SEQ ID NO: 170697 - DNA, 741 bp, synthetic construct
  misc_feature 1..741: note = Description of Artificial Sequence: Synthetic coding sequence
  source 1..741: mol_type = other DNA
atgaacagagcccccctgaagaggagccgcatcctgcacatggccctgactggagccagtgaccccagcgctgaggccgaggccaatggagagaagcccttcctgctgcgggccctgcagatcgccctggtggtgtccctgtactgggtgaccagcatctccatggtgttcctgaacaagtacctgctggacagccccagcctgcggctggacacccccatctttgtgaccttctaccagtgcctggtgaccaccctgctgtgcaagggcctgagcgccctggccgcctgctgccctggagctgtggacttccccagcctgcggctggacctgcgggtggcccggtctgtgctgcccctgtctgtggtgttcatcggcatgatcaccttcaacaacctgtgcctgaagtatgtgggcgtggccttctacaacgtgggccgcagcctgaccaccgtcttcaacgtgctgctgagctacctgctgctgaagcagaccaccagcttctacgccctgctgacctgtggcatcatcatcggcggcttctggctgggcgtggaccaggagggcgctgagggcaccctgtcctggctgggcaccgtgtttggagtgctggccagcctgtgtgtgtccctgaatgccatctacaccaccaaggtgctgcctgctgtggatggcagcatctggaggctgaccttctacaacaacgtgaatgcctgcatcctcttcctgcccctgctgtag

SEQ ID NO: 170698 - DNA, 1014 bp, synthetic construct
  misc_feature 1..1014: note = Description of Artificial Sequence: Synthetic coding sequence
  source 1..1014: mol_type = other DNA
atgacagctgggggccaggccgaggccgagggcgctggaggagagcccggggccgcccggctgcccagccgggtggcccggctgctgagcgccctcttctacggcacctgcagcttcctgattgtgctggtgaacaaggccctgctgaccacctacggcttccccagccccatcttcctgggcatcggccagatggccgccaccatcatgatcctgtatgtgtccaagctgaacaagatcatccacttcccagactttgacaagaagatccctgtgaagctgttccccctgcccctgctgtatgtgggcaaccacatcagcggcctgagcagcaccagcaagctgagcctgcccatgttcaccgtgctgaggaagttcaccatccccctgaccctgctgctggagaccatcatcctgggcaagcagtacagcctgaacatcatcctgtctgtgtttgccatcatcctgggcgccttcatcgccgccggcagtgacctggccttcaacctggagggctacatctttgtgttcctgaatgacatcttcaccgctgccaacggggtgtacaccaagcagaagatggaccccaaggagctgggcaagtatggagtgctcttctacaatgcctgcttcatgatcatccccaccctcatcatctctgtgtccactggagacctgcagcaggccacagagttcaaccagtggaagaatgtggtgttcatcctgcagttcctgctgagctgcttcctgggcttcctgctgatgtacagcacagtgctgtgcagctactacaacagcgccctgaccacagctgtggtgggcgccatcaagaatgtgtctgtggcctacatcggcatcctgattggaggagactacatcttcagcctgctgaactttgtgggcctgaacatctgcatggccggcggcctgcgctacagcttcctgaccctgagcagccagctgaagcccaagcctgtgggggaggagaacatctgcctggacctgaagagctag

SEQ ID NO: 170699 - DNA, 492 bp, synthetic construct
  misc_feature 1..492: note = Description of Artificial Sequence: Synthetic coding sequence
  source 1..492: mol_type = other DNA
atgacagctgggggccaggccgaggccgagggcgctggaggagagcccggggccgcccggctgcccagccgggtggcccggctgctgagcgccctcttctacggcacctgcagcttcctgattgtgctggtgaacaaggccctgctgaccacctacggcttccccagccccatcttcctgggcatcggccagatggccgccaccatcatgatcctgtatgtgtccaagctgaacaagatcatccacttcccagactttgacaagaagatccctgtgaagctgttccccctgcccctgctgtatgtgggcaaccacatcagcggcctgagcagcaccagcaagctgagcctgcccatgttcaccgtgctgaggaagttcaccatccccctgaccctgctgctggagaccatcatcctgggcaagcagtacagcctgaacatcatcctgtctgtgtttgccatcatcctgggcgccttcatcgccgccggctag

SEQ ID NO: 170700 - DNA, 750 bp, synthetic construct
  misc_feature 1..750: note = Description of Artificial Sequence: Synthetic coding sequence
  source 1..750: mol_type = other DNA
atgacagctgggggccaggccgaggccgagggcgctggaggagagcccggggccgcccggctgcccagccgggtggcccggctgctgagcgccctcttctacggcacctgcagcttcctgattgtgctggtgaacaaggccctgctgaccacctacggcttccccagccccatcttcctgggcatcggccagatggccgccaccatcatgatcctgtatgtgtccaagctgaacaagatcatccacttcccagactttgacaagaagatccctgtgaagctgttccccctgcccctgctgtatgtgggcaaccacatcagcggcctgagcagcaccagcaagctgagcctgcccatgttcaccgtgctgaggaagttcaccatccccctgaccctgctgctggagaccatcatcctgggcaagcagtacagcctgaacatcatcctgtctgtgtttgccatcatcctgggcgccttcatcgccgccggcttcctgctgatgtacagcacagtgctgtgcagctactacaacagcgccctgaccacagctgtggtgggcgccatcaagaatgtgtctgtggcctacatcggcatcctgattggaggagactacatcttcagcctgctgaactttgtgggcctgaacatctgcatggccggcggcctgcgctacagcttcctgaccctgagcagccagctgaagcccaagcctgtgggggaggagaacatctgcctggacctgaagagctag

SEQ ID NO: 170701 - DNA, 1251 bp, synthetic construct
  misc_feature 1..1251: note = Description of Artificial Sequence: Synthetic coding sequence
  source 1..1251: mol_type = other DNA
atgaggcagctgtgccggggccgggtgctgggcatctctgtggccatcgcccacggcgtcttcagcggcagcctgaacatcctgctgaagttcctgatcagccgctaccagttctccttcctgaccctggtgcagtgcctgaccagcagcacagctgccctgagcctggagctgctgcggcggctgggcctgattgctgtgccccccttcggcctgagcctggcccggagctttgctggggtggccgtgctgagcaccctgcagagcagcctgaccctgtggagcctgcggggcctgagcctgcccatgtatgtggtgttcaagcgctgcctgcccctggtgaccatgctgattggagtgctggtgctgaagaatggagcccccagccctggggtgctggccgctgtgctgatcaccacctgtggggccgccctggccggggccggggacctgaccggggaccccatcggctacgtgactggagtgctggccgtgctggtgcatgctgcctacctggtgctgatccagaaggccagcgctgacacagagcacggccccctgacagcccagtatgtgattgctgtgtctgccacccccctgctggtgatctgcagctttgccagcacagacagcatccacgcctggaccttccctggctggaaggaccctgccatggtgtgcatctttgtggcctgcatcctgattggctgtgccatgaacttcaccaccctgcactgcacctacatcaacagcgctgtgaccaccagctttgtgggcgtggtgaagagcatcgccaccatcaccgtgggcatggtggccttcagtgatgtggagcccaccagcctcttcatcgccggcgtggtggtgaacaccctgggcagcatcatctactgtgtggccaagttcatggagaccaggaagcagagcaactatgaggacctggaggcccagcccagaggagaggaggcccagctgagcggggaccagctgccctttgtgatggaggagctgcccggggagggcggcaatggccgctctgagggcggggaggccgccggcggccctgcccaggagagccggcaggaggtgcggggcagcccccggggcgtgcccctggtggccggcagcagcgaggagggcagccgccgcagcctgaaggatgcctacctggaggtgtggaggctggtgcggggcacccgctacatgaagaaggactacctgattgaaaatgaggagctgcccagcccctag

SEQ ID NO: 170702 - DNA, 1431 bp, synthetic construct
  misc_feature 1..1431: note = Description of Artificial Sequence: Synthetic coding sequence
  source 1..1431: mol_type = other DNA
atgagcacccagaggctgagaaatgaagactaccatgactacagcagcacagatgtgtccccagaggagagccccagcgagggcctgaacaacctgagcagccctggcagctaccagagatttggccagagcaacagcaccacctggttccagaccctcatccacctgctgaagggcaacattggaacaggcctgctgggcctgcccctggccgtgaagaatgccggcatcgtgatgggccccatcagcctgctgatcattggaattgtggccgtgcactgcatgggcatcctggtgaagtgtgcccaccacttctgccggcggctgaacaagagctttgtggactatggagacacagtgatgtatggcctggagagcagcccctgctcctggctgagaaatcatgcccactggggccggcgggtggtggacttcttcctgattgtgacccagctgggcttctgctgcgtgtactttgtgttcctggccgacaacttcaagcaggtgattgaggccgccaacggcaccaccaacaactgccacaacaatgaaacagtcatcctgacccccaccatggacagccggctgtacatgctgtccttcctgcccttcctggtgctgctggtgttcatccggaacctgcgggccctgagcatcttcagcctgctggccaacatcaccatgctggtgtccctggtgatgatctaccagttcatcgtgcagaggatcccagaccccagccacctgcccctggtggccccctggaagacctaccccctcttcttcggcacagccatcttctcctttgagggcatcggcatggtgctgcccctggagaacaagatgaaggaccccaggaagttccccctcatcctgtacctgggcatggtgattgtgaccatcctgtacatcagcctgggctgcctgggctacctgcagtttggagccaacatccagggcagcatcaccctgaacctgcccaactgctggctgtaccagagcgtgaagctgctgtacagcatcggcatcttcttcacctacgccctgcagttctacgtgcctgctgagatcatcatccccttctttgtgtcccgggcccctgagcactgtgagctggtggtggacctgtttgtgaggacagtgctggtgtgcctgacctgcatcctggccatcctgatcccccggctggacctggtgatcagcctggtgggctctgtgagcagcagcgccctggccctgatcatcccccccctgctggaggtgaccaccttctacagcgagggcatgagccccctgaccatcttcaaggatgccctgatcagcatcctgggctttgtgggctttgtggtgggcacctatgaggccctgtatgagctgatccagcccagcaatgcccccatcttcatcaacagcacctgtgccttcatctag

SEQ ID NO: 170703 - DNA, 1161 bp, synthetic construct
  misc_feature 1..1161: note = Description of Artificial Sequence: Synthetic coding sequence
  source 1..1161: mol_type = other DNA
atgagcacccagaggctgagaaatgaagactaccatgactacagcagcacagatgtgtccccagaggagagccccagcgagggcctgaacaacctgagcagccctggcagctaccagagatttggccagagcaacagcaccacctggttccagaccctcatccacctgctgaagggcaacattggaacaggcctgctgggcctgcccctggccgtgaagaatgccggcatcgtgatgggccccatcagcctgctgatcattggaattgtggccgtgcactgcatgggcatcctggtgaagtgtgcccaccacttctgccggcggctgaacaagagctttgtggactatggagacacagtgatgtatggcctggagagcagcccctgctcctggctgagaaatcatgcccactggggccggcgggtggtggacttcttcctgattgtgacccagctgggcttctgctgcgtgtactttgtgttcctggccgacaacttcaagcaggtgattgaggccgccaacggcaccaccaacaactgccacaacaatgaaacagtcatcctgacccccaccatggacagccggctgtacatgctgtccttcctgcccttcctggtgctgctggtgttcatccggaacctgcgggccctgagcatcttcagcctgctggccaacatcaccatgctggtgtccctggtgatgatctaccagttcatcgtgcagaggatcccagaccccagccacctgcccctggtggccccctggaagacctaccccctcttcttcggcacagccatcttctcctttgagggcatcggcatggtgctgcccctggagaacaagatgaaggaccccaggaagttccccctcatcctgtacctgggcatggtgattgtgaccatcctgtacatcagcctgggctgcctgggctacctgcagtttggagccaacatccagggcagcatcaccctgaacctgcccaactgctggctgtaccagagcgtgaagctgctgtacagcatcggcatcttcttcacctacgccctgcagttctacgtgcctgctgagatcatcatccccttctttgtgtcccgggcccctgagcactgtgagctggtggtggacctgtttgtgaggacagtgctggtgtgcctgacctag

SEQ ID NO: 170704 - DNA, 213 bp, synthetic construct
  misc_feature 1..213: note = Description of Artificial Sequence: Synthetic coding sequence
  source 1..213: mol_type = other DNA
atgagcacccagaggctgagaaatgaagactaccatgactacagcagcacagatgtgtccccagaggagagccccagcgagggcctgaacaacctgagcagccctggcagctaccagagatttggccagagcaacagcaccacctggttccagaccctcatccacctgctgaagggcaacattggaacaggcctgctgggcctgcccctgtag

SEQ ID NO: 170705 - DNA, 219 bp, synthetic construct
  misc_feature 1..219: note = Description of Artificial Sequence: Synthetic coding sequence
  source 1..219: mol_type = other DNA
atgagcacccagaggctgagaaatgaagactaccatgactacagcagcacagatgtgtccccagaggagagccccagcgagggcctgaacaacctgagcagccctggcagctaccagagatttggccagagcaacagcaccacctggttccagaccctcatccacctgctgaagggcaacattggaacaggcctgctgggcctgcccctggccgtgtag

SEQ ID NO: 170706 - DNA, 1431 bp, synthetic construct; identical to SEQ ID NO: 170702
  misc_feature 1..1431: note = Description of Artificial Sequence: Synthetic coding sequence
  source 1..1431: mol_type = other DNA

SEQ ID NO: 170707 - DNA, 1167 bp, synthetic construct
  misc_feature 1..1167: note = Description of Artificial Sequence: Synthetic coding sequence
  source 1..1167: mol_type = other DNA
atgagcacccagaggctgagaaatgaagactaccatgactacagcagcacagatgtgtccccagaggagagccccagcgagggcctgaacaacctgagcagccctggcagctaccagagatttggccagagcaacagcaccacctggttccagaccctcatccacctgctgaagggcaacattggaacaggcctgctgggcctgcccctggccgtgaagaatgccggcatcgtgatgggccccatcagcctgctgatcattggaattgtggccgtgcactgcatgggcatcctggtgaagtgtgcccaccacttctgccggcggctgaacaagagctttgtggactatggagacacagtgatgtatggcctggagagcagcccctgctcctggctgagaaatcatgcccactggggccggcgggtggtggacttcttcctgattgtgacccagctgggcttctgctgcgtgtactttgtgttcctggccgacaacttcaagcaggtgattgaggccgccaacggcaccaccaacaactgccacaacaatgaaacagtcatcctgacccccaccatggacagccggctgtacatgctgtccttcctgcccttcctggtgctgctggtgttcatccggaacctgcgggccctgagcatcttcagcctgctggccaacatcaccatgctggtgtccctggtgatgatctaccagttcatcgtgcagaggatcccagaccccagccacctgcccctggtggccccctggaagacctaccccctcttcttcggcacagccatcttctcctttgagggcatcggcatggtgctgcccctggagaacaagatgaaggaccccaggaagttccccctcatcctgtacctgggcatggtgattgtgaccatcctgtacatcagcctgggctgcctgggctacctgcagtttggagccaacatccagggcagcatcaccctgaacctgcccaactgctggctgtaccagagcgtgaagctgctgtacagcatcggcatcttcttcacctacgccctgcagttctacgtgcctgctgagatcatcatccccttctttgtgtcccgggcccctgagcactgtgagctggtggtggacctgtttgtgaggacagtgctggtgtgcctgacctgtgagtag

SEQ ID NO: 170708 - DNA, 1452 bp, synthetic construct
  misc_feature 1..1452: note = Description of Artificial Sequence: Synthetic coding sequence
  source 1..1452: mol_type = other DNA
atgtctgtgaccaagagcacagagggcccccagggcgctgtggccatcaagctggacctgatgagccccccagagagcgccaagaagctggagaacaaggacagcaccttcctggatgagagccccagcgagagcgctggcctgaagaagaccaagggcatcaccgtcttccaggccctgatccacctggtgaagggcaacatgggcaccggcatcctgggcctgcccctggccgtgaagaatgccggcatcctgatgggccccctgagcctgctggtgatgggcttcatcgcctgccactgcatgcacatcctggtgaagtgtgcccagcgcttctgcaagaggctgaacaagcccttcatggactatggagacacagtgatgcacggcctggaggccaaccccaatgcctggctgcagaaccacgcccactggggccgccacatcgtgtccttcttcctgatcatcacccagctgggcttctgctgcgtgtacatcgtgttcctggccgacaacctgaagcaggtggtggaggccgtgaacagcaccaccaacaactgctacagcaatgagaccgtcatcctgacccccaccatggacagccggctgtacatgctgtccttcctgcccttcctggtgctgctggtgctgatccggaacctgcgcatcctgaccatcttctccatgctggccaacatctccatgctggtgtccctggtgatcatcatccagtacatcacccaggagatcccagaccccagccggctgcccctggtggcctcctggaagacctaccccctcttctttggaacagccatcttctcctttgagagcattggagtggtgctgcccctggagaacaagatgaagaatgcccggcacttccctgccatcctgagcctgggcatgagcatcgtgaccagcctgtacatcggcatggccgccctgggctacctgcgctttggagatgacatcaaggccagcatcagcctgaacctgcccaactgctggctgtaccagagcgtgaagctgctgtacatcgccggcatcctgtgcacctacgccctgcagttctacgtgcctgctgagatcatcatcccctttgccatcagccgggtgtccacccgctgggccctgcccctggacctgagcatccggctggtgatggtgtgcctgacctgcctgctggccatcctgatcccccggctggacctggtgatcagcctggtgggctctgtgtctggaacagccctggccctgatcatcccccccctgctggaggtgaccaccttctacagcgagggcatgagccccctgaccatcttcaaggatgccctgatcagcatcctgggctttgtgggctttgtggtgggcacctaccaggccctggatgagctgctgaagtctgaggacagccaccccttcagcaacagcaccacctttgtgaggtag

SEQ ID NO: 170709 - DNA, 624 bp, synthetic construct
  misc_feature 1..624: note = Description of Artificial Sequence: Synthetic coding sequence
  source 1..624: mol_type = other DNA
atgaatgacacagctgtgctgcccctggagaacaagatgaagaatgcccggcacttccctgccatcctgagcctgggcatgagcatcgtgaccagcctgtacatcggcatggccgccctgggctacctgcgctttggagatgacatcaaggccagcatcagcctgaacctgcccaactgctggctgtaccagagcgtgaagctgctgtacatcgccggcatcctgtgcacctacgccctgcagttctacgtgcctgctgagatcatcatcccctttgccatcagccgggtgtccacccgctgggccctgcccctggacctgagcatccggctggtgatggtgtgcctgacctgcctgctggccatcctgatcccccggctggacctggtgatcagcctggtgggctctgtgtctggaacagccctggccctgatcatcccccccctgctggaggtgaccaccttctacagcgagggcatgagccccctgaccatcttcaaggatgccctgatcagcatcctgggctttgtgggctttgtggtgggcacctaccaggccctggatgagctgctgaagtctgaggacagccaccccttcagcaacagcaccacctttgtgaggtag

SEQ ID NO: 170710 - DNA, 1413 bp, synthetic construct
  misc_feature 1..1413: note = Description of Artificial Sequence: Synthetic coding sequence
  source 1..1413: mol_type = other DNA
atgagcctgctgggccgggactacaacagcgagctgaacagcctggacaatggcccccagagccccagcgagagcagcagcagcatcaccagtgaaaatgtgcaccctgctggggaggccggcctgtccatgatgcagaccctcatccacctgctgaagtgcaacatcggcaccggcctgctgggcctgcccctggccatcaagaatgccggcctgctggtgggccctgtgtccctgctggccatcggcgtgctgactgtgcactgcatggtgatcctgctgaactgtgcccagcacctgagccagaggctgcagaagacctttgtgaactatggagaggccaccatgtatggcctggagacctgccccaacacctggctgcgggcccatgctgtgtggggccgctacacagtgtccttcctgctggtgatcacccagctgggcttctgcagcgtgtacttcatgttcatggctgacaacctgcagcagatggtggagaaggcccacgtgaccagcaacatctgccagccccgggagatcctgaccctgacccccatcctggacatccgcttctacatgctgatcatcctgcccttcctgatcctgctggtgttcatccagaacctgaaggtgctgtctgtgttcagcaccctggccaacatcaccaccctgggctccatggccctgatctttgagtacatcatggagggcatcccctaccccagcaacctgcccctgatggccaactggaagaccttcctgctcttctttggaacagccatcttcacctttgagggcgtgggcatggtgctgcccctgaagaaccagatgaagcacccccagcagttctcctttgtgctgtacctgggcatgagcatcgtcatcatcctgtacatcctgctgggcaccctgggctacatgaagtttggaagtgacacccaggccagcatcaccctgaacctgcccaactgctggctgtaccagagcgtgaagctgatgtacagcatcggcatcttcttcacctacgccctgcagttccacgtgcctgctgagatcatcatcccctttgccatcagccaggtgtctgagagctgggccctgtttgtggacctgtctgtgcgcagcgccctggtgtgcctgacctgtgtgtctgccatcctgatcccccggctggacctggtgatcagcctggtgggctctgtgagcagcagcgccctggccctgatcatcccagccctgctggagatcgtcatcttctacagcgaggacatgagctgtgtgaccatcgccaaggacatcatgatcagcatcgtgggcctgctgggctgcatcttcggcacctaccaggccctgtatgagctgccccagcccatcagccacagcatggccaacagcactggagtgcacgcctag

SEQ ID NO: 170711 - DNA, 1536 bp, synthetic construct
  misc_feature 1..1536: note = Description of Artificial Sequence: Synthetic coding sequence
  source 1..1536: mol_type = other DNA
atgagcctgctgggccgggactacaacagcgagctgaacagcctggacaatggcccccagagccccagcgagagcagcagcagcatcaccagtgaaaatgtgcaccctgctggggaggccggcctgtccatgatgcagaccctcatccacctgctgaagtgcaacatcggcaccggcctgctgggcctgcccctggccatcaagaatgccggcctgctggtgggccctgtgtccctgctggccatcggcgtgctgactgtgcactgcatggtgatcctgctgaactgtgcccagcacctgagccagaggctgcagaagacctttgtgaactatggagaggccaccatgtatggcctggagacctgccccaacacctggctgcgggcccatgctgtgtggggccgctggaacctggccctgagcccccggctggagtgcagcggcaagatcagcgcccactgcaacccccacctgcagggcagcagcaacagccctgcccaggccagccgggtggccggcatctaccgctacacagtgtccttcctgctggtgatcacccagctgggcttctgcagcgtgtacttcatgttcatggctgacaacctgcagcagatggtggagaaggcccacgtgaccagcaacatctgccagccccgggagatcctgaccctgacccccatcctggacatccgcttctacatgctgatcatcctgcccttcctgatcctgctggtgttcatccagaacctgaaggtgctgagcgtcttcagcaccctggccaacatcaccaccctgggctccatggccctgatctttgagtacatcatggagggcatcccctaccccagcaacctgcccctgatggccaactggaagaccttcctgctcttcttcggcacagccatcttcacctttgaaggagtgggcatggtgctgcccctgaagaaccagatgaagcacccccagcagttctcctttgtgctgtacctgggcatgagcatcgtcatcatcctgtacatcctgctgggcaccctgggctacatgaagtttggaagtgacacccaggccagcatcaccctgaacctgcccaactgctggctgtaccagagcgtgaagctgatgtacagcatcggcatcttcttcacctacgccctgcagttccacgtgcctgctgagatcatcatcccctttgccatcagccaggtgtctgagagctgggccctgtttgtggacctgtctgtgcgcagcgccctggtgtgcctgacctgtgtgtctgccatcctgatcccccggctggacctggtgatcagcctggtgggctctgtgagcagcagcgccctggccctgatcatcccagccctgctggagatcgtcatcttctacagcgaggacatgagctgtgtgaccatcgccaaggacatcatgatcagcatcgtgggcctgctgggctgcatcttcggcacctaccaggccctgtatgagctgccccagcccatcagccacagcatggccaacagcactggagtgcacgcctag

SEQ ID NO: 170712 - DNA, 1515 bp, synthetic construct
  misc_feature 1..1515: note = Description of Artificial Sequence: Synthetic coding sequence
  source 1..1515: mol_type = other DNA
atggaggccgccgccaccccagctgctgctggggccgcccggcgggaggagctggacatggatgtgatgaggcccctcatcaatgagcagaactttgatggcaccagtgatgaggagcacgagcaggagctgctgcctgtgcagaagcactaccagctggatgaccaggagggcatcagctttgtgcagaccctgatgcacctgctgaagggcaacattggaacaggcctgctgggcctgcccctggccatcaagaatgccggcatcgtgctgggccccatcagcctggtgttcatcggcatcatctctgtgcactgcatgcacatcctggtgcgctgcagccacttcctgtgcctgcgcttcaagaagagcaccctgggctacagcgacacagtgtcctttgccatggaggtgagcccctggagctgcctgcagaagcaggccgcctggggccgctctgtggtggacttcttcctggtgatcacccagctgggcttctgcagcgtgtacatcgtgttcctggccgagaatgtgaagcaggtgcatgagggcttcctggagagcaaggtgttcatcagcaacagcaccaacagcagcaacccctgtgagcggcgctctgtggacctgcgcatctacatgctgtgcttcctgcccttcatcatcctgctggtgttcatccgggagctgaagaacctgtttgtgctgtccttcctggccaacgtgtccatggctgtgtccctggtgatcatctaccagtatgtggtgaggaacatgccagacccccacaacctgcccatcgtggccggctggaagaagtaccccctcttctttggaacagctgtgtttgcctttgagggcattggagtggtgctgcccctggagaaccagatgaaggagagcaagcgcttcccccaggccctgaacatcggcatgggcatcgtgaccaccctgtatgtgaccctggccaccctgggctacatgtgcttccatgatgagatcaagggcagcatcaccctgaacctgccccaggatgtgtggctgtaccagagcgtgaagatcctgtacagctttggcatctttgtgacctacagcatccagttctacgtgcctgctgagatcatcatccctggcatcaccagcaagttccacaccaagtggaagcagatctgtgaatttggcatccgctccttcctggtgtccatcacctgtgccggggccatcctgatcccccggctggacatcgtcatcagctttgtgggcgctgtgagcagcagcaccctggccctgatcctgccccccctggtggagatcctgaccttcagcaaggagcactacaacatctggatggtgctgaagaacatcagcatcgccttcaccggggtggtgggcttcctgctgggcacctacatcaccgtggaggagatcatctaccccacccccaaggtggtggccggcaccccccagagccccttcctgaacctgaacagcacctgcctgaccagcggcctgaagtag

SEQ ID NO: 170713 - DNA, 1602 bp, synthetic construct
  misc_feature 1..1602: note = Description of Artificial Sequence: Synthetic coding sequence
  source 1..1602: mol_type = other DNA
atggcccggctgcctgctggcatccgcttcatcatctccttcagccgggaccagtggtaccgggccttcatcttcatcctgaccttcctgctgtatgccagcttccacctgagcaggaagcccatcagcatcgtgaagggggagctgcacaagtactgcacagcctgggatgaagcagatgtgcgcttcagcagccagaacaggaagagcggcagcgctgccccccaccagctgcctgacaatgaaacagactgtggctgggccccctttgacaagaacaactaccagcagctgctgggcgccctggactacagcttcctgtgtgcctatgctgtgggcatgtacctgagcggcatcatcggggagcggctgcccatccgctactacctgaccttcggcatgctggccagcggggccttcaccgccctgtttggcctgggctacttctacaacatccacagctttggcttctacgtggtgacccaggtgatcaatggcctggtgcagaccaccggctggcccagcgtggtgacctgcctgggcaactggtttgggaagggccggcggggcctcatcatgggcgtgtggaacagccacacctctgtgggcaacatcctgggcagcctgattgctggctactgggtgtccacctgctggggcctgagctttgtggtgcctggggccatcgtggccgccatgggcatcgtgtgcttcctgttcctgattgagcaccccaatgatgtgcgctgcagcagcaccctggtgacccacagcaagggctatgaaaatggcaccaaccggctgcggctgcagaagcagatcctgaagtctgagaagaacaagcccctggaccctgagatgcagtgcctgctgctgagtgatggcaagggcagcatccaccccaaccacgtggtgatcctgcctggagatggcggcagcggcacagctgccatctccttcaccggggccctgaagatccctggggtcatcgagttcagcctgtgcctgctgtttgccaagctggtgtcctacaccttcctgttctggctgcccctgtacatcaccaacgtggaccacctggatgccaagaaggccggggagctgagcaccctgtttgatgtgggcggcatctttggaggcatcctggccggggtcatcagtgaccggctggagaagagggccagcacctgtggcctgatgctgctgctggccgcccccaccctgtacatcttcagcacagtgtccaagatgggcctggaggccaccatcgccatgctgctgctgagcggggccctggtgtctggcccctacaccctcatcaccacagctgtgtctgctgacctgggcacccacaagagcctgaagggaaatgcccacgccctgagcacagtgacagccatcattgatggcactggatctgtgggcgccgccctgggccccctgctggccggcctgctgagccccagcggctggagcaatgtgttctacatgctgatgtttgctgatgcctgtgccctgctcttcctgatccgcctcatccacaaggagctgagctgccccggcagcgccaccggggaccaggtgcccttcaaggagcagtag

SEQ ID NO: 170714 - DNA, 1602 bp, synthetic construct; identical to SEQ ID NO: 170713
  misc_feature 1..1602: note = Description of Artificial Sequence: Synthetic coding sequence
  source 1..1602: mol_type = other DNA

SEQ ID NO: 170715 - DNA, 57 bp, synthetic construct
  misc_feature 1..57: note = Description of Artificial Sequence: Synthetic coding sequence
  source 1..57: mol_type = other DNA
atggcccggctgcctgctggcatccgcttcatcatctccttcagccgggaccagtag

SEQ ID NO: 170716 - DNA, 57 bp, synthetic construct; identical to SEQ ID NO: 170715
  misc_feature 1..57: note = Description of Artificial Sequence: Synthetic coding sequence
  source 1..57: mol_type = other DNA

SEQ ID NO: 170717 - DNA, 1464 bp, synthetic construct
  misc_feature 1..1464: note = Description of Artificial Sequence: Synthetic coding sequence
  source 1..1464: mol_type = other DNA
atgatgcacttcaagagcggcctggagctgacagagctgcagaacatgacagtgcctgaagatgacaacatcagcaatgacagcaatgacttcacagaggtggagaatggccagatcaacagcaagttcatcagtgaccgggagagccgccgcagcctgaccaacagccacctggagaagaagaagtgtgatgagtacatccctggcaccaccagcctgggcatgtctgtgttcaacctgagcaatgccatcatgggcagcggcatcctgggcctggcctttgccctggccaacacaggcatcctgctcttcctggtgctgctgacctctgtgaccctgctgagcatctacagcatcaacctgctgctgatctgcagcaaggagaccggctgcatggtgtatgagaagctgggggagcaggtgtttggcaccaccgggaagtttgtgatctttggagccaccagcctgcagaacacaggagccatgctgagctacctgttcatcgtgaagaatgagctgcccagcgccatcaagttcctgatgggcaaggaggagaccttcagcgcctggtacgtggatggccgggtgctggtggtgattgtgaccttcggcatcatcctgcccctgtgcctgctgaagaacctgggctacctgggctacaccagcggcttcagcctgagctgcatggtgttcttcctgattgtggtgatctacaagaagttccagatcccctgcatcgtgcctgagctgaacagcaccatcagcgccaacagcaccaatgctgacacctgcacccccaagtatgtgaccttcaacagcaagacagtgtatgccctgcccaccatcgcctttgcctttgtgtgccaccccagcgtgctgcccatctacagcgagctgaaggacaggagccagaagaagatgcagatggtgagcaacatctccttctttgccatgtttgtgatgtacttcctgacagccatcttcggctacctgaccttctatgacaacgtgcagagcgacctgctgcacaagtaccagagcaaggatgacatcctgatcctgactgtgcggctggccgtgattgtggccgtcatcctgactgtgcctgtgctcttcttcaccgtgcgcagcagcctgtttgagctggccaagaagaccaagttcaacctgtgccgccacacagtggtgacctgcatcctgctggtggtgatcaacctgctggtgatcttcatccccagcatgaaggacatcttcggcgtggtgggcgtgaccagcgccaacatgctgatcttcatcctgcccagcagcctgtacctgaagatcacagaccaggatggagacaagggcacccagaggatctgggccgccctcttcctgggcctgggcgtgctcttcagcctggtgtccatccccctggtgatctatgactgggcctgcagcagcagcagtgatgagggccactag

SEQ ID NO: 170718 - DNA, 1464 bp, synthetic construct; identical to SEQ ID NO: 170717
  misc_feature 1..1464: note = Description of Artificial Sequence: Synthetic coding sequence
  source 1..1464: mol_type = other DNA

SEQ ID NO: 170719 - DNA, 1464 bp, synthetic construct; identical to SEQ ID NO: 170717
  misc_feature 1..1464: note = Description of Artificial Sequence: Synthetic coding sequence
  source 1..1464: mol_type = other DNA

SEQ ID NO: 170720 - DNA, 1464 bp, synthetic construct; identical to SEQ ID NO: 170717
  misc_feature 1..1464: note = Description of Artificial Sequence: Synthetic coding sequence
  source 1..1464: mol_type = other DNA

SEQ ID NO: 170721 - DNA, 1521 bp, synthetic construct
  misc_feature 1..1521: note = Description of Artificial Sequence: Synthetic coding sequence
  source 1..1521: mol_type = other DNA
atgaagaaggccgagatgggccgcttcagcatcagcccagatgaggacagcagcagctacagcagcaacagcgacttcaactacagctaccccaccaagcaggccgccctgaagagccactatgcagatgtggaccctgagaaccagaacttcctgctggagagcaacctgggcaagaagaagtatgaaacagagttccaccctggcaccaccagctttggcatgtctgtgttcaacctgagcaatgccatcgtgggcagcggcatcctgggcctgtcctatgccatggccaacacaggaattgccctcttcatcatcctgctgacctttgtgtccatcttcagcctgtacagcgtgcacctgctgctgaagacagccaatgaaggaggcagcctgctgtatgagcagctgggctacaaggccttcggcctggtgggcaagctggccgccagcggcagcatcaccatgcagaacattggagccatgagcagctacctgttcatcgtgaagtatgagctgcccctggtgatccaggccctgaccaacatcgaggacaagacaggcctgtggtacctgaatggaaactacctggtgctgctggtgtccctggtggtgatcctgcccctgagcctcttcaggaacctgggctacctgggctacaccagcggcctgagcctgctgtgcatggtgttcttcctgattgtggtgatctgcaagaagttccaggtgccctgccctgtggaggccgccctgatcatcaatgagaccatcaacaccaccctgacccagcccacagccctggtgcctgccctgagccacaacgtgacagaaaatgacagctgccggccccactacttcatcttcaacagccagacagtgtatgctgtgcccatcctgatcttctcctttgtgtgccaccctgctgtgctgcccatctatgaggagctgaaggacaggagcagaagaaggatgatgaatgtgtccaagatctccttctttgccatgttcctgatgtacctgctggccgccctgtttggctacctgaccttctatgaacatgtggagagcgagctgctgcacacctacagcagcatcctgggcacagacatcctgctgctgattgtgcggctggccgtgctgatggctgtgaccctgactgtgcctgtggtgatcttccccatccgcagctctgtgacccacctgctgtgtgccagcaaggacttctcctggtggaggcacagcctcatcaccgtgtccatcctggccttcaccaacctgctggtgatctttgtgcccaccatccgggacatcttcggcttcatcggggccagcgctgcctccatgctgatcttcatcctgcccagcgccttctacatcaagctggtgaagaaggagcccatgaagtctgtgcagaagattggagccctcttcttcctgctgtctggagtgctggtgatgacaggctccatggccctgattgtgctggactgggtgcacaatgcccctgggggcggccactag

SEQ ID NO: 170722 - DNA, 1644 bp, synthetic construct
  misc_feature 1..1644: note = Description of Artificial Sequence: Synthetic coding sequence
  source 1..1644: mol_type = other DNA
atggaccccatggagctgagaaatgtgaacattgaaccagatgatgagagcagcagtggagagagcgccccagacagctacatcggcatcggcaacagcgagaaggccgccatgagcagccagtttgccaatgaagacacagagagccagaagttcctgaccaacggcttcctgggcaagaagaagctggccgactatgcagatgagcaccaccctggcaccaccagctttggcatgagcagcttcaacctgagcaatgccatcatgggcagcggcatcctgggcctgtcctatgccatggccaacacaggcatcatcctcttcatcatcatgctgctggccgtggccatcctgagcctgtacagcgtgcacctgctgctgaagacagccaaggagggcggcagcctcatctatgagaagctgggggagaaggccttcggctggccaggcaagatcggggcctttgtgtccatcaccatgcagaacattggagccatgagcagctacctgttcatcatcaagtatgagctgcctgaggtgatccgggccttcatgggcctggaggagaacacaggagagtggtacctgaatggaaactacctgatcatctttgtgtctgtgggcatcatcctgcccctgagcctgctgaagaacctgggctacctgggctacaccagcggcttcagcctgacctgcatggtgttctttgtgtctgtggtgatctacaagaagttccagatcccctgccccctgcctgtgctggaccacagcgtgggcaacctgtccttcaacaacaccctgcccatgcacgtggtgatgctgcccaacaacagcgagagcagtgatgtgaacttcatgatggactacacccacaggaacccagctggcctggatgagaaccaggccaagggcagcctgcatgattctggagtggagtatgaggcccacagtgatgacaagtgtgagcccaagtactttgtgttcaacagcaggacagcctatgccatccccatcctggtgtttgcctttgtgtgccaccctgaggtgctgcccatctacagcgagctgaaggacaggagcaggaggaagatgcagacagtgagcaacatcagcatcaccggcatgctggtgatgtacctgctggccgccctgtttggctacctgaccttctatggagaggtggaggatgagctgctgcacgcctacagcaaggtgtacaccctggacatccccctgctgatggtgcggctggccgtgctggtggccgtgaccctgactgtgcccatcgtgctcttccccatccgcaccagcgtcatcaccctgctcttccccaagaggcccttctcctggatccgccacttcctgattgctgctgtgctgattgccctgaacaacgtgctggtgatcctggtgcccaccatcaagtacatcttcggcttcatcggggccagcagcgccaccatgctgatcttcatcctgcctgctgtgttctacctgaagctggtgaagaaggagaccttccgcagcccccagaaggtgggcgccctgatcttcctggtggtgggcatcttcttcatgattggctccatggccctgatcatcatcgactggatctatgacccccccaacagcaagcaccactag

SEQ ID NO: 170723 - DNA, 780 bp, synthetic construct
  misc_feature 1..780: note = Description of Artificial Sequence: Synthetic coding sequence
  source 1..780: mol_type = other DNA
atggaccccatggagctgagaaatgtgaacattgaaccagatgatgagagcagcagtggagagagcgccccagacagctacatcggcatcggcaacagcgagaaggccgccatgagcagccagtttgccaatgaagacacagagagccagaagttcctgaccaacggcttcctgggcaagaagaagctggccgactatgcagatgagcaccaccctggcaccaccagctttggcatgagcagcttcaacctgagcaatgccatcatgggcagcggcatcctgggcctgtcctatgccatggccaacacaggcatcatcctcttcatcatcatgctgctggccgtggccatcctgagcctgtacagcgtgcacctgctgctgaagacagccaaggagggcggcagcctcatctatgagaagctgggggagaaggccttcggctggccaggcaagatcggggcctttgtgtccatcaccatgcagaacattggagccatgagcagctacctgttcatcatcaagtatgagctgcctgaggtgatccgggccttcatgggcctggaggagaacacaggagagtggtacctgaatggaaactacctgatcatctttgtgtctgtgggcatcatcctgcccctgagcctgctgaagaacctgggctacctgggctacaccagcggcttcagcctgacctgcatggtgttctttgtgtctgtgatgatctacaagaagatctccttcttcctgcagatcttcatcatcctgaagctgttcttctag

SEQ ID NO: 170724 - DNA, 1644 bp, synthetic construct; identical to SEQ ID NO: 170722
  misc_feature 1..1644: note = Description of Artificial Sequence: Synthetic coding sequence
  source 1..1644: mol_type = other DNA

SEQ ID NO: 170725 - DNA, 579 bp, synthetic construct
  misc_feature 1..579: note = Description of Artificial Sequence: Synthetic coding sequence
  source 1..579: mol_type = other DNA
atggaccccatggagctgagaaatgtgaacattgaaccagatgatgagagcagcagtggagagagcgccccagacagctacatcggcatcggcaacagcgagaaggccgccatgagcagccagtttgccaatgaagacacagagagccagaagttcctgaccaacggcttcctgggcaagaagaagctggccgactatgcagatgagcaccaccctggcaccaccagctttggcatgagcagcttcaacctgagcaatgccatcatgggcagcggcatcctgggcctgtcctatgccatggccaacacaggcatcatcctcttcatcatcatgctgctggccgtggccatcctgagcctgtacagcgtgcacctgctgctgaagacagccaaggagggcggcagcctcatctatgagaagctgggggagaaggccttcggctggccaggcaagatcggggcctttgtgtccatcaccatgcagaacattggagccatgagcagctacctgttcatcatcaagtatgagctgcctgaggtgatccgggccttcatgggcctggaggagaacacaggatag

SEQ ID NO: 170726 - DNA, 660 bp, synthetic construct
  misc_feature 1..660: note = Description of Artificial Sequence: Synthetic coding sequence
  source 1..660: mol_type = other DNA
atggaccccatggagctgagaaatgtgaacattgaaccagatgatgagagcagcagtggagagagcgccccagacagctacatcggcatcggcaacagcgagaaggccgccatgagcagccagtttgccaatgaagacacagagagccagaagttcctgaccaacggcttcctgggcaagaagaagctggccgactatgcagatgagcaccaccctggcaccaccagctttggcatgagcagcttcaacctgagcaatgccatcatgggcagcggcatcctgggcctgtcctatgccatggccaacacaggcatcatcctcttcatcatcatgctgctggccgtggccatcctgagcctgtacagcgtgcacctgctgctgaagacagccaaggagggcggcagcctcatctatgagaagctgggggagaaggccttcggctggccaggcaagatcggggcctttgtgtccatcaccatgcagaacattggagccatgagcagctacctgttcatcatcaagtatgagctgcctgaggtgatccgggccttcatgggcctggaggagaacacaggagagtggtacctgaatggaaactacctgatcatctttgtgtctgtgggcatcatcctgcccctgagcctgctgaagaacctgtag

SEQ ID NO: 170727 - DNA, 1419 bp, synthetic construct
  misc_feature 1..1419: note = Description of Artificial Sequence: Synthetic coding sequence
  source 1..1419: mol_type = other DNA
atggagctgcaggaccccaagatgaatggagccctgcccagtgatgctgtgggctaccggcaggagcgggagggcttcctgcccagccggggccctgcccctggcagcaagcctgtgcagttcatggactttgagggcaagaccagctttggcatgtctgtgttcaacctgagcaatgccatcatgggcagcggcatcctgggcctggcctatgccatggcccacactggagtcatcttcttcctggccctgctgctgtgcatcgccctgctgagcagctacagcatccacctgctgctgacctgtgccggcattgctggcatccgggcctatgagcagctgggccagagggcctttggacctgctgggaaggtggtggtggccaccgtcatctgcctgcacaacgtgggcgccatgagcagctacctgttcatcatcaagtctgagctgcccctggtgattggcaccttcctgtacatggaccctgagggggactggttcctgaagggcaacctgctgatcatcatcgtgtctgtgctgatcatcctgcccctggccctgatgaagcacctgggctacctgggctacaccagcggcctgagcctgacctgcatgctgttcttcctggtgtctgtcatctacaagaagttccagctgggctgtgccatcggccacaatgaaacagccatggagagcgaggccctggtgggcctgcccagccagggcctgaacagcagctgtgaggcccagatgttcaccgtggacagccagatgagctacacagtgcccatcatggcctttgcctttgtgtgccaccctgaggtgctgcccatctacacagagctgtgccggcccagcaagaggaggatgcaggccgtggccaacgtgtccatcggggccatgttctgcatgtatggcctgacagccaccttcggctacctgaccttctacagctctgtgaaggccgagatgctgcacatgtacagccagaaggaccccctcatcctgtgtgtgcggctggccgtgctgctggccgtgaccctgactgtgcctgtggtgctcttccccatccggcgggccctgcagcagctgctcttccctgggaaggccttctcctggcccaggcatgtggccatcgccctgatcctgctggtgctggtgaatgtgctggtgatctgtgtgcccaccatccgggacatctttggagtcatcggcagcaccagcgcccccagcctcatcttcatcctgcccagcatcttctacctgcgcatcgtgcccagcgaggtggagcccttcctgtcctggcccaagatccaggccctgtgctttggagtgctgggcgtgctcttcatggctgtgtccctgggcttcatgtttgccaactgggccaccggccagagcaggatgagcggccactag

SEQ ID NO: 170728 - DNA, 1266 bp, synthetic construct
  misc_feature 1..1266: note = Description of Artificial Sequence: Synthetic coding sequence
  source 1..1266: mol_type = other DNA
atgtctgtgttcaacctgagcaatgccatcatgggcagcggcatcctgggcctggcctatgccatggcccacactggagtcatcttcttcctggccctgctgctgtgcatcgccctgctgagcagctacagcatccacctgctgctgacctgtgccggcattgctggcatccgggcctatgagcagctgggccagagggccttcggccctgctgggaaggtggtggtggccaccgtcatctgcctgcacaacgtgggcgccatgagcagctacctgttcatcatcaagtctgagctgcccctggtgattggcaccttcctgtacatggaccctgagggggactggttcctgaagggcaacctgctgatcatcatcgtgtctgtgctgatcatcctgcccctggccctgatgaagcacctgggctacctgggctacaccagcggcctgagcctgacctgcatgctgttcttcctggtgtctgtcatctacaagaagttccagctgggctgtgccatcggccacaatgaaacagccatggagagcgaggccctggtgggcctgcccagccagggcctgaacagcagctgtgaggcccagatgttcaccgtggacagccagatgagctacacagtgcccatcatggcctttgcctttgtgtgccaccctgaggtgctgcccatctacacagagctgtgccggcccagcaagaggaggatgcaggccgtggccaacgtgtccattggagccatgttctgcatgtatggcctgacagccaccttcggctacctgaccttctacagctctgtgaaggccgagatgctgcacatgtacagccagaaggaccccctcatcctgtgtgtgcggctggccgtgctgctggccgtgaccctgactgtgcctgtggtgctcttccccatcagaagagccctgcagcagctgctcttccctgggaaggccttctcctggcccaggcatgtggccatcgccctgatcctgctggtgctggtgaatgtgctggtgatctgtgtgcccaccatccgggacatcttcggcgtgattggcagcaccagcgcccccagcctcatcttcatcctgcccagcatcttctacctgagaattgtgcccagcgaggtggagcccttcctgtcctggcccaagatccaggccctgtgcttcggcgtgctgggcgtgctcttcatggctgtgtccctgggcttcatgtttgccaactgggccaccggccagagcaggatgagcggccactag

SEQ ID NO: 170729 - DNA, 1419 bp, synthetic construct; identical to SEQ ID NO: 170727
  misc_feature 1..1419: note = Description of Artificial Sequence: Synthetic coding sequence
  source 1..1419: mol_type = other DNA

SEQ ID NO: 170730 - DNA, 660 bp, synthetic construct
  misc_feature 1..660: note = Description of Artificial Sequence: Synthetic coding sequence
  source 1..660: mol_type = other DNA
atggagctgcaggaccccaagatgaatggagccctgcccagtgatgctgtgggctaccggcaggagcgggagggcttcctgcccagccggggccctgcccctggcagcaagcctgtgcagttcatggactttgagggcaagaccagctttggcatgtctgtgttcaacctgagcaatgccatcatgggcagcggcatcctgggcctggcctatgccatggcccacactggagtcatcttcttcctggccctgctgctgtgcatcgccctgctgagcagctacagcatccacctgctgctgacctgtgccggcattgctggcatccgggcctatgagcagctgggccagagggcctttggacctgctgggaaggtggtggtggccaccgtcatctgcctgcacaacgtgggcgccatgagcagctacctgttcatcatcaagtctgagctgcccctggtgattggcaccttcctgtacatggaccctgagggggactggttcctgaagggcaacctgctgatcatcatcgtgtctgtgctgatcatcctgcccctggccctgatgaagcacctgggctacctgggctacaccagcggcctgagcctgacctgcatgctgttcttcctggtgtctgtcatctacaagaagttccagctgtag

SEQ ID NO: 170731 - DNA, 576 bp, synthetic construct
  misc_feature 1..576: note = Description of Artificial Sequence: Synthetic coding sequence
  source 1..576: mol_type = other DNA
atggagctgcaggaccccaagatgaatggagccctgcccagtgatgctgtgggctaccggcaggagcgggagggcttcctgcccagccggggccctgcccctggcagcaagcctgtgcagttcatggactttgagggcaagaccagctttggcatgtctgtgttcaacctgagcaatgccatcatgggcagcggcatcctgggcctggcctatgccatggcccacactggagtcatcttcttcctggccctgctgctgtgcatcgccctgctgagcagctacagcatccacctgctgctgacctgtgccggcattgctggcatccgggcctatgagcagctgggccagagggcctttggacctgctgggaaggtggtggtggccaccgtcatctgcctgcacaacgtgggcgccatgagcagctacctgttcatcatcaagtctgagctgcccctggtgattggcaccttcctgtacatggaccctgagggggactggttcctgaagggcaacctgctgatcatcatcgtgtctgtgctgatcatcctgcccctggccctgatgaagcacctgtag

SEQ ID NO: 170732 - DNA, 495 bp, synthetic construct
  misc_feature 1..495: note = Description of Artificial Sequence: Synthetic coding sequence
  source 1..495: mol_type = other DNA
atggagctgcaggaccccaagatgaatggagccctgcccagtgatgctgtgggctaccggcaggagcgggagggcttcctgcccagccggggccctgcccctggcagcaagcctgtgcagttcatggactttgagggcaagaccagctttggcatgtctgtgttcaacctgagcaatgccatcatgggcagcggcatcctgggcctggcctatgccatggcccacactggagtcatcttcttcctggccctgctgctgtgcatcgccctgctgagcagctacagcatccacctgctgctgacctgtgccggcattgctggcatccgggcctatgagcagctgggccagagggcctttggacctgctgggaaggtggtggtggccaccgtcatctgcctgcacaacgtgggcgccatgagcagctacctgttcatcatcaagtctgagctgcccctggtgattggcaccttcctgtacatggaccctgagggctag

SEQ ID NO: 170733 - DNA, 840 bp, synthetic construct
  misc_feature 1..840: note = Description of Artificial Sequence: Synthetic coding sequence
  source 1..840: mol_type = other DNA
atggagctgcaggaccccaagatgaatggagccctgcccagtgatgctgtgggctaccggcaggagcgggagggcttcctgcccagccggggccctgcccctggcagcaagcctgtgcagttcatggactttgagggcaagaccagctttggcatgtctgtgttcaacctgagcaatgccatcatgggcagcggcatcctgggcctggcctatgccatggcccacactggagtcatcttcttcctggccctgctgctgtgcatcgccctgctgagcagctacagcatccacctgctgctgacctgtgccggcattgctggcatccgggcctatgagcagctgggccagagggcctttggacctgctgggaaggtggtggtggccaccgtcatctgcctgcacaacgtgggcgccatgagcagctacctgttcatcatcaagtctgagctgcccctggtgattggcaccttcctgtacatggaccctgagggggactggttcctgaagggcaacctgctgatcatcatcgtgtctgtgctgatcatcctgcccctggccctgatgaagcacctgggctacctgggctacaccagcggcctgagcctgacctgcatgctgttcttcctggtgtctgtcatctacaagaagttccagctgggctgtgccatcggccacaatgaaacagccatggagagcgaggccctggtgggcctgcccagccagggcctgaacagcagctgtgaggcccagatgttcaccgtggacagccagatgagctacacagtgcccatcatggcctttgcctttgtgtgccaccctgaggtgctgcccatctactag

SEQ ID NO: 170734 - DNA, 819 bp, synthetic construct
  misc_feature 1..819: note = Description of Artificial Sequence: Synthetic coding sequence
  source 1..819: mol_type = other DNA
atggagctgcaggaccccaagatgaatggagccctgcccagtgatgctgtgggctaccggcaggagcgggagggcttcctgcccagccggggccctgcccctggcagcaagcctgtgcagttcatggactttgagggcaagaccagctttggcatgtctgtgttcaacctgagcaatgccatcatgggcagcggcatcctgggcctggcctatgccatggcccacactggagtcatcttcttcctggccctgctgctgtgcatcgccctgctgagcagctacagcatccacctgctgctgacctgtgccggcattgctggcatccgggcctatgagcagctgggccagagggcctttggacctgctgggaaggtggtggtggccaccgtcatctgcctgcacaacgtgggcgccatgagcagctacctgttcatcatcaagtctgagctgcccctggtgattggcaccttcctgtacatggaccctgagggggactggttcctgaagggcaacctgctgatcatcatcgtgtctgtgctgatcatcctgcccctggccctgatgaagcacctgggctacctgggctacaccagcggcctgagcctgacctgcatgctgttcttcctggtgtctgtcatctacaagaagttccagctgggctgtgccatcggccacaatgaaacagccatggagagcgaggccctggtgggcctgcccagccagggcctgaacagcagctgtgaggcccagatgttcaccgtggacagccagatgagctacacagtgcccatcatggcctttgcctttgtgtgccactag

SEQ ID NO: 170735 - DNA, 1422 bp, synthetic construct
  misc_feature 1..1422: note = Description of Artificial Sequence: Synthetic coding sequence
  source 1..1422: mol_type = other DNA
atggccacccaggccaagaggccccgggtggccggccctgtggatggaggagacctggaccctgtggcctgcttcctgtcctggtgccggcgggtgggcctggagctgagccccaaggtgtctgagcgggccggcggccgccgcacccggggcggggcccgggccgccctgaccagccccccagcccaggtggccgtgtcccggcagggcaccgtggccggctacggcatggtggcccgggagagcgtgcaggccggggagctgctgtttgtggtgcccagggctgccctgctgagccagcacacctgcagcattggaggcctgctggagcgggagcgggtggccctgcagagccagagcggctgggtgcccctgctgctggccctgctgcacgagctgcaggccccagccagccgctggaggccctactttgccctgtggccagagctgggccgcctggagcaccccatgttctggccagaggaggagcggcgctgcctgctgcagggcactggagtgcctgaggccgtggagaaggacctggccaacatccgctctgagtaccagagcatcgtgctgcccttcatggaggcccacccagacctcttcagcctgcgggtgcgcagcctggagctgtaccaccagctggtggccctggtgatggcctacagcttccaggagcccctggaggaggaggaggatgagaaggagcccaacagccctgtgatggtgcctgctgctgacatcctgaaccacctggccaaccacaatgccaacctggagtacagcgccaactgcctgaggatggtggccacccagcccatccccaagggccacgagatcttcaacacctacggccagatggccaactggcagctgatccacatgtatggctttgtggagccctacccagacaacacagatgacacagctgacatccagatggtgacagtgcgggaggccgccctgcagggcaccaagacagaggccgagcggcacctggtgtatgagcgctgggacttcctgtgcaagctggagatggtgggggaggagggcgccttcgtcatcggccgggaggaggtgctgacagaggaggagctgaccaccaccctgaaggtgctgtgcatgcctgctgaggagttccgggagctgaaggaccaggacggcggcggagatgacaagcgggaggagggcagcctgaccatcaccaacatccccaagctgaaggcctcctggaggcagctgctgcagaacagcgtgctgctgaccctgcagacctacgccacagacctgaagacagaccagggcctgctgagcaacaaggaggtgtatgccaagctgtcctggagggagcagcaggccctgcaggtgcgctatggccagaagatgatcctgcaccagctgctggagctgaccagctag

SEQ ID NO: 170736 - DNA, 975 bp, synthetic construct
  misc_feature 1..975: note = Description of Artificial Sequence: Synthetic coding sequence
  source 1..975: mol_type = other DNA
atgggcccctggggcgagcctgagctgctggtgtggaggcctgaggccgtggccagcgagccccctgtgcctgtgggcctggaggtgaagctgggcgccctggtgctgctgctggtgctgaccctgctgtgcagcctggtgcccatctgtgtgctgcggcggcctggggccaaccacgagggcagcgccagccggcagaaggccctgagcctggtgtcctgctttgctgggggcgtcttcctggccacctgcctgctggacctgctgcctgactacctggccgccattgatgaggccctggccgccctgcacgtgaccctgcagttccccctgcaggagttcatcctggccatgggcttcttcctggtgctggtgatggagcagatcaccctggcctacaaggagcagagcggccccagccccctggaggagacccgggccctgctgggcaccgtgaatggaggcccccagcactggcatgatggccctggggtgccccaggccagcggggccccagccacccccagcgccctgcgggcctgtgtgctggtgttcagcctggccctgcacagcgtgtttgagggcctggccgtgggcctgcagagggaccgggcccgggccatggagctgtgcctggccctgctgctgcacaagggcatcctggccgtgtccctgagcctgcggctgctgcagagccacctgcgggcccaggtggtggccggctgcggcatcctcttcagctgcatgacccccctgggcatcggcctgggcgccgccctggccgagagcgctggccccctgcaccagctggcccagagcgtgctggagggcatggccgccggcaccttcctgtacatcaccttcctggagatcctgccccaggagctggccagcagcgagcagaggatcctgaaggtgatcctgctgctggccggctttgccctgctgaccggcctgctcttcatccagatctag

SEQ ID NO: 170737 - DNA, 975 bp, synthetic construct; identical to SEQ ID NO: 170736
  misc_feature 1..975: note = Description of Artificial Sequence: Synthetic coding sequence
  source 1..975: mol_type = other DNA

SEQ ID NO: 170738 - DNA, 975 bp, synthetic construct; identical to SEQ ID NO: 170736
  misc_feature 1..975: note = Description of Artificial Sequence: Synthetic coding sequence
  source 1..975: mol_type = other DNA

SEQ ID NO: 170739 - DNA, 975 bp, synthetic construct; identical to SEQ ID NO: 170736
  misc_feature 1..975: note = Description of Artificial Sequence: Synthetic coding sequence
  source 1..975: mol_type = other DNA

SEQ ID NO: 170740 - DNA, 723 bp, synthetic construct
  misc_feature 1..723: note = Description of Artificial Sequence: Synthetic coding sequence
  source 1..723: mol_type = other DNA
atgggcccctggggcgagcctgagctgctggtgtggaggcctgaggccgtggccagcgagccccctgtgcctgtgggcctggaggtgaagctgggcgccctggtgctgctgctggtgctgaccctgctgtgcagcctggtgcccatctgtgtgctgcggcggcctggggccaaccacgagggcagcgccagccggcagaaggccctgagcctggtgtcctgctttgctgggggcgtcttcctggccacctgcctgctggacctgctgcctgactacctggccgccattgatgaggccctggccgccctgcacgtgaccctgcagttccccctgcaggagttcatcctggccatgggcttcttcctggtgctggtgatggagcagatcaccctggcctacaaggagcagagcggccccagccccctggaggagacccgggccctgctgggcaccgtgaatggaggcccccagcactggcatgatggccctggggtgccccaggccagcggggccccagccacccccagcgccctgcgggcctgtgtgctggtgttcagcctggccctgcacagcgtgtttgagggcctggccgtgggcctgcagagggaccgggcccgggccatggagctgtgcctggccctgctgctgcacaagggcatcctggccgtgtccctgagcctgcggctgctgcagagccacctgcgggcccaggtggtggcctag

SEQ ID NO: 170741 - DNA, 621 bp, synthetic construct
  misc_feature 1..621: note = Description of Artificial Sequence: Synthetic coding sequence
  source 1..621: mol_type = other DNA
atgggcccctggggcgagcctgagctgctggtgtggaggcctgaggccgtggccagcgagccccctgtgcctgtgggcctggaggtgaagctgggcgccctggtgctgctgctggtgctgaccctgctgtgcagcctggtgcccatctgtgtgctgcggcggcctggggccaaccacgagggcagcgccagccggcagaaggccctgagcctggtgtcctgctttgctgggggcgtcttcctggccacctgcctgctggacctgctgcctgactacctggccgccattgatgaggccctggccgccctgcacgtgaccctgcagttccccctgcaggagttcatcctggccatgggcttcttcctggtgctggtgatggagcagatcaccctggcctacaaggagcagagcggccccagccccctggaggagacccgggccctgctgggcaccgtgaatggaggcccccagcactggcatgatggccctggggtgccccaggccagcggggccccagccacccccagcgccctgcgggcctgtgtgctggtgttcagcctggccctgcacagcgtgtttgagggcctggccgtgggcctgcagagggaccgggccaggtag

SEQ ID NO: 170742 - DNA, 966 bp, synthetic construct
  misc_feature 1..966: note = Description of Artificial Sequence: Synthetic coding sequence
  source 1..966: mol_type = other DNA
atgggcccctggggcgagcctgagctgctggtgtggaggcctgaggccgtggccagcgagccccctgtgcctgtgggcctggaggtgaagctgggcgccctggtgctgctgctggtgctgaccctgctgtgcagcctggtgcccatctgtgtgctgcggcggcctggggccaaccacgagggcagcgccagccggcagaaggccctgagcctggtgtcctgctttgctgggggcgtcttcctggccacctgcctgctggacctgctgcctgactacctggccgccattgatgaggccctggccgccctgcacgtgaccctgcagttccccctgcaggagttcatcctggccatgggcttcttcctggtgctggtgatggagcagatcaccctggcctacaaggagcagagcggccccagccccctggaggagacccgggccctgctgggcaccgtgaatggaggcccccagcactggcatgatggccctggggtgccccaggccagcggggccccagccacccccagcgccctgcgggcctgtgtgctggtgttcagcctggccctgcacagcgtgtttgagggcctggccgtgggcctgcagagggaccgggcccgggccatggagctgtgcctggccctgctgctgcacaagggcatcctggccgtgtccctgagcctgcggctgctgcagagccacctgcgggcccaggtggtggccggctgcggcatcctcttcagctgcatgacccccctgggcatcggcctgggcgccgccctggccgagagcgctggccccctgcaccagctggcccagagcgtgctggagggcatggccgccggcaccttcctgtacatcaccttcctggagatcctgccccaggagctggccagcagcgagcagaggatcctgaaggtgatcctgctgctggccggctttgccctgctgaccggcctgctcttctag

SEQ ID NO: 170743 - DNA, 669 bp, synthetic construct
  misc_feature 1..669: note = Description of Artificial Sequence: Synthetic coding sequence
  source 1..669: mol_type = other DNA
atgaaggcccagctgcagttccccctgcaggagttcatcctggccatgggcttcttcctggtgctggtgatggagcagatcaccctggcctacaaggagcagagcggccccagccccctggaggagacccgggccctgctgggcaccgtgaatggaggcccccagcactggcatgatggccctggggtgccccaggccagcggggccccagccacccccagcgccctgcgggcctgtgtgctggtgttcagcctggccctgcacagcgtgtttgagggcctggccgtgggcctgcagagggaccgggcccgggccatggagctgtgcctggccctgctgctgcacaagggcatcctggccgtgtccctgagcctgcggctgctgcagagccacctgcgggcccaggtggtggccggctgcggcatcctcttcagctgcatgacccccctgggcatcggcctgggcgccgccctggccgagagcgctggccccctgcaccagctggcccagagcgtgctggagggcatggccgccggcaccttcctgtacatcaccttcctggagatcctgccccaggagctggccagcagcgagcagaggatcctgaaggtgatcctgctgctggccggctttgccctgctgaccggcctgctcttcatccagatctag

SEQ ID NO: 170744 - DNA, 942 bp, synthetic construct
  misc_feature 1..942: note = Description of Artificial Sequence: Synthetic coding sequence
  source 1..942: mol_type = other DNA
atgggcccctggggcgagcctgagctgctggtgtggaggcctgaggccgtggccagcgagccccctgtgcctgtgggcctggtgctgaccctgctgtgcagcctggtgcccatctgtgtgctgcggcggcctggggccaaccacgagggcagcgccagccggcagaaggccctgagcctggtgtcctgctttgctggaggagtcttcctggccacctgcctgctggacctgctgcctgactacctggccgccattgatgaggccctggccgccctgcacgtgaccctgcagttccccctgcaggagttcatcctggccatgggcttcttcctggtgctggtgatggagcagatcaccctggcctacaaggagcagagcggccccagccccctggaggagacccgggccctgctgggcaccgtgaatggaggcccccagcactggcatgatggccctggggtgccccaggccagcggggccccagccaccccatctgccctgcgggcctgtgtgctggtgttcagcctggccctgcacagcgtgtttgagggcctggccgtgggcctgcagagggaccgggcccgggccatggagctgtgcctggccctgctgctgcacaagggcatcctggccgtgtccctgagcctgcggctgctgcagagccacctgcgggcccaggtggtggccggctgcggcatcctcttcagctgcatgacccccctgggcatcggcctgggcgccgccctggccgagagcgctggccccctgcaccagctggcccagagcgtgctggagggcatggctgctggcaccttcctgtacatcaccttcctggagatcctgccccaggagctggccagcagcgagcagaggatcctgaaggtgatcctgctgctggccggctttgccctgctgaccggcctgctcttcatccagatctag

SEQ ID NO: 170745 - DNA, 1095 bp, synthetic construct
  misc_feature 1..1095: note = Description of Artificial Sequence: Synthetic coding sequence
  source 1..1095: mol_type = other DNA
atgcctggctgcccctgccccggctgcggcatggccggcccccggctgctcttcctgacagccctggccctggagctgctggagcgggccggcggcagccagcctgccctgcggagccggggcacagccacagcctgccgcctggacaacaaggagagcgagagctggggcgccctgctgtctggagagcggctggacacctggatctgcagcctgctgggcagcctgatggtgggcctgtctggagtcttccccctgctggtgatccccctggagatgggcaccatgctgcggtctgaggccggggcctggaggctgaagcagctgctgagctttgccctgggcggcctgctgggcaatgtgttcctgcacctgctgcctgaggcctgggcctacacctgcagcgccagccctggaggagagggccagagcctgcagcagcagcagcagctgggcctgtgggtgattgctggcatcctgaccttcctggccctggagaagatgttcctggacagcaaggaggagggcaccagccaggcccccaacaaggaccccacagctgctgctgctgccctgaatggaggccactgcctggcccagcctgctgctgagcccggcctgggcgctgtggtgcgcagcatcaaggtgtctggctacctgaacctgctggccaacaccatcgacaacttcacccacggcctggccgtggccgccagcttcctggtgtccaagaagattggcctgctgaccaccatggccatcctgctgcacgagatcccccatgaggtgggggactttgccatcctgctgcgggccggctttgaccgctggagcgctgccaagctgcagctgagcacagccctgggcggcctgctgggcgccggctttgccatctgcacccagagccccaagggcgtggaggagacagctgcctgggtgctgcccttcaccagcggcggcttcctgtacatcgccctggtgaatgtgctgcctgacctgctggaggaggaggacccctggaggagcctgcagcagctgctgctgctgtgtgccggcatcgtggtgatggtgctcttcagcctgtttgtggactag

SEQ ID NO: 170746 - DNA, 1116 bp, synthetic construct
  misc_feature 1..1116: note = Description of Artificial Sequence: Synthetic coding sequence
  source 1..1116: mol_type = other DNA
atgcctggctgcccctgccccggctgcggcatggccggcccccggctgctcttcctgacagccctggccctggagctgctggagcgggccggcggcagccagcctgccctgcggagccggggcacagccacagcctgccgcctggacaacaaggagagcgagagctggggcgccctgctgtctggagagcggctggacacctggatctgcagcctgctgggcagcctgatggtgggcctgtctggagtcttccccctgctggtgatccccctggagatgggcaccatgctgcggtctgaggccggggcctggaggctgaagcagctgctgagctttgccctgggcggcctgctgggcaatgtgttcctgcacctgctgcctgaggcctgggcctacacctgcagcgccagccctggaggagagggccagagcctgcagcagcagcagcagctgggcctgtgggtgattgctggcatcctgaccttcctggccctggagaagatgttcctggacagcaaggaggagggcaccagccaggcccccaacaaggaccccacagctgctgctgctgccctgaatggaggccactgcctggcccagcctgctgctgagcccggcctgggcgctgtggtgcgcagcatcaaggtgtctggctacctgaacctgctggccaacaccatcgacaacttcacccacggcctggccgtggccgccagcttcctggtgtccaagaagattggcctgctgaccaccatggccatcctgctgcacgagatcccccatgaggtgggggactttgccatcctgctgcgggccggctttgaccgctggagcgctgccaagctgcagctgagcacagccctgggcggcctgctgggcgccggctttgccatctgcacccagagccccaagggcgtggtgggctgcagccctgctgctgaggagacagctgcctgggtgctgcccttcaccagcggcggcttcctgtacatcgccctggtgaatgtgctgcctgacctgctggaggaggaggacccctggaggagcctgcagcagctgctgctgctgtgtgccggcatcgtggtgatggtgctcttcagcctgtttgtggactag

SEQ ID NO: 170747 - DNA, 930 bp, synthetic construct
  misc_feature 1..930: note = Description of Artificial Sequence: Synthetic coding sequence
  source 1..930: mol_type = other DNA
atggagcagctgctgggcatcaagctgggctgcctgtttgccctgctggccctgaccctgggctgcggcctgacccccatctgcttcaagtggttccagattgatgctgcccggggccaccaccggctggtgctgcggctgctgggctgcatctctgctggggtcttcctgggcgccggcttcatgcacatgacagctgaggccctggaggagattgagagccagatccagaagttcatggtgcagaacagaagtgccagcgagaggaacagcagtggagatgctgacagcgcccacatggagtacccctacggggagctgatcatcagcctgggcttcttctttgtgttcttcctggagagcctggccctgcagtgctgccctggagctgctgggggcagcacagtgcaggatgaggagtggggcggggcccacatctttgagctgcacagccacggccacctgcccagccccagcaagggccccctgcgggccctggtgctgctgctgagcctgtccttccacagcgtgtttgagggcctggccgtgggcctgcagcccaccgtggccgccaccgtgcagctgtgcctggccgtgctggcccacaagggcctggtggtgtttggagtgggcatgaggctggtgcacctgggcaccagcagccgctgggccgtgttcagcatcctgctgctggccctgatgagccccctgggcctggccgtgggcctggccgtgactggaggagacagcgagggcggccggggcctggcccaggccgtgctggagggcgtggccgccggcaccttcctgtatgtgaccttcctggagatcctgccccgggagctggccagccctgaggcccccctggccaagtggagctgtgtggccgccggctttgccttcatggccttcatcgccctgtgggcctag

SEQ ID NO: 170748 - DNA, 945 bp, synthetic construct
  misc_feature 1..945: note = Description of Artificial Sequence: Synthetic coding sequence
  source 1..945: mol_type = other DNA
atggtgaagctgctggtggccaagatcctgtgcatggtgggcgtcttcttcttcatgctgctgggcagcctgctgcctgtgaagatcatcgagacagactttgagaaggcccacaggagcaagaagatcctgagcctgtgcaacaccttcggcggcggcgtcttcctggccacctgcttcaatgccctgctgcctgctgtgcgggagaagctgcagaaggtgctgagcctgggccacatcagcacagactaccccctggccgagaccatcctgctgctgggcttcttcatgaccgtcttcctggagcagctgatcctgaccttcaggaaggagaagcccagcttcatcgacctggagaccttcaatgccggcagtgatgtgggcagtgacagtgaatatgagagccccttcatgggcggggcccggggccacgccctgtatgtggagccccacggccacggccccagcctgtctgtgcagggcctgagccgggccagccctgtgcggctgctgagcctggcctttgccctgagcgcccacagcgtgtttgagggcctggccctgggcctgcaggaggagggggagaaggtggtgtccctgtttgtgggcgtggccgtgcatgagaccctggtggccgtggccctgggcatctccatggcccggagcgccatgcccctgagagatgctgccaagctggccgtgacagtgtctgccatgatccccctgggcatcggcctgggcctgggcatcgagagcgcccagggcgtgcccggctctgtggcctctgtgctgctgcagggcctggccggcggcaccttcctgttcatcaccttcctggagatcctggccaaggagctggaggagaagagtgaccggctgctgaaggtgctcttcctggtgctgggctacacagtgctggccggcatggtgttcctgaagtggtag

SEQ ID NO: 170749 - DNA, 318 bp, synthetic construct
  misc_feature 1..318: note = Description of Artificial Sequence: Synthetic coding sequence
  source 1..318: mol_type = other DNA
atggtgaagctgctggtggccaagatcctgtgcatggtgggcgtcttcttcttcatgctgctgggcagcctgctgcctgtgaagatcatcgagacagactttgagaaggcccacaggagcaagaagatcctgagcctgtgcaacaccttcggcggcggcgtcttcctggccacctgcttcaatgccctgctgcctgctgtgcgggagaaggtgcgggccccctgggccctggccgccgccctgggcaccctgtggccccgggacagtgatgccttcagcaccctgatgcccagctctgtgaaggccctgatgctgtag

SEQ ID NO: 170750 - DNA, 972 bp, synthetic construct
  misc_feature 1..972: note = Description of Artificial Sequence: Synthetic coding sequence
  source 1..972: mol_type = other DNA
atggtgaagctgctggtggccaagatcctgtgcatggtgggcgtcttcttcttcatgctgctgggcagcctgctgcctgtgaagatcatcgagacagactttgagaaggcccacaggagcaagaagatcctgagcctgtgcaacaccttcggcggcggcgtcttcctggccacctgcttcaatgccctgctgcctgctgtgcgggagaagctgcagaaggtgctgagcctgggccacatcagcacagactaccccctggccgagaccatcctgctgctgggcttcttcatgaccgtcttcctggagcagctgatcctgaccttcaggaaggagaagcccagcttcatcgacctggagaccttcaatgccggcagtgatgtgggcagtgacagtgaatatgagagccccttcatgggcggggcccggggccacgccctgtatgtggagccccacggccacggccccagcctgtctgtgcagggcctgagccgggccagccctgtgcggctgctgagcctggcctttgccctgagcgcccacagcgtgtttgagggcctggccctgggcctgcaggaggagggggagaaggtggtgtccctgtttgtgggcgtggccgtgcatgagaccctggtggccgtggccctgggcatctccatggcccggagcgccatgcccctgagagatgctgccaagctggccgtgacagtgtctgccatgatccccctgggcatcggcctgggcctgggcatcgagagcgcccagggcgtgcccggctctgtggcctctgtgctgctgcagggcctggccggcggcaccttcctgttcatcaccttcctggagatcctggccaaggagctggaggagaagagtgaccggctgctgaaggtgctcttcctggtgctgggctacacagtgctggccggcatggtgttcctgaagtggatcagccccccagagccccgggtgtcctag

SEQ ID NO: 170751 - DNA, 1869 bp, synthetic construct
  misc_feature 1..1869: note = Description of Artificial Sequence: Synthetic coding sequence
  source 1..1869: mol_type = other DNA
atggtggatgtggtgggcctggagcgggagaccggcccccggggcagcccctggccaggcctgcccctgcccagcctggtgggccctgcccccctgctgacctgcctgtgcccccagtgcctgtctgtggaggatgccctgggcctgggggagcctgagggcagcggcctgcccccaggccctgtgctggaggcccgctacgtggcccggctgtctgctgctgctgtgctgtacctgagcaaccctgagggcacctgtgaagatgcccgggccggcctgtgggccagccacgccgaccacctgctggccctgctggagagccccaaggccctgaccccaggcctgtcctggctgctgcagaggatgcaggcccgggctgctggccagacccccaagacagcctgtgtggacatcccccagctgctggaggaggccgtgggcgctggggcccctggcagcgctgggggcgtgctggccgccctgctggaccacgtgcgcagcggcagctgcttccacgccctgcccagcccccagtactttgtggactttgtgttccagcagcacagcagcgaggtgcccatgaccctggccgagctgagcgccctgatgcagaggctgggcgtgggccgggaggcccacagcgaccacagccaccgccacagaggagccagctcctgggaccctgtgcccctcatcagcagcagcaacagcagctctgtgtgggacacagtgtgcctgagcgccagagatgtgatggccgcctacggcctgtctgagcaggccggcgtgaccccagaggcctgggcccagctgagccctgccctgctgcagcagcagctgagcggggcctgcaccagccagagccggccccctgtgcaggaccagctgagccagagcgagcgctacctgtatggcagcctggccaccctgctgatctgcctgtgtgctgtgtttggcctgctgctgctgacctgcaccggctgccggggcgtgacccactacatcctgcagaccttcctgagcctggccgtgggcgccctgactggagatgctgtgctgcacctgacccccaaggtgctgggcctgcacacccacagcgaggagggcctgagcccccagcccacctggaggctgctggccatgctggccggcctgtatgccttcttcctgtttgagaacctcttcaacctgctgctgccccgggaccctgaggacctggaggatggcccctgtggccacagcagccacagccacggcggccacagccatggagtgtccctgcagctggcccccagcgagctgcggcagcccaagccccctcatgagggcagcagagctgacctggtggccgaggagagccctgagctgctgaaccctgagccccggcggctgagccctgagctgcggctgctgccctacatgatcaccctgggagatgctgtgcacaactttgctgatggcctggccgtgggcgccgcctttgccagctcctggaagacaggcctggccaccagcctggccgtgttctgccacgagctgccccatgagctgggggactttgctgccctgctgcacgccggcctgtctgtgcggcaggccctgctgctgaacctggccagcgccctgacagcctttgctggcctgtatgtggccctggccgtgggcgtgtctgaggagagcgaggcctggatcctggccgtggccaccggcctcttcctgtatgtggccctgtgtgacatgctgcctgccatgctgaaggtgcgggacccccggccctggctgctcttcctgctgcacaacgtgggcctgctgggcggctggacagtgctgctgctgctgagcctgtatgaagatgacatcaccttctag

SEQ ID NO: 170752 - DNA, 1944 bp, synthetic construct
  misc_feature 1..1944: note = Description of Artificial Sequence: Synthetic coding sequence
  source 1..1944: mol_type = other DNA
atggccagcctggtgtccctggagctgggcctgctgctggccgtgctggtggtgacagccacagccagccccccagctggcctgctgagcctgctgaccagcggccagggcgccctggaccaggaggccctgggcggcctgctgaacaccctggccgacagagtgcactgtgccaacggcccctgtgggaagtgcctgtctgtggaggatgccctgggcctgggggagcctgagggcagcggcctgcccccaggccctgtgctggaggcccgctacgtggcccggctgtctgctgctgctgtgctgtacctgagcaaccctgagggcacctgtgaagatgcccgggccggcctgtgggccagccatgctgaccacctgctggccctgctggagagccccaaggccctgaccccaggcctgtcctggctgctgcagaggatgcaggcccgggccgccggccagacccccaagacagcctgtgtggacatcccccagctgctggaggaggccgtgggcgctggggcccctggcagcgctggaggagtgctggccgccctgctggaccacgtgcgcagcggcagctgcttccacgccctgcccagcccccagtactttgtggactttgtgttccagcagcacagcagcgaggtgcccatgaccctggccgagctgagcgccctgatgcagaggctgggcgtgggccgggaggcccacagcgaccacagccaccgccacagaggagccagctcctgggaccctgtgcccctcatcagcagcagcaacagcagctctgtgtgggacacagtgtgcctgagcgccagagatgtgatggccgcctacggcctgtctgagcaggccggcgtgaccccagaggcctgggcccagctgagccctgccctgctgcagcagcagctgagcggggcctgcaccagccagagcaggcctcctgtgcaggaccagctgagccagagcgagcgctacctgtatggcagcctggccaccctgctgatctgcctgtgtgctgtgtttggcctgctgctgctgacctgcaccggctgccggggcgtgacccactacatcctgcagaccttcctgagcctggccgtgggcgccctgactggagatgctgtgctgcacctgacccccaaggtgctgggcctgcacacccacagcgaggagggcctgagcccccagcccacctggaggctgctggccatgctggccggcctgtatgccttcttcctgtttgaaaatctcttcaacctgctgctgccccgggaccctgaggacctggaggatggcccctgtggccacagcagccacagccatggaggccacagccacggcgtgtccctgcagctggcccccagcgagctgcggcagcccaagccccctcatgagggcagcagagctgacctggtggccgaggagagccctgagctgctgaaccctgagccccggcggctgagccctgagctgcggctgctgccctacatgatcaccctgggagatgctgtgcacaactttgctgatggcctggccgtgggcgccgcctttgccagctcctggaagacaggcctggccaccagcctggccgtgttctgccacgagctgccccatgagctgggggactttgctgccctgctgcatgctggcctgtctgtgcggcaggccctgctgctgaacctggccagcgccctgacagcctttgctggcctgtatgtggccctggccgtgggcgtgtctgaggagagcgaggcctggatcctggccgtggccaccggcctcttcctgtatgtggccctgtgtgacatgctgcctgccatgctgaaggtgcgggacccccggccctggctgctcttcctgctgcacaacgtgggcctgctgggcggctggacagtgctgctgctgctgagcctgtatgaagatgacatcaccttctag

SEQ ID NO: 170753 - DNA, 1410 bp, synthetic construct
  misc_feature 1..1410: note = Description of Artificial Sequence: Synthetic coding sequence
  source 1..1410: mol_type = other DNA
atggcccggggcctgggcgccccccactgggtggccgtgggcctgctgacctgggccaccctgggcctgctggtggccggcctgggcggccatgatgacctgcatgatgacctgcaggaggacttccacggccacagccaccgccacagccatgaggacttccaccacggccacagccacgcccacggccacggccacacccatgagagcatctggcacggccacacccatgaccatgaccacggccacagccatgaggacctgcaccacggccacagccacggctacagccatgagagcctgtaccaccggggccacggccatgaccacgagcacagccacggcggctatggagagagcggggcccctggcatcaagcaggacctggatgctgtgaccctgtgggcctatgccctgggcgccaccgtgctgatctctgctgcccccttctttgtgctcttcctgatccctgtggagagcaacagccccaggcacaggagcctgctgcagatcctgctgagctttgccagcggcggcctgctgggagatgccttcctgcacctgatcccccacgccctggagccccacagccaccacaccctggagcagcccggccacggccacagccacagcggccagggccccatcctgtctgtgggcctgtgggtgctgtctggaattgtggccttcctggtggtggagaagtttgtgagacatgtgaagggcggccacggccacagccacggccacggccacgcccacagccacacccggggcagccacggccacggccggcaggagaggagcaccaaggagaagcagagcagcgaggaggaggagaaggagacccggggcgtgcagaagagaagaggaggcagcacagtgcccaaggatggccctgtgcggccccagaatgctgaggaggagaagaggggcctggacctgcgggtgtctggctacctgaacctggccgctgacctggcccacaacttcacagatggcctggccatcggggccagcttccggggcggccggggcctgggcatcctgaccaccatgacagtgctgctgcacgaggtgccccatgaggtgggggactttgccatcctggtgcagagcggctgcagcaagaagcaggccatgaggctgcagctgctgacagctgtgggcgccctggccggcacagcctgtgccctgctgacagaaggaggagctgtgggcagcgagattgctggaggagctggccctggctgggtgctgcccttcaccgctgggggcttcatctacgtggccaccgtgtctgtgctgcctgagctgctgcgggaggccagccccctgcagagcctgctggaggtgctgggcctgctgggcggcgtcatcatgatggtgctgattgcccacctggagtag

SEQ ID NO: 170754 - DNA, 1410 bp, synthetic construct; identical to SEQ ID NO: 170753
  misc_feature 1..1410: note = Description of Artificial Sequence: Synthetic coding sequence
  source 1..1410: mol_type = other DNA

SEQ ID NO: 170755 - DNA, 1410 bp, synthetic construct; identical to SEQ ID NO: 170753
  misc_feature 1..1410: note = Description of Artificial Sequence: Synthetic coding sequence
  source 1..1410: mol_type = other DNA

SEQ ID NO: 170756 - DNA, 1410 bp, synthetic construct; identical to SEQ ID NO: 170753
  misc_feature 1..1410: note = Description of Artificial Sequence: Synthetic coding sequence
  source 1..1410: mol_type = other DNA

SEQ ID NO: 170757 - DNA, 663 bp, synthetic construct
  misc_feature 1..663: note = Description of Artificial Sequence: Synthetic coding sequence
  source 1..663: mol_type = other DNA
atggacagcagcctgcctgaatgtcgccacatcggcaagggcatccgggccaaggtggagaggaacttcctgttcagccgggacctgaaggccggcctgccccggcccagcaagccaggcaaggagcgcatccctgagcccgccctgggcgccaccgtgctgatctctgctgcccccttctttgtgctcttcctgatccctgtggagagcaacagccccaggcacaggagcctgctgcagatcctgctgagctttgccagcggcggcctgctgggagatgccttcctgcacctgatcccccacgccctggagccccacagccaccacaccctggagcagcccggccacggccacagccacagcggccagggccccatcctgtctgtgggcctgtgggtgctgtctggaattgtggccttcctggtggtggagaagtttgtgagacatgtgaagggcggccacggccacagccacggccacggccacgcccacagccacacccggggcagccacggccacggccggcaggagaggagcaccaaggagaagcagagcagcgaggaggaggagaaggagacccggggcgtgcagaagagaagaggaggcagcacagtgcccaaggatggccctgtgcggccccagaatgctgaggaggagaagtag

SEQ ID NO: 170758 - DNA, 663 bp, synthetic construct; identical to SEQ ID NO: 170757
  misc_feature 1..663: note = Description of Artificial Sequence: Synthetic coding sequence
  source 1..663: mol_type = other DNA

SEQ ID NO: 170759 - DNA, 1410 bp, synthetic construct; identical to SEQ ID NO: 170753
  misc_feature 1..1410: note = Description of Artificial Sequence: Synthetic coding sequence
  source 1..1410: mol_type = other DNA

SEQ ID NO: 170760 - DNA, 1410 bp, synthetic construct; identical to SEQ ID NO: 170753
  misc_feature 1..1410: note = Description of Artificial Sequence: Synthetic coding sequence
  source 1..1410: mol_type = other DNA

SEQ ID NO: 170761 - DNA, 1410 bp, synthetic construct; identical to SEQ ID NO: 170753
  misc_feature 1..1410: note = Description of Artificial Sequence: Synthetic coding sequence
  source 1..1410: mol_type = other DNA

SEQ ID NO: 170762 - DNA, 663 bp, synthetic construct; identical to SEQ ID NO: 170757
  misc_feature 1..663: note = Description of Artificial Sequence: Synthetic coding sequence
  source 1..663: mol_type = other DNA

SEQ ID NO: 170763 - DNA, 663 bp, synthetic construct; identical to SEQ ID NO: 170757
  misc_feature 1..663: note = Description of Artificial Sequence: Synthetic coding sequence
  source 1..663: mol_type = other DNA

SEQ ID NO: 170764 - DNA, 1410 bp, synthetic construct; identical to SEQ ID NO: 170753
  misc_feature 1..1410: note = Description of Artificial Sequence: Synthetic coding sequence
  source 1..1410: mol_type = other DNA

SEQ ID NO: 170765 - DNA, 1410 bp, synthetic construct; identical to SEQ ID NO: 170753
  misc_feature 1..1410: note = Description of Artificial Sequence: Synthetic coding sequence
  source 1..1410: mol_type = other DNA

SEQ ID NO: 170766 - DNA, 1410 bp, synthetic construct; identical to SEQ ID NO: 170753
  misc_feature 1..1410: note = Description of Artificial Sequence: Synthetic coding sequence
  source 1..1410: mol_type = other DNA

SEQ ID NO: 170767 - DNA, 1410 bp, synthetic construct; identical to SEQ ID NO: 170753
  misc_feature 1..1410: note = Description of Artificial Sequence: Synthetic coding sequence
  source 1..1410: mol_type = other DNA

SEQ ID NO: 170768 - DNA, 663 bp, synthetic construct; identical to SEQ ID NO: 170757
  misc_feature 1..663: note = Description of Artificial Sequence: Synthetic coding sequence
  source 1..663: mol_type = other DNA

SEQ ID NO: 170769 - DNA, 1125 bp, synthetic construct
  misc_feature 1..1125: note = Description of Artificial Sequence: Synthetic coding sequence
  source 1..1125: mol_type = other DNA
atggcccggggcctgggcgccccccactgggtggccgtgggcctgctgacctgggccaccctgggcctgctggtggccggcctgggcggccatgatgacctgcatgatgacctgcaggaggacttccacggccacagccacagcgctgacctgagcagcagcatcttctgccccctgccctacccccggggcgtggagctgagccctgccagcctgagcaccagtgacctggcccagttctgcttccgctgggcccctggccgctgcttcctgcacctgatcccccacgccctggagccccacagccaccacaccctggagcagcccggccacggccacagccacagcggccagggccccatcctgtctgtgggcctgtgggtgctgagcggcatcgtggccttcctggtggtggagaagtttgtgcgccacgtgaagggcggccacggccacagccacggccacggccacgcccacagccacacccggggcagccacggccacggccggcaggagaggagcaccaaggagaagcagagcagcgaggaggaggagaaggagacccggggcgtgcagaagaggcggggcggcagcacagtgcccaaggatggccctgtgcggccccagaatgctgaggaggagaagaggggcctggacctgcgggtgtctggctacctgaacctggccgctgacctggcccacaacttcacagatggcctggccatcggggccagcttccggggcggccggggcctgggcatcctgaccaccatgacagtgctgctgcacgaggtgccccatgaggtgggggactttgccatcctggtgcagagcggctgcagcaagaagcaggccatgaggctgcagctgctgacagctgtgggcgccctggccggcacagcctgtgccctgctgacagagggcggcgctgtgggcagcgagattgctgggggcgccggccctggctgggtgctgcccttcaccgctgggggcttcatctacgtggccaccgtgtctgtgctgcctgagctgctgcgggaggccagccccctgcagagcctgctggaggtgctgggcctgctgggcggcgtcatcatgatggtgctgattgcccacctggagtag

SEQ ID NO: 170770 - DNA, 1353 bp, synthetic construct
  misc_feature 1..1353: note = Description of Artificial Sequence: Synthetic coding sequence
  source 1..1353: mol_type = other DNA
atggcccggggcctgggcgccccccactgggtggccgtgggcctgctgacctgggccaccctgggcctgctggtggccggcctgggcggccatgatgacctgcatgatgacctgcaggaggacttccacggccacggccacacccatgagagcatctggcacggccacacccatgaccatgaccacggccacagccatgaggacctgcaccacggccacagccacggctacagccatgagagcctgtaccaccggggccacggccatgaccacgagcacagccatggaggctacggggagagcggggcccctggcatcaagcaggacctggatgctgtgaccctgtgggcctatgccctgggcgccaccgtgctgatctctgctgcccccttctttgtgctcttcctgatccctgtggagagcaacagccccaggcacaggagcctgctgcagatcctgctgagctttgccagcggcggcctgctgggagatgccttcctgcacctgatcccccacgccctggagccccacagccaccacaccctggagcagcccggccacggccacagccacagcggccagggccccatcctgtctgtgggcctgtgggtgctgagcggcatcgtggccttcctggtggtggagaagtttgtgcgccacgtgaagggcggccacggccacagccacggccacggccacgcccacagccacacccggggcagccacggccacggccggcaggagaggagcaccaaggagaagcagagcagcgaggaggaggagaaggagacccggggcgtgcagaagaggcggggcggcagcacagtgcccaaggatggccctgtgcggccccagaatgctgaggaggagaagaggggcctggacctgcgggtgtctggctacctgaacctggccgctgacctggcccacaacttcacagatggcctggccatcggggccagcttccggggcggccggggcctgggcatcctgaccaccatgacagtgctgctgcacgaggtgccccatgaggtgggggactttgccatcctggtgcagagcggctgcagcaagaagcaggccatgaggctgcagctgctgacagctgtgggcgccctggccggcacagcctgtgccctgctgacagagggcggcgctgtgggcagcgagattgctgggggcgccggccctggctgggtgctgcccttcaccgctgggggcttcatctacgtggccaccgtgtctgtgctgcctgagctgctgcgggaggccagccccctgcagagcctgctggaggtgctgggcctgctgggcggcgtcatcatgatggtgctgattgcccacctggagtag

SEQ ID NO: 170771 - DNA, 663 bp, synthetic construct; identical to SEQ ID NO: 170757
  misc_feature 1..663: note = Description of Artificial Sequence: Synthetic coding sequence
  source 1..663: mol_type = other DNA

SEQ ID NO: 170772 - DNA, 1410 bp, synthetic construct; identical to SEQ ID NO: 170753
  misc_feature 1..1410: note = Description of Artificial Sequence: Synthetic coding sequence
  source 1..1410: mol_type = other DNA

SEQ ID NO: 170773 - DNA, 1125 bp, synthetic construct; identical to SEQ ID NO: 170769
  misc_feature 1..1125: note = Description of Artificial Sequence: Synthetic coding sequence
  source 1..1125: mol_type = other DNA

SEQ ID NO: 170774 - DNA, 1353 bp, synthetic construct; identical to SEQ ID NO: 170770
  misc_feature 1..1353: note = Description of Artificial Sequence: Synthetic coding sequence
  source 1..1353: mol_type = other DNA

SEQ ID NO: 170775 - DNA, 1125 bp, synthetic construct; identical to SEQ ID NO: 170769
  misc_feature 1..1125: note = Description of Artificial Sequence: Synthetic coding sequence
  source 1..1125: mol_type = other DNA

SEQ ID NO: 170776 - DNA, 1125 bp, synthetic construct; identical to SEQ ID NO: 170769
  misc_feature 1..1125: note = Description of Artificial Sequence: Synthetic coding sequence
  source 1..1125: mol_type = other DNA

SEQ ID NO: 170777 - DNA, 1353 bp, synthetic construct; identical to SEQ ID NO: 170770
  misc_feature 1..1353: note = Description of Artificial Sequence: Synthetic coding sequence
  source 1..1353: mol_type = other DNA

SEQ ID NO: 170778 - DNA, 1353 bp, synthetic construct; identical to SEQ ID NO: 170770
  misc_feature 1..1353: note = Description of Artificial Sequence: Synthetic coding sequence
  source 1..1353: mol_type = other DNA

SEQ ID NO: 170779 - DNA, 1125 bp, synthetic construct; identical to SEQ ID NO: 170769
  misc_feature 1..1125: note = Description of Artificial Sequence: Synthetic coding sequence
  source 1..1125: mol_type = other DNA

SEQ ID NO: 170780 - DNA, 1353 bp, synthetic construct; identical to SEQ ID NO: 170770
  misc_feature 1..1353: note = Description of Artificial Sequence: Synthetic coding sequence
  source 1..1353: mol_type = other DNA

SEQ ID NO: 170781 - DNA, 1353 bp, synthetic construct; identical to SEQ ID NO: 170770
  misc_feature 1..1353: note = Description of Artificial Sequence: Synthetic coding sequence
  source 1..1353: mol_type = other DNA

SEQ ID NO: 170782 - DNA, 1125 bp, synthetic construct; identical to SEQ ID NO: 170769
  misc_feature 1..1125: note = Description of Artificial Sequence: Synthetic coding sequence
  source 1..1125: mol_type = other DNA

SEQ ID NO: 170783 - DNA, 2391 bp, synthetic construct
  misc_feature 1..2391: note = Description of Artificial Sequence: Synthetic coding sequence
  source 1..2391: mol_type = other DNA
atgctggcccccctgagaaatgcccctggccgggagggcgccaccagccccagccccccaacagatgccaccggcagcctgggggagtgggatgtggacagaaatgtgaagacagagggctgggtgtccaaggagcgcatcagcaagctgcaccggctgaggatggctgacatcctgagccagagcgagaccctggccagccaggacctgagcggggacttcaagaagccagccctgcctgtgtccccagctgcccggagcaaggccccagccagcagcagcagcaaccctgaggaggtgcagaaggagggccccacagccctgcaggacagcaacagcggggagccagacatccccccaccccagcctgactgtggggacttccgcagcctgcaggaggagcagagccggcccccaacagctgtgagcagccctgggggccctgcccgggccccaccctaccaggagcccccctggggcggccctgccacagccccctacagcctggagaccctgaagggcggcaccatcctgggcaccaggagcctgaagggcaccagctactgcctgtttggccgcctgagcggctgtgatgtgtgcctggagcaccccagcgtgagccgctaccacgctgtgctgcagcaccgggccagcggcccagatggagaatgtgacagcaatggacctggcttctacctgtatgacctgggcagcacccacggcaccttcctgaacaagacccgcatcccccccaggacctactgccgggtgcacgtgggccacgtggtgcgctttggaggcagcaccaggctcttcatcctgcagggcccagaagaagatcgggaggccgagagcgagctgactgtgacccagctgaaggagctgaggaagcagcagcagatcctgctggagaagaagatgctgggggaggacagtgatgaggaggaggagatggacaccagcgagaggaagatcaatgccggcagccaggatgatgagatgggctgcacctggggcatgggagaagatgctgtggaggatgatgctgaggagaaccccatcgtgctggagttccagcaggagcgggaggccttctacatcaaggaccccaagaaggccctgcagggcttctttgaccgggagggggaggagctggagtatgaatttgatgagcagggccacagcacctggctgtgccgggtgcggctgcctgtggatgacagcacaggcaagcagctggtggccgaggccatccacagcggcaagaagaaggaggccatgatccagtgcagcctggaggcctgccgcatcctggacaccctgggcctgctgcggcaggaggccgtgtccaggaagaggaaggccaagaactgggaggatgaggacttctatgacagtgatgatgacaccttcctggacagaacaggcctcatcgagaagaagaggctgaacaggatgaagaaggccggcaagattgatgagaagccagagacctttgagagcctggtggccaagctgaatgatgctgagcgggagctgtctgagatcagcgagcggctgaaggccagcagccaggtgctgtctgagagccccagccaggacagcctggatgccttcatgtctgagatgaagagcggcagcaccctggatggagtgtccaggaagaagctgcacctgcggacctttgagctgaggaaggagcagcagaggctgaagggcctcatcaagatcgtgaagccagctgagatccctgagctgaagaagacagagacccagaccaccggggctgagaacaaggccaagaagctgaccctgcccctgtttggagccatgaagggcggcagcaagttcaagctgaagacaggaacagtgggcaagctgccccccaagaggcctgagctgccccccaccctgatgaggatgaaggatgagcctgaggtggaggaggaggaggaggaggaggaggaggaggagaaggagaaggaggagcacgagaagaagaagctggaggatggcagcctgagccggccccagcctgagattgagcctgaggccgctgtgcaggagatgaggcctcccacagacctgacccacttcaaggagacccagacccatgagaacatgagccagctgtctgaggaggagcagaacaaggactaccaggactgcagcaagaccaccagcctgtgtgccggccccagcgccagcaagaatgaatatgagaagagcagaggagagctgaagaagaagaagaccccaggccctgggaagctgccccccaccctgagcagcaagtacccagaagatgatcctgactactgtgtgtgggtgcccccagagggccagagcggagatggccgcacccacctgaatgacaagtatggctactag

SEQ ID NO: 170784 - DNA, 3699 bp, synthetic construct
  misc_feature 1..3699: note = Description of Artificial Sequence: Synthetic coding sequence
  source 1..3699: mol_type = other DNA
atggacttcctgctgcggccccagcctgagcctgagagcctgggccctggcaccccaggcttccctgagcaggaggaggatgagctgcacaggaccctgggcgtggagagatttgaggagatcctgcaggaggccggcagcagaggaggagaggagcccggccgctcctatggagaggaggactttgagtaccaccggcagagcagccaccacatccaccaccccctgagcacccacctgcccccagatgcccggcggaggaagaccccccagggccctggcaggaagcccaggagaagacctggggccagccccaccggggagacccccaccatcgaggagggggaggaggatgaagatgaggccagcgaggccgagggcgcccgggccctgacccagcccagccctgtgtccacccccagctctgtgcagttcttcctgcaggaggatgacagcgctgacaggaaggccgagaggaccagccccagcagccctgcccccctgccccaccaggaggccaccccccgggccagcaaaggagcccaggccggcacccaggtggaggaggccgaggccgaggccgtggccgtggccagcggcacagctggaggagatgatggaggagccagcggccggcccctgcccaaggcccagcccggccacaggagctacaacctgcaggagcggcggcgcatcggctccatgaccggggctgagcaggccctgctgccccgggtgcccacagatgaaattgaggcccagaccctggccacagctgacctggacctgatgaagagccacagatttgaagatgtgcctggggtgcggcggcacctggtgaggaagaatgccaagggcagcacccagagcggccgggagggccgggagcccggccccaccccccgggcccggccccgggccccccacaagccccatgaggtgtttgtggagctgaatgagctgctgctggacaagaaccaggagccccagtggagggagacagcccgctggatcaagtttgaggaggatgtggaggaggagacagagcgctggggcaagccccacgtggccagcctgtccttccgcagcctgctggagctgcggaggaccctggcccatggagctgtgctgctggacctggaccagcagaccctgcccggggtggcccaccaggtggtggagcagatggtgatcagtgaccagatcaaggcagaagatcgggccaacgtgctgcgggccctgctgctgaagcacagccaccccagtgatgagaaggacttctccttccccaggaacatctctgctggcagcctgggcagcctgctgggccaccaccacggccagggcgctgagagtgacccccacgtgacagagcccctgatgggcggcgtgcctgagacccggctggaggtggagcgggagcgggagctgcccccaccagcccccccagctggcatcaccaggagcaagagcaagcatgagctgaagctgctggagaagatcccagaaaatgctgaggccaccgtggtgctggtgggctgtgtggagttcctgagccggcccaccatggcctttgtgcggctgcgggaggccgtggagctggatgctgtgctggaggtgcctgtgcctgtgcgcttcctgttcctgctgctgggccccagcagcgccaacatggactaccatgaaattggccgcagcatcagcaccctgatgtctgacaagcagttccatgaagctgcctacctggctgatgaaagagaggacctgctgacagccatcaatgccttcctggactgcagcgtggtgctgccccccagcgaggtgcagggcgaggagctgctgcggtctgtggcccacttccagaggcagatgctgaagaagcgggaggagcagggccgcctgctgcccactggagctggcctggagcccaagagcgcccaggacaaggccctgctgcagatggtggaggccgccggggctgctgaagatgaccccctgcggaggacaggccggccctttggaggcctcatcagagatgtgagaagacgctacccccactacctgagtgacttcagagatgccctggacccccagtgcctggccgccgtcatcttcatctactttgctgccctgagccctgccatcacctttggaggcctgctgggggagaagacccaggacctgattggagtgtctgagctgatcatgagcacagccctgcagggcgtggtgttctgcctgctgggcgcccagcccctgctggtgattggcttcagcggccccctgctggtgtttgaggaggccttcttctccttctgcagcagcaaccacctggagtacctggtgggccgggtgtggattggcttctggctggtgttcctggccctgctgatggtggccctggagggcagcttcctggtgcgctttgtgagccgcttcacccaggagatctttgccttcctgatcagcctcatcttcatctatgagaccttctacaagctggtgaagatcttccaggagcaccccctgcacggctgcagcgccagcaacagcagcgaggtggatggaggagagaacatgacctgggccggggcccggcccaccctgggccctggcaacagaagcctggccggccagagcggccagggcaagccccggggccagcccaacacagccctgctgagcctggtgctgatggccggcaccttcttcatcgccttcttcctgaggaagttcaagaacagccgcttcttccctggccgcatcagaagagtcatcggggactttggagtgcccatcgccatcctgatcatggtgctggtggactacagcattgaggacacctacacccagaagctgtctgtgcccagcggcttctctgtgacagcccctgagaagaggggctgggtgatcaaccccctgggggagaagagccccttccctgtgtggatgatggtggccagcctgctgcctgccatcctggtgttcatcctgatcttcatggagacccagatcaccaccctcatcatcagcaagaaggagaggatgctgcagaagggcagcggcttccacctggacctgctgctgattgtggccatgggcggcatctgtgccctgtttggcctgccctggctggccgccgccaccgtgcgctctgtgacccacgccaatgccctgactgtgatgagcaaggctgtggcccctggggacaagcccaagatccaggaggtgaaggagcagagggtgacaggcctgctggtggccctgctggtgggcctgagcatcgtgattggagacctgctgcggcagatccccctggccgtgctgtttggcatcttcctgtacatgggcgtgaccagcctgaatggcatccagttctatgagcggctgcacctgctgctgatgccacccaagcaccacccagatgtgacctacgtgaagaaggtgaggaccctgaggatgcacctgttcaccgccctgcagctgctgtgcctggccctgctgtgggccgtgatgagcacagctgccagcctggccttccccttcatcctgatcctgactgtgcccctgaggatggtggtgctgacccgcatcttcacagaccgggagatgaagtgcctggatgccaatgaggccgagcctgtgtttgatgagcgggagggcgtggatgagtacaatgagatgcccatgcctgtgtag

SEQ ID NO: 170785 - DNA, 3684 bp, synthetic construct
  misc_feature 1..3684: note = Description of Artificial Sequence: Synthetic coding sequence
  source 1..3684: mol_type = other DNA
atgacccagcctgagcctgagagcctgggccctggcaccccaggcttccctgagcaggaggaggatgagctgcacaggaccctgggcgtggagagatttgaggagatcctgcaggaggccggcagccggggcggggaggagcccggccgctcctatggagaagaagattttgagtaccaccggcagagcagccaccacatccaccaccccctgagcacccacctgcccccagatgcccggcggaggaagaccccccagggccctggcaggaagccccggcggcggcctggggccagccccactggagagacccccaccatcgaggagggggaggaggatgaagatgaggccagcgaggccgagggcgcccgggccctgacccagcccagccctgtgtccacccccagctctgtgcagttcttcctgcaggaggatgattctgctgacaggaaggccgagaggaccagccccagcagccctgcccccctgccccaccaggaggccaccccccgggccagcaagggggcccaggccggcacccaggtggaggaggccgaggccgaggccgtggccgtggccagcggcacagctggaggagatgatggaggagccagcggccggcccctgcccaaggcccagcccggccacaggagctacaacctgcaggagaggagaagaattggctccatgactggagctgagcaggccctgctgccccgggtgcccacagatgaaattgaggcccagaccctggccacagctgacctggacctgatgaagagccacagatttgaagatgtgcctggggtgagaagacacctggtgaggaagaatgccaagggcagcacccagagcggccgggagggccgggagcccggccccaccccccgggcccggccccgggccccccacaagccccatgaggtgtttgtggagctgaatgagctgctgctggacaagaaccaggagccccagtggagggagacagcccgctggatcaagtttgaagaagatgtggaggaggagacagagcgctggggcaagccccacgtggccagcctgtccttccgcagcctgctggagctgcggaggaccctggcccacggggctgtgctgctggacctggaccagcagaccctgcccggggtggcccaccaggtggtggagcagatggtgatcagtgaccagatcaaggccgaggaccgggccaacgtgctgcgggccctgctgctgaagcacagccaccccagtgatgagaaggacttctccttccccaggaacatctctgctggcagcctgggcagcctgctgggccaccaccacggccagggcgctgagagtgacccccacgtgacagagcccctgatgggcggcgtgcctgagacccggctggaggtggagcgggagcgggagctgcccccaccagcccctcctgctggcatcaccaggagcaagagcaagcatgagctgaagctgctggagaagatcccagaaaatgctgaggccaccgtggtgctggtgggctgtgtggagttcctgagccggcccaccatggcctttgtgcggctgcgggaggccgtggagctggatgctgtgctggaggtgcctgtgcctgtgcgcttcctgttcctgctgctgggccccagcagcgccaacatggactaccacgagatcggccgcagcatcagcaccctgatgtctgacaagcagttccacgaggccgcctacctggctgatgagcgggaggacctgctgacagccatcaatgccttcctggactgcagcgtggtgctgcccccatctgaggtgcagggcgaggagctgctgcggtctgtggcccacttccagaggcagatgctgaagaagcgggaggagcagggccgcctgctgcccaccggggccggcctggagcccaagagcgcccaggacaaggccctgctgcagatggtggaggccgccggggctgctgaagatgaccccctgcggaggacaggccggccctttggaggcctcatcagagatgtgagaagacgctacccccactacctgagtgacttcagagatgccctggacccccagtgcctggccgctgtgatcttcatctactttgctgccctgagccctgccatcaccttcggcggcctgctgggggagaagacccaggacctgattggagtgtctgagctgatcatgagcacagccctgcagggcgtggtgttctgcctgctgggcgcccagcccctgctggtgattggcttcagcggccccctgctggtgtttgaggaggccttcttctccttctgcagcagcaaccacctggagtacctggtgggccgggtgtggattggcttctggctggtgttcctggccctgctgatggtggccctggagggcagcttcctggtgcgctttgtgagccgcttcacccaggagatctttgccttcctgatcagcctcatcttcatctatgagaccttctacaagctggtgaagatcttccaggagcaccccctgcacggctgcagcgccagcaacagcagcgaggtggatggaggagagaacatgacctgggccggggcccggcccaccctgggccctggcaacagaagcctggccggccagagcggccagggcaagccccggggccagcccaacacagccctgctgagcctggtgctgatggccggcaccttcttcatcgccttcttcctgaggaagttcaagaacagccgcttcttccctggccgcatccggcgggtgattggagactttggagtgcccatcgccatcctgatcatggtgctggtggactacagcattgaggacacctacacccagaagctgtctgtgcccagcggcttctctgtgacagcccctgagaagaggggctgggtgatcaaccccctgggggagaagagccccttccctgtgtggatgatggtggccagcctgctgcctgccatcctggtgttcatcctgatcttcatggagacccagatcaccaccctcatcatcagcaagaaggagaggatgctgcagaagggcagcggcttccacctggacctgctgctgattgtggccatgggcggcatctgtgccctgtttggcctgccctggctggccgccgccaccgtgcgctctgtgacccacgccaatgccctgactgtgatgagcaaggctgtggcccctggggacaagcccaagatccaggaggtgaaggagcagagggtgacaggcctgctggtggccctgctggtgggcctgagcatcgtcatcggggacctgctgcggcagatccccctggccgtgctgtttggcatcttcctgtacatgggcgtgaccagcctgaatggcatccagttctatgaaaggctgcacctgctgctgatgccacccaagcaccacccagatgtgacctacgtgaagaaggtgaggaccctgaggatgcacctgttcaccgccctgcagctgctgtgcctggccctgctgtgggccgtgatgagcacagctgccagcctggccttccccttcatcctgatcctgactgtgcccctgaggatggtggtgctgacccgcatcttcacagaccgggagatgaagtgcctggatgccaatgaagctgagcctgtgtttgatgagcgggagggcgtggatgagtacaatgagatgcccatgcctgtgtag

SEQ ID NO: 170786 - DNA, 2406 bp, synthetic construct
  misc_feature 1..2406: note = Description of Artificial Sequence: Synthetic coding sequence
  source 1..2406: mol_type = other DNA
gtgatggaggtggtggaggccgagaagatcgtgctgctgaccagcgcccgcttcctgttcctgctgctgggccctgctgggaaggccccccagtaccatgaaattggccgcagcatcgccaccctgatgacagatgagatcttccatgatgtggcctacaaggccaaggacagaaatgacctgctgtctggaattgatgagttcctggaccaggtgacagtgctgcccccaggagagtgggaccccagcatccgcatcgagccccccaagtctgtgcccagccaggagaagaggaagatccctgtgttccacaacggcagcacccccaccctgggggagacccccaaggaggccgcccaccacgccggccctgagctgcagaggacaggccgcctgtttggaggcctcatcctggacatcaagaggaaggcccccttcttcctgagtgacttcaaggatgccctgagcctgcagtgcctggccagcatcctcttcctgtactgtgcctgcatgagccctgtgatcacctttggaggcctgctgggggaggccacagagggccgcatcagcgccatcgagagcctgtttggagccagcctgactggaattgcctacagcctgtttgctggccagcccctgaccatcctgggcagcactggacctgtgctggtgtttgagaagatcctgtacaagttctgccgggactaccagctgagctacctgagcctgcggaccagcatcggcctgtggaccagcttcctgtgcatcgtgctggtggccacagatgccagcagcctggtgtgctacatcacccgcttcacagaggaggcctttgctgccctgatctgcatcatcttcatctatgaggccctggagaagctgtttgacctgggggagacctacgccttcaacatgcacaacaacctggacaagctgaccagctacagctgtgtgtgcacagagccccccaaccccagcaatgagaccctggcccagtggaagaaggacaacatcacagcccacaacatctcctggaggaacctgactgtgtctgagtgcaagaagctgcggggcgtcttcctgggcagcgcctgtggccaccacggcccctacatcccagatgtgctcttctggtgtgtgatcctcttcttcaccaccttcttcctgagcagcttcctgaagcagttcaagaccaagcgctacttccccaccaaggtgcgcagcaccatcagtgactttgctgtgttcctgaccatcgtcatcatggtgaccatcgactacctggtgggcgtgcccagccccaagctgcacgtgcctgagaagtttgagcccacccaccctgagcggggctggatcatcagccccctgggggacaacccctggtggaccctgctgattgctgccatcccagccctgctgtgcaccatcctgatcttcatggaccagcagatcacagctgtgatcatcaacaggaaggagcacaagctgaagaagggggccggctaccacctggacctgctgatggtgggcgtgatgctgggcgtgtgcagcgtgatgggcctgccctggtttgtggccgccaccgtgctgagcatcagccacgtgaacagcctgaaggtggagagtgaatgttctgcccctggagagcagcccaagttcctgggcatccgggagcagagggtgacaggcctgatgatcttcatcctgatgggcctgtctgtgttcatgacctctgtgctgaagttcatccccatgcctgtgctgtatggagtcttcctgtacatgggcgtgagcagcctgaagggcatccagctgtttgaccgcatcaagctgtttggcatgcctgccaagcaccagcctgacctgatctacctgcgctacgtgcccctgtggaaggtgcacatcttcaccgtcatccagctgacctgcctggtgctgctgtgggtgatcaaggtgtctgctgctgctgtggtgttccccatgatggtgctggccctggtgtttgtgaggaagctgatggacctgtgcttcaccaagcgggagctgtcctggctggatgacctgatgcctgagagcaagaagaagaaggaggatgacaagaagaagaaggagaaggaggaggccgagaggatgctgcaggatgatgatgacacagtgcacctgccctttgaaggaggcagcctgctgcagatccctgtgaaggccctgaagtacagcgtggaccccagcatcgtgaacatcagtgatgagatggccaagacagcccagtggaaggccctgtccatgaacacagaaaatgccaaggtgaccaggagcaacatgagcccagacaagcctgtgtctgtgaagatcagctttgaagatgagcccaggaagaagtatgtggatgctgagaccagcctgtag

SEQ ID NO: 170787 - DNA, 2244 bp, synthetic construct
  misc_feature 1..2244: note = Description of Artificial Sequence: Synthetic coding sequence
  source 1..2244: mol_type = other DNA
atgcccctgggccggcagagccaccgccaccacaggacccacggccagaagcacagaagaagaggccggggcaaaggagccagccagggcgaggagggcctggaggccctggcccatgacacccccagccagagggtgcagttcatcctgggcacagaggaggatgaggagcacgtgccccatgagctgttcacagagctggatgagatctgcatgaaggagggggaggatgctgagtggaaggagacagcccgctggctgaagtttgaagaagatgtggaggatggaggagagcgctggagcaagccctacgtggccaccctgagcctgcacagcctgtttgagctgcggagctgcctgatcaatggcaccgtgctgctggacatgcacgccaacagcattgaggagatcagtgacctgatcctggaccagcaggagctgagcagtgacctgaatgacagcatgagggtgaaggtgcgggaggccctgctgaagaagcaccaccaccagaatgagaagaagaggaacaacctgatccccatcgtgcgcagctttgctgaggtgggcaagaagcagagcgacccccacctgatggacaagcacggccagacagtgagcccccagagcgtgcccaccaccaacctggaggtgaagaatggagtgaactgtgagcacagccctgtggacctgagcaaggtggacctgcacttcatgaagaagatccccactggagctgaggccagcaatgtgctggtgggggaggtggacatcctggaccggcccatcgtggcctttgtgcggctgagccctgctgtgctgctgagcggcctgacagaggtgcccatccccacccgcttcctgttcatcctgctgggccctgtgggcaagggccagcagtaccatgaaattggccgctccatggccaccatcatgacagatgagatcttccatgatgtggcctacaaggccaaggagagagatgacctgctggccggcattgatgagttcctggaccaggtgacagtgctgcccccaggagagtgggaccccagcatccgcatcgagccccccaagaatgtgcccagccaggagaagaggaagatgcctggggtgcccaatggaaatgtgtgccacatcgagcaggagccccacggcggccacagcggccctgagctgcagaggacaggccgcctgtttggaggcctggtgctggacatcaagaggaaggccccctggtactggagcgactacagagatgccctgagcctgcagtgcctggccagcttcctgttcctgtactgtgcctgcatgagccctgtgatcacctttggaggcctgctgggggaggccacagagggccgcatcagcgccatcgagagcctgtttggagcctccatgactggaattgcctacagcctgtttgctggccaggccctgaccatcctgggcagcactggacctgtgctggtgtttgagaagatcctcttcaagttctgcaaggactatgccctgagctacctgagcctgcgggcctgcatcggcctgtggacagccttcctgtgcatcgtgctggtggccacagatgccagcagcctggtgtgctacatcacccgcttcacagaggaggcctttgccagcctcatctgcatcatcttcatctatgaggccatcgagaagctgatccacctggccgagacctaccccatccacatgcacagccagctggaccacctgagcctgtactactgccgctgcaccctgcctgagaaccccaacaaccacaccctgcagtactggaaggaccacaacatcgtgacagctgaggtgcactgggccaacctgactgtgtctgagtgccaggagatgcatggagagttcatgggcagcgcctgtggccaccacggcccctacaccccagatgtgctcttctggagctgcatcctcttcttcaccaccttcatcctgagcagcaccctgaagaccttcaagaccagccgctacttccccaccaggatggagagctgcagcgtggcctggctggagtgtggcggcgtcatcctggcccactgcaacctgcggctgctgcccagctcctgggactacagacatgccccaccccagcctgccaacttctgcatcttcagcagagatggagtgagcccctgctggccaggctggagccagagcctggacctggtgatctgcctgcccaggcctcccaagatgctgggcctgcaggcctag

SEQ ID NO: 170788 - DNA, 3135 bp, synthetic construct
  misc_feature 1..3135: note = Description of Artificial Sequence: Synthetic coding sequence
  source 1..3135: mol_type = other DNA
atgcctgctgctggcagcaatgaaccagatggagtgctgagctaccagaggccagatgaggaggccgtggtggaccagggcggcaccagcaccatcctgaacatccactatgagaaggaggagctggagggccacaggaccctgtatgtgggcgtgaggatgcccctgggccggcagagccaccgccaccacaggacccacggccagaagcacagaagaagaggccggggcaagggggccagccagggcgaggagggcctggaggccctggcccatgacacccccagccagagggtgcagttcatcctgggcacagaagaagatgaggagcacgtgccccatgagctgttcacagagctggatgagatctgcatgaaggagggagaagatgctgagtggaaggagacagcccgctggctgaagtttgaggaggatgtggaggatggaggagagcgctggagcaagccctacgtggccaccctgagcctgcacagcctgtttgagctgcggagctgcctgatcaatggaacagtgctgctggacatgcacgccaacagcattgaggagatcagtgacctgatcctggaccagcaggagctgagcagtgacctgaatgacagcatgagggtgaaggtgcgggaggccctgctgaagaagcaccaccaccagaatgagaagaagaggaacaacctgatccccatcgtgcgcagctttgctgaggtgggcaagaagcagagcgacccccacctgatggacaagcacggccagacagtgagcccccagagcgtgcccaccaccaacctggaggtgaagaatggagtgaactgtgagcacagccctgtggacctgagcaaggtggacctgcacttcatgaagaagatccccaccggggctgaggccagcaatgtgctggtgggggaggtggacatcctggaccggcccatcgtggcctttgtgcggctgagccctgctgtgctgctgagcggcctgacagaggtgcccatccccacccgcttcctgttcatcctgctgggccctgtgggcaagggccagcagtaccacgagatcggccgctccatggccaccatcatgacagatgagatcttccatgatgtggcctacaaggccaaggagagagatgacctgctggccggcattgatgagttcctggaccaggtgacagtgctgcccccaggagagtgggaccccagcatcagaattgagccccccaagaatgtgcccagccaggagaagaggaagatgcctggggtgcccaatggaaatgtgtgccacatcgagcaggagccccatggaggccacagcggccctgagctgcagaggacaggccgcctgtttggaggcctggtgctggacatcaagaggaaggccccctggtactggagcgactacagagatgccctgagcctgcagtgcctggccagcttcctgttcctgtactgtgcctgcatgagccctgtgatcaccttcggcggcctgctgggggaggccacagagggccgcatcagcgccatcgagagcctgtttggagcctccatgacaggcatcgcctacagcctgtttgctggccaggccctgaccatcctgggcagcacaggccctgtgctggtgtttgagaagatcctcttcaagttctgcaaggactatgccctgagctacctgagcctgcgggcctgcatcggcctgtggacagccttcctgtgcatcgtgctggtggccacagatgccagcagcctggtgtgctacatcacccgcttcacagaggaggcctttgccagcctcatctgcatcatcttcatctatgaggccatcgagaagctgatccacctggccgagacctaccccatccacatgcacagccagctggaccacctgagcctgtactactgccgctgcaccctgcctgagaaccccaacaaccacaccctgcagtactggaaggaccacaacatcgtgacagctgaggtgcactgggccaacctgactgtgtctgagtgccaggagatgcacggggagttcatgggcagcgcctgtggccaccacggcccctacaccccagatgtgctcttctggagctgcatcctcttcttcaccaccttcatcctgagcagcaccctgaagaccttcaagaccagccgctacttccccaccagggtgcgctccatggtgtctgactttgctgtgttcctgaccatcttcaccatggtgatcatcgacttcctgattggagtgcccagccccaagctgcaggtgcccagcgtcttcaagcccaccagagatgaccggggctggatcatcaaccccatcggccccaacccctggtggacagtgattgctgccatcatcccagccctgctgtgcaccatcctgatcttcatggaccagcagatcacagctgtgatcatcaacaggaaggagcacaagctgaagaagggctgcggctaccacctggacctgctgatggtggccatcatgctgggcgtgtgcagcatcatgggcctgccctggtttgtggccgccaccgtgctgagcatcacccacgtgaacagcctgaagctggagagcgagtgcagcgcccctggagagcagcccaagttcctgggcatccgggagcagagggtgacaggcctgatgatctttgtgctgatgggctgcagcgtcttcatgacagccatcctgaagttcatccccatgcctgtgctgtatggagtcttcctgtacatgggcgtgagcagcctgcagggcatccagttctttgaccggctgaagctgtttggcatgcctgccaagcaccagcctgacttcatctacctgcggcacgtgcccctgaggaaggtgcacctgttcaccctcatccagctgacctgcctggtgctgctgtgggtgatcaaggccagccctgctgccatcgtgttccccatgatggtgctggccctggtgtttgtgaggaaggtgatggacctgtgcttcagcaagcgggagctgtcctggctggatgacctgatgcctgagagcaagaagaagaagctggatgatgccaagaagaaggccaaggaggaggaggtgattgtgctggcccccaccgtgtacctgggcgccagcaactaccgcacctag

SEQ ID NO: 170789 - DNA, 2736 bp, synthetic construct
  misc_feature 1..2736: note = Description of Artificial Sequence: Synthetic coding sequence
  source 1..2736: mol_type = other DNA
atggaggagctgcaggatgattatgaggacatgatggaggagaacctggagcaggaggagtatgaggaccctgacatccctgagagccagatggaggagcctgctgcccatgacacagaggccacagccacagactaccacaccaccagccaccctggcacccacaaggtgtatgtggagctgcaggagctggtgatggatgagaagaaccaggagctgcgctggatggaggccgcccgctgggtgcagctggaggagaacctgggggagaatggagcctggggccggccccacctgagccacctgaccttctggagcctgctggagctgcggcgggtcttcaccaagggcaccgtgctgctggacctgcaggagaccagcctggccggcgtggccaaccagctgctggaccgcttcatctttgaggaccagatccggccccaggaccgggaggagctgctgcgggccctgctgctgaagcacagccacgccggggagctggaggccctgggcggcgtgaagccagctgtgctgaccaggtctggggaccccagccagcccctgctgccccagcacagcagcctggagacccagctgttctgtgagcagggagatggcggcacagagggccacagccccagcggcatcctggagaagatccccccagacagcgaggccaccctggtgctggtgggccgggctgacttcctggagcagcctgtgctgggctttgtgcggctgcaggaggccgctgagctggaggccgtggagctgcctgtgcccatccgcttcctgtttgtgctgctgggccctgaggccccccacatcgactacacccagctgggccgggctgctgccaccctgatgtctgagagggtcttcagaattgatgcctacatggcccagagcagaggagagctgctgcacagcctggagggcttcctggactgcagcctggtgctgcccccaacagatgcccccagcgagcaggccctgctgagcctggtgcctgtgcagcgggagctgctgcggcggcgctaccagagcagccctgccaagccagacagcagcttctacaagggcctggacctgaatggaggcccagatgaccccctgcagcagacaggccagctgtttggaggcctggtgcgggacatcagaagacgctacccctactacctgagtgacatcacagatgccttcagcccccaggtgctggccgccgtcatcttcatctactttgctgccctgagccctgccatcacctttggaggcctgctgggggagaagaccaggaaccagatgggcgtgtctgagctgctgatcagcacagctgtgcagggcatcctgtttgccctgctgggcgcccagcccctgctggtggtgggcttcagcggccccctgctggtgtttgaggaggccttcttctccttctgtgagaccaacggcctggagtacatcgtgggccgggtgtggattggcttctggctgatcctgctggtggtgctggtggtggcctttgagggcagcttcctggtgcgcttcatcagccgctacacccaggagatcttctccttcctgatcagcctcatcttcatctatgagaccttcagcaagctgatcaagatcttccaggaccaccccctgcagaagacctacaactacaacgtgctgatggtgcccaagccccagggccccctgcccaacacagccctgctgagcctggtgctgatggccggcaccttcttctttgccatgatgctgaggaagttcaagaacagcagctacttccctgggaagctgcggcgggtgattggagactttggagtgcccatcagcatcctgatcatggtgctggtggacttcttcatccaggacacctacacccagaagctgtctgtgcctgatggcttcaaggtgagcaacagcagcgcccggggctgggtgatccaccccctgggcctgcggtctgagttccccatctggatgatgtttgccagcgccctgcctgccctgctggtgttcatcctgatcttcctggagagccagatcaccaccctcatcgtgtccaagccagagaggaagatggtgaagggcagcggcttccacctggacctgctgctggtggtgggcatgggcggcgtggccgccctgtttggcatgccctggctgagcgccaccaccgtgcgctctgtgacccacgccaatgccctgactgtgatgggcaaggccagcaccccaggagctgctgcccagatccaggaggtgaaggagcagaggatcagcggcctgctggtggccgtgctggtgggcctgagcatcctgatggagcccatcctgagccgcatccccctggccgtgctgtttggcatcttcctgtacatgggcgtgaccagcctgagcggcatccagctgtttgaccgcatcctgctgctcttcaagccacccaagtaccacccagatgtgccctacgtgaagagggtgaagacctggaggatgcacctgttcaccggcatccagatcatctgcctggccgtgctgtgggtggtgaagagcaccccagccagcctggccctgccctttgtgctgatcctgactgtgcccctgcggcgggtgctgctgcccctcatcttcagaaatgtggagctgcagtgcctggatgctgatgatgccaaggccacctttgatgaggaggagggcagagatgaatatgatgaggtggccatgcctgtgtag

SEQ ID NO: 170790 - DNA, 3480 bp, synthetic construct
  misc_feature 1..3480: note = Description of Artificial Sequence: Synthetic coding sequence
  source 1..3480: mol_type = other DNA
atgagcagcgccccccggcggcctgccaagggagctgacagcttctgcaccccaggccctggcaggaagccccggcggcggcctggggccagccccactggagagacccccaccatcgaggagggggaggaggatgaagatgaggccagcgaggccgagggcgcccgggccctgacccagcccagccctgtgtccacccccagctctgtgcagttcttcctgcaggaggatgattctgctgacaggaaggccgagaggaccagccccagcagccctgcccccctgccccaccaggaggccaccccccgggccagcaagggggcccaggccggcacccaggtggaggaggccgaggccgaggccgtggccgtggccagcggcacagctggaggagatgatggaggagccagcggccggcccctgcccaaggcccagcccggccacaggagctacaacctgcaggagaggagaagaattggctccatgactggagctgagcaggccctgctgccccgggtgcccacagatgaaattgaggcccagaccctggccacagctgacctggacctgatgaagagccacagatttgaagatgtgcctggggtgagaagacacctggtgaggaagaatgccaagggcagcacccagagcggccgggagggccgggagcccggccccaccccccgggcccggccccgggccccccacaagccccatgaggtgtttgtggagctgaatgagctgctgctggacaagaaccaggagccccagtggagggagacagcccgctggatcaagtttgaagaagatgtggaggaggagacagagcgctggggcaagccccacgtggccagcctgtccttccgcagcctgctggagctgcggaggaccctggcccacggggctgtgctgctggacctggaccagcagaccctgcccggggtggcccaccaggtggtggagcagatggtgatcagtgaccagatcaaggccgaggaccgggccaacgtgctgcgggccctgctgctgaagcacagccaccccagtgatgagaaggacttctccttccccaggaacatctctgctggcagcctgggcagcctgctgggccaccaccacggccagggcgctgagagtgacccccacgtgacagagcccctgatgggcggcgtgcctgagacccggctggaggtggagcgggagcgggagctgcccccaccagcccctcctgctggcatcaccaggagcaagagcaagcatgagctgaagctgctggagaagatcccagaaaatgctgaggccaccgtggtgctggtgggctgtgtggagttcctgagccggcccaccatggcctttgtgcggctgcgggaggccgtggagctggatgctgtgctggaggtgcctgtgcctgtgcgcttcctgttcctgctgctgggccccagcagcgccaacatggactaccacgagatcggccgcagcatcagcaccctgatgtctgacaagcagttccacgaggccgcctacctggctgatgagcgggaggacctgctgacagccatcaatgccttcctggactgcagcgtggtgctgcccccatctgaggtgcagggcgaggagctgctgcggtctgtggcccacttccagaggcagatgctgaagaagcgggaggagcagggccgcctgctgcccaccggggccggcctggagcccaagagcgcccaggacaaggccctgctgcagatggtggaggccgccggggctgctgaagatgaccccctgcggaggacaggccggccctttggaggcctcatcagagatgtgagaagacgctacccccactacctgagtgacttcagagatgccctggacccccagtgcctggccgctgtgatcttcatctactttgctgccctgagccctgccatcaccttcggcggcctgctgggggagaagacccaggacctgattggagtgtctgagctgatcatgagcacagccctgcagggcgtggtgttctgcctgctgggcgcccagcccctgctggtgattggcttcagcggccccctgctggtgtttgaggaggccttcttctccttctgcagcagcaaccacctggagtacctggtgggccgggtgtggattggcttctggctggtgttcctggccctgctgatggtggccctggagggcagcttcctggtgcgctttgtgagccgcttcacccaggagatctttgccttcctgatcagcctcatcttcatctatgagaccttctacaagctggtgaagatcttccaggagcaccccctgcacggctgcagcgccagcaacagcagcgaggtggatggaggagagaacatgacctgggccggggcccggcccaccctgggccctggcaacagaagcctggccggccagagcggccagggcaagccccggggccagcccaacacagccctgctgagcctggtgctgatggccggcaccttcttcatcgccttcttcctgaggaagttcaagaacagccgcttcttccctggccgcatccggcgggtgattggagactttggagtgcccatcgccatcctgatcatggtgctggtggactacagcattgaggacacctacacccagaagctgtctgtgcccagcggcttctctgtgacagcccctgagaagaggggctgggtgatcaaccccctgggggagaagagccccttccctgtgtggatgatggtggccagcctgctgcctgccatcctggtgttcatcctgatcttcatggagacccagatcaccaccctcatcatcagcaagaaggagaggatgctgcagaagggcagcggcttccacctggacctgctgctgattgtggccatgggcggcatctgtgccctgtttggcctgccctggctggccgccgccaccgtgcgctctgtgacccacgccaatgccctgactgtgatgagcaaggctgtggcccctggggacaagcccaagatccaggaggtgaaggagcagagggtgacaggcctgctggtggccctgctggtgggcctgagcatcgtcatcggggacctgctgcggcagatccccctggccgtgctgtttggcatcttcctgtacatgggcgtgaccagcctgaatggcatccagttctatgaaaggctgcacctgctgctgatgccacccaagcaccacccagatgtgacctacgtgaagaaggtgaggaccctgaggatgcacctgttcaccgccctgcagctgctgtgcctggccctgctgtgggccgtgatgagcacagctgccagcctggccttccccttcatcctgatcctgactgtgcccctgaggatggtggtgctgacccgcatcttcacagaccgggagatgaagtgcctggatgccaatgaagctgagcctgtgtttgatgagcgggagggcgtggatgagtacaatgagatgcccatgcctgtgtag

SEQ ID NO: 170791 - DNA, 3726 bp, synthetic construct
  misc_feature 1..3726: note = Description of Artificial Sequence: Synthetic coding sequence
  source 1..3726: mol_type = other DNA
atgagcagcgccccccggcggcctgccaagggagctgacagcttctgcaccccagagcctgagagcctgggccctggcaccccaggcttccctgagcaggaggaggatgagctgcacaggaccctgggcgtggagagatttgaggagatcctgcaggaggccggcagccggggcggggaggagcccggccgctcctatggagaagaagattttgagtaccaccggcagagcagccaccacatccaccaccccctgagcacccacctgcccccagatgcccggcggaggaagaccccccagggccctggcaggaagccccggcggcggcctggggccagccccactggagagacccccaccatcgaggagggggaggaggatgaagatgaggccagcgaggccgagggcgcccgggccctgacccagcccagccctgtgtccacccccagctctgtgcagttcttcctgcaggaggatgattctgctgacaggaaggccgagaggaccagccccagcagccctgcccccctgccccaccaggaggccaccccccgggccagcaagggggcccaggccggcacccaggtggaggaggccgaggccgaggccgtggccgtggccagcggcacagctggaggagatgatggaggagccagcggccggcccctgcccaaggcccagcccggccacaggagctacaacctgcaggagaggagaagaattggctccatgactggagctgagcaggccctgctgccccgggtgcccacagatgaaattgaggcccagaccctggccacagctgacctggacctgatgaagagccacagatttgaagatgtgcctggggtgagaagacacctggtgaggaagaatgccaagggcagcacccagagcggccgggagggccgggagcccggccccaccccccgggcccggccccgggccccccacaagccccatgaggtgtttgtggagctgaatgagctgctgctggacaagaaccaggagccccagtggagggagacagcccgctggatcaagtttgaagaagatgtggaggaggagacagagcgctggggcaagccccacgtggccagcctgtccttccgcagcctgctggagctgcggaggaccctggcccacggggctgtgctgctggacctggaccagcagaccctgcccggggtggcccaccaggtggtggagcagatggtgatcagtgaccagatcaaggccgaggaccgggccaacgtgctgcgggccctgctgctgaagcacagccaccccagtgatgagaaggacttctccttccccaggaacatctctgctggcagcctgggcagcctgctgggccaccaccacggccagggcgctgagagtgacccccacgtgacagagcccctgatgggcggcgtgcctgagacccggctggaggtggagcgggagcgggagctgcccccaccagcccctcctgctggcatcaccaggagcaagagcaagcatgagctgaagctgctggagaagatcccagaaaatgctgaggccaccgtggtgctggtgggctgtgtggagttcctgagccggcccaccatggcctttgtgcggctgcgggaggccgtggagctggatgctgtgctggaggtgcctgtgcctgtgcgcttcctgttcctgctgctgggccccagcagcgccaacatggactaccacgagatcggccgcagcatcagcaccctgatgtctgacaagcagttccacgaggccgcctacctggctgatgagcgggaggacctgctgacagccatcaatgccttcctggactgcagcgtggtgctgcccccatctgaggtgcagggcgaggagctgctgcggtctgtggcccacttccagaggcagatgctgaagaagcgggaggagcagggccgcctgctgcccaccggggccggcctggagcccaagagcgcccaggacaaggccctgctgcagatggtggaggccgccggggctgctgaagatgaccccctgcggaggacaggccggccctttggaggcctcatcagagatgtgagaagacgctacccccactacctgagtgacttcagagatgccctggacccccagtgcctggccgctgtgatcttcatctactttgctgccctgagccctgccatcaccttcggcggcctgctgggggagaagacccaggacctgattggagtgtctgagctgatcatgagcacagccctgcagggcgtggtgttctgcctgctgggcgcccagcccctgctggtgattggcttcagcggccccctgctggtgtttgaggaggccttcttctccttctgcagcagcaaccacctggagtacctggtgggccgggtgtggattggcttctggctggtgttcctggccctgctgatggtggccctggagggcagcttcctggtgcgctttgtgagccgcttcacccaggagatctttgccttcctgatcagcctcatcttcatctatgagaccttctacaagctggtgaagatcttccaggagcaccccctgcacggctgcagcgccagcaacagcagcgaggtggatggaggagagaacatgacctgggccggggcccggcccaccctgggccctggcaacagaagcctggccggccagagcggccagggcaagccccggggccagcccaacacagccctgctgagcctggtgctgatggccggcaccttcttcatcgccttcttcctgaggaagttcaagaacagccgcttcttccctggccgcatccggcgggtgattggagactttggagtgcccatcgccatcctgatcatggtgctggtggactacagcattgaggacacctacacccagaagctgtctgtgcccagcggcttctctgtgacagcccctgagaagaggggctgggtgatcaaccccctgggggagaagagccccttccctgtgtggatgatggtggccagcctgctgcctgccatcctggtgttcatcctgatcttcatggagacccagatcaccaccctcatcatcagcaagaaggagaggatgctgcagaagggcagcggcttccacctggacctgctgctgattgtggccatgggcggcatctgtgccctgtttggcctgccctggctggccgccgccaccgtgcgctctgtgacccacgccaatgccctgactgtgatgagcaaggctgtggcccctggggacaagcccaagatccaggaggtgaaggagcagagggtgacaggcctgctggtggccctgctggtgggcctgagcatcgtcatcggggacctgctgcggcagatccccctggccgtgctgtttggcatcttcctgtacatgggcgtgaccagcctgaatggcatccagttctatgaaaggctgcacctgctgctgatgccacccaagcaccacccagatgtgacctacgtgaagaaggtgaggaccctgaggatgcacctgttcaccgccctgcagctgctgtgcctggccctgctgtgggccgtgatgagcacagctgccagcctggccttccccttcatcctgatcctgactgtgcccctgaggatggtggtgctgacccgcatcttcacagaccgggagatgaagtgcctggatgccaatgaagctgagcctgtgtttgatgagcgggagggcgtggatgagtacaatgagatgcccatgcctgtgtag

SEQ ID NO: 170792 - DNA, 456 bp, synthetic construct
  misc_feature 1..456: note = Description of Artificial Sequence: Synthetic coding sequence
  source 1..456: mol_type = other DNA
atgagcagcgccccccggcggcctgccaagggagctgacagcttctgcaccccagagcctgagagcctgggccctggcaccccaggcttccctgagcaggaggaggatgagctgcacaggaccctgggcgtggagagatttgaggagatcctgcaggaggccggcagccggggcggggaggagcccggccgctcctatggagaagaagattttgagtaccaccggcagagcagccaccacatccaccaccccctgagcacccacctgcccccagatgcccggcggaggaagaccccccagggccctggcaggaagccccggcggcggcctggggccagccccactggagagacccccaccatcgaggagggggaggaggatgaagatgaggccagcgaggccgagggcgcccgggccctgacccagcccagccctgtgtccacccccagcagctag

SEQ ID NO: 170793 - DNA, 384 bp, synthetic construct
  misc_feature 1..384: note = Description of Artificial Sequence: Synthetic coding sequence
  source 1..384: mol_type = other DNA
atgagcagcgccccccggcggcctgccaagggagctgacagcttctgcaccccagagcctgagagcctgggccctggcaccccaggcttccctgagcaggaggaggatgagctgcacaggaccctgggcgtggagagatttgaggagatcctgcaggaggccggcagccggggcggggaggagcccggccgctcctatggagaagaagattttgagtaccaccggcagagcagccaccacatccaccaccccctgagcacccacctgcccccagatgcccggcggaggaagaccccccagggccctggcaggaagccccggcggcggcctggggccagccccactggagagacccccaccatcgaggagggggaggaggactag

SEQ ID NO: 170794 - DNA, 438 bp, synthetic construct
  misc_feature 1..438: note = Description of Artificial Sequence: Synthetic coding sequence
  source 1..438: mol_type = other DNA
atgagcagcgccccccggcggcctgccaagggagctgacagcttctgcaccccagagcctgagagcctgggccctggcaccccaggcttccctgagcaggaggaggatgagctgcacaggaccctgggcgtggagagatttgaggagatcctgcaggaggccggcagccggggcggggaggagcccggccgctcctatggagaagaagattttgagtaccaccggcagagcagccaccacatccaccaccccctgagcacccacctgcccccagatgcccggcggaggaagaccccccagggccctggcaggaagccccggcggcggcctggggccagccccactggagagacccccaccatcgaggagggggaggaggatgaagatgaggccagcgaggccgagggcgcccgggccctgacccagcccagcccctag

SEQ ID NO: 170795 - DNA, 3726 bp, synthetic construct; identical to SEQ ID NO: 170791
  misc_feature 1..3726: note = Description of Artificial Sequence: Synthetic coding sequence
  source 1..3726: mol_type = other DNA

SEQ ID NO: 170796 - DNA, 213 bp, synthetic construct
  misc_feature 1..213: note = Description of Artificial Sequence: Synthetic coding sequence
  source 1..213: mol_type = other DNA
atgagcagcgccccccggcggcctgccaagggagctgacagcttctgcaccccagagcctgagagcctgggccctggcaccccaggcttccctgagcaggaggaggatgagctgcacaggaccctgggcgtggagagatttgaggagatcctgcaggaggccggcagccggggcggggaggagcccggccgctcctatggagaagaagattag

SEQ ID NO: 170797 - DNA, 510 bp, synthetic construct
  misc_feature 1..510: note = Description of Artificial Sequence: Synthetic coding sequence
  source 1..510: mol_type = other DNA
atgagcagcgccccccggcggcctgccaagggagctgacagcttctgcaccccagagcctgagagcctgggccctggcaccccaggcttccctgagcaggaggaggatgagctgcacaggaccctgggcgtggagagatttgaggagatcctgcaggaggccggcagccggggcggggaggagcccggccgctcctatggagaagaagattttgagtaccaccggcagagcagccaccacatccaccaccccctgagcacccacctgcccccagatgcccggcggaggaagaccccccagggccctggcaggaagccccggcggcggcctggggccagccccactggagagacccccaccatcgaggagggggaggaggatgaagatgaggccagcgaggccgagggcgcccgggccctgacccagcccagccctgtgtccacccccagctctgtgcagttcttcctgcaggaggatgattctgctgacaggaaggccgagaggacatag

SEQ ID NO: 170798 - DNA, 3240 bp, synthetic construct
  misc_feature 1..3240: note = Description of Artificial Sequence: Synthetic coding sequence
  source 1..3240: mol_type = other DNA
atggaggatgaagctgtgctggacagaggagccagcttcctgaagcacgtgtgtgatgaggaggaggtggagggccaccacaccatctacatcggcgtgcacgtgcccaagagctacagaagaagaagaagacacaagaggaagacaggccacaaggagaagaaggagaaggagcgcatcagcgagaactacagcgacaagagtgacattgaaaatgctgatgagagcagcagcagcatcctgaagcccctcatcagccctgctgctgagcgcatccgcttcatcctgggggaggaggatgacagccctgccccaccccagctgttcacagagctggatgagctgctggccgtggatggccaggagatggagtggaaggagacagcccgctggatcaagtttgaggagaaggtggagcagggcggggagcgctggagcaagccccacgtggccaccctgagcctgcacagcctgtttgagctgcggacctgcatggagaagggcagcatcatgctggaccgggaggccagcagcctgccccagctggtggagatgattgtggaccaccagattgaaacaggcctgctgaagccagagctgaaggacaaggtgacctacaccctgctgaggaagcaccgccaccagaccaagaagagcaacctgcggagcctggccgacatcggcaagacagtgtcctctgccagcaggatgttcaccaacccagacaatggcagccctgccatgacccacaggaacctgaccagcagcagcctgaatgacatcagtgacaagccagagaaggaccagctgaagaacaagttcatgaagaagctgcccagagatgctgaggccagcaatgtgctggtgggggaggtggacttcctggacacccccttcatcgcctttgtgcggctgcagcaggccgtgatgctgggcgccctgacagaggtgcctgtgcccacccgcttcctgttcatcctgctgggccccaagggcaaggccaagagctaccacgagatcggccgggccatcgccaccctgatgtctgatgaggtgttccatgacatcgcctacaaggccaaggacagacatgacctgattgctggcattgatgagttcctggatgaagtcatcgtgctgcccccaggagagtgggaccctgccatcagaattgagccccccaagagcctgcccagcagtgacaagaggaagaacatgtacagcggaggagaaaatgtgcagatgaatggagacacccctcatgatggcggccatggaggcggcggccacggggactgtgaggagctgcagaggacaggccgcttctgtggcggcctcatcaaggacatcaagaggaaggcccccttctttgccagtgacttctatgatgccctgaacatccaggccctgagcgccatcctcttcatctacctggccaccgtgaccaatgccatcacctttggaggcctgctgggagatgccacagacaacatgcagggcgtgctggagagcttcctgggcacagctgtgtctggggccatcttctgcctgtttgctggccagcccctgaccatcctgagcagcactggacctgtgctggtgtttgagcggctgctcttcaacttcagcaaggacaacaactttgactacctggagttccggctgtggattggcctgtggagcgccttcctgtgcctgatcctggtggccacagatgccagcttcctggtgcagtacttcacccgcttcacagaggagggcttcagcagcctcatctccttcatcttcatctatgatgccttcaagaagatgatcaagctggccgactactaccccatcaacagcaacttcaaggtgggctacaacaccctcttcagctgcacctgtgtgcccccagaccctgccaacatcagcatcagcaatgacaccaccctggcccctgagtacctgcccaccatgagcagcacagacatgtaccacaacaccacctttgactgggccttcctgagcaagaaggaatgttccaaatatggaggcaacctggtgggcaacaactgcaactttgtgcctgacatcaccctgatgtccttcatcctcttcctgggcacctacaccagctccatggccctgaagaagttcaagaccagcccctacttccccaccacagccaggaagctgatcagtgactttgccatcatcctgagcatcctgatcttctgtgtgattgatgccctggtgggcgtggacacccccaagctgattgtgcccagcgagttcaagcccaccagccccaacagaggctggtttgtgcccccatttggagagaacccctggtgggtgtgcctggccgccgccatcccagccctgctggtgaccatcctgatcttcatggaccagcagatcacagctgtgattgtgaacaggaaggagcacaagctgaagaagggagctggctaccacctggacctcttctgggtggccatcctgatggtgatctgcagcctgatggccctgccctggtacgtggccgccaccgtcatcagcatcgcccacatcgacagcctgaagatggagacagagaccagcgcccctggagagcagcccaagttcctgggcgtgcgggagcagagggtgacaggcaccctggtgttcatcctgaccggcctgagcgtcttcatggcccccatcctgaagttcatccccatgcctgtgctgtatggagtcttcctgtacatgggcgtggccagcctgaatggagtgcagttcatggaccggctgaagctgctgctgatgcccctgaagcaccagcctgacttcatctacctgcggcacgtgcccctgcggcgggtgcacctgttcaccttcctgcaggtgctgtgcctggccctgctgtggatcctgaagagcacagtggccgccatcatcttccctgtgatgatcctggccctggtggccgtgaggaagggcatggactacctgttcagccagcacgacctgtccttcctggatgatgtgattcctgagaaggacaagaagaagaaggaggatgagaagaagaagaagaagaagaagggcagcctggacagcgacaatgatgacagcgactgcccctacagcgagaaggtgcccagcatcaagatccccatggacatcatggagcagcagcccttcctgagtgacagcaagcccagcgaccgggagaggagccccaccttcctggagcggcacaccagctgctag

SEQ ID NO: 170799 - DNA, 3108 bp, synthetic construct
  misc_feature 1..3108: note = Description of Artificial Sequence: Synthetic coding sequence
  source 1..3108: mol_type = other DNA
atgagcacagaaaatgtggagggcaagcccagcaacctgggggagcggggccgggcccggagcagcaccttcctgcgggtggtgcagcccatgttcaaccacagcatcttcaccagcgctgtgtccccagctgctgagcgcatccgcttcatcctgggggaggaggatgacagccctgccccaccccagctgttcacagagctggatgagctgctggccgtggatggccaggagatggagtggaaggagacagcccgctggatcaagtttgaggagaaggtggagcagggcggggagcgctggagcaagccccacgtggccaccctgagcctgcacagcctgtttgagctgcggacctgcatggagaagggcagcatcatgctggaccgggaggccagcagcctgccccagctggtggagatgattgtggaccaccagattgaaacaggcctgctgaagccagagctgaaggacaaggtgacctacaccctgctgaggaagcaccgccaccagaccaagaagagcaacctgcggagcctggccgacatcggcaagacagtgtcctctgccagcaggatgttcaccaacccagacaatggcagccctgccatgacccacaggaacctgaccagcagcagcctgaatgacatcagtgacaagccagagaaggaccagctgaagaacaagttcatgaagaagctgcccagagatgctgaggccagcaatgtgctggtgggggaggtggacttcctggacacccccttcatcgcctttgtgcggctgcagcaggccgtgatgctgggcgccctgacagaggtgcctgtgcccacccgcttcctgttcatcctgctgggccccaagggcaaggccaagagctaccacgagatcggccgggccatcgccaccctgatgtctgatgaggtgttccatgacatcgcctacaaggccaaggacagacatgacctgattgctggcattgatgagttcctggatgaagtcatcgtgctgcccccaggagagtgggaccctgccatcagaattgagccccccaagagcctgcccagcagtgacaagaggaagaacatgtacagcggaggagaaaatgtgcagatgaatggagacacccctcatgatggcggccatggaggcggcggccacggggactgtgaggagctgcagaggacaggccgcttctgtggcggcctcatcaaggacatcaagaggaaggcccccttctttgccagtgacttctatgatgccctgaacatccaggccctgagcgccatcctcttcatctacctggccaccgtgaccaatgccatcacctttggaggcctgctgggagatgccacagacaacatgcagggcgtgctggagagcttcctgggcacagctgtgtctggggccatcttctgcctgtttgctggccagcccctgaccatcctgagcagcactggacctgtgctggtgtttgagcggctgctcttcaacttcagcaaggacaacaactttgactacctggagttccggctgtggattggcctgtggagcgccttcctgtgcctgatcctggtggccacagatgccagcttcctggtgcagtacttcacccgcttcacagaggagggcttcagcagcctcatctccttcatcttcatctatgatgccttcaagaagatgatcaagctggccgactactaccccatcaacagcaacttcaaggtgggctacaacaccctcttcagctgcacctgtgtgcccccagaccctgccaacatcagcatcagcaatgacaccaccctggcccctgagtacctgcccaccatgagcagcacagacatgtaccacaacaccacctttgactgggccttcctgagcaagaaggaatgttccaaatatggaggcaacctggtgggcaacaactgcaactttgtgcctgacatcaccctgatgtccttcatcctcttcctgggcacctacaccagctccatggccctgaagaagttcaagaccagcccctacttccccaccacagccaggaagctgatcagtgactttgccatcatcctgagcatcctgatcttctgtgtgattgatgccctggtgggcgtggacacccccaagctgattgtgcccagcgagttcaagcccaccagccccaacagaggctggtttgtgcccccatttggagagaacccctggtgggtgtgcctggccgccgccatcccagccctgctggtgaccatcctgatcttcatggaccagcagatcacagctgtgattgtgaacaggaaggagcacaagctgaagaagggagctggctaccacctggacctcttctgggtggccatcctgatggtgatctgcagcctgatggccctgccctggtacgtggccgccaccgtcatcagcatcgcccacatcgacagcctgaagatggagacagagaccagcgcccctggagagcagcccaagttcctgggcgtgcgggagcagagggtgacaggcaccctggtgttcatcctgaccggcctgagcgtcttcatggcccccatcctgaagttcatccccatgcctgtgctgtatggagtcttcctgtacatgggcgtggccagcctgaatggagtgcagttcatggaccggctgaagctgctgctgatgcccctgaagcaccagcctgacttcatctacctgcggcacgtgcccctgcggcgggtgcacctgttcaccttcctgcaggtgctgtgcctggccctgctgtggatcctgaagagcacagtggccgccatcatcttccctgtgatgatcctggccctggtggccgtgaggaagggcatggactacctgttcagccagcacgacctgtccttcctggatgatgtgattcctgagaaggacaagaagaagaaggaggatgagaagaagaagaagaagaagaagggcagcctggacagcgacaatgatgacagcgactgcccctacagcgagaaggtgcccagcatcaagatccccatggacatcatggagcagcagcccttcctgagtgacagcaagcccagcgaccgggagaggagccccaccttcctggagcggcacaccagctgctag

SEQ ID NO: 170800 - DNA, 2988 bp, synthetic construct
  misc_feature 1..2988: note = Description of Artificial Sequence: Synthetic coding sequence
  source 1..2988: mol_type = other DNA
atggaggatgaagctgtgctggacagaggagccagcttcctgaagcacgtgtgtgatgaggaggaggtggagggccaccacaccatctacatcggcgtgcacgtgcccaagagctacagaagaagaagaagacacaagaggaagacaggccacaaggagaagaaggagaaggagcgcatcagcgagaactacagcgacaagagtgacattgaaaatgctgatgagagcagcagcagcatcctgaagcccctcatcagccctgctgctgagcgcatccgcttcatcctgggggaggaggatgacagccctgccccaccccagctgttcacagagctggatgagctgctggccgtggatggccaggagatggagtggaaggagacagcccgctggatcaagtttgaggagaaggtggagcagggcggggagcgctggagcaagccccacgtggccaccctgagcctgcacagcctgtttgagctgcggacctgcatggagaagggcagcatcatgctggaccgggaggccagcagcctgccccagctggtggagatgattgtggaccaccagattgaaacaggcctgctgaagccagagctgaaggacaaggtgacctacaccctgctgaggaagcaccgccaccagaccaagaagagcaacctgcggagcctggccgacatcggcaagacagtgtcctctgccagcaggatgttcaccaacccagacaatggcagccctgccatgacccacaggaacctgaccagcagcagcctgaatgacatcagtgacaagccagagaaggaccagctgaagaacaagttcatgaagaagctgcccagagatgctgaggccagcaatgtgctggtgggggaggtggacttcctggacacccccttcatcgcctttgtgcggctgcagcaggccgtgatgctgggcgccctgacagaggtgcctgtgcccacccgcttcctgttcatcctgctgggccccaagggcaaggccaagagctaccacgagatcggccgggccatcgccaccctgatgtctgatgaggtgttccatgacatcgcctacaaggccaaggacagacatgacctgattgctggcattgatgagttcctggatgaagtcatcgtgctgcccccaggagagtgggaccctgccatcagaattgagccccccaagagcctgcccagcagtgacaagaggaagaacatgtacagcggaggagaaaatgtgcagatgaatggagacacccctcatgatggcggccatggaggcggcggccacggggactgtgaggagctgcagaggacaggccgcttctgtggcggcctcatcaaggacatcaagaggaaggcccccttctttgccagtgacttctatgatgccctgaacatccaggccctgagcgccatcctcttcatctacctggccaccgtgaccaatgccatcacctttggaggcctgctgggagatgccacagacaacatgcagggcgtgctggagagcttcctgggcacagctgtgtctggggccatcttctgcctgtttgctggccagcccctgaccatcctgagcagcactggacctgtgctggtgtttgagcggctgctcttcaacttcagcaaggacaacaactttgactacctggagttccggctgtggattggcctgtggagcgccttcctgtgcctgatcctggtggccacagatgccagcttcctggtgcagtacttcacccgcttcacagaggagggcttcagcagcctcatctccttcatcttcatctatgatgccttcaagaagatgatcaagctggccgactactaccccatcaacagcaacttcaaggtgggctacaacaccctcttcagctgcacctgtgtgcccccagaccctgccaacatcagcatcagcaatgacaccaccctggcccctgagtacctgcccaccatgagcagcacagacatgtaccacaacaccacctttgactgggccttcctgagcaagaaggaatgttccaaatatggaggcaacctggtgggcaacaactgcaactttgtgcctgacatcaccctgatgtccttcatcctcttcctgggcacctacaccagctccatggccctgaagaagttcaagaccagcccctacttccccaccacagccaggaagctgatcagtgactttgccatcatcctgagcatcctgatcttctgtgtgattgatgccctggtgggcgtggacacccccaagctgattgtgcccagcgagttcaagcccaccagccccaacagaggctggtttgtgcccccatttggagagaacccctggtgggtgtgcctggccgccgccatcccagccctgctggtgaccatcctgatcttcatggaccagcagatcacagctgtgattgtgaacaggaaggagcacaagctgaagttcatccccatgcctgtgctgtatggagtcttcctgtacatgggcgtggccagcctgaatggagtgcagttcatggaccggctgaagctgctgctgatgcccctgaagcaccagcctgacttcatctacctgcggcacgtgcccctgcggcgggtgcacctgttcaccttcctgcaggtgctgtgcctggccctgctgtggatcctgaagagcacagtggccgccatcatcttccctgtgatgatcctggccctggtggccgtgaggaagggcatggactacctgttcagccagcacgacctgtccttcctggatgatgtgattcctgagaaggacaagaagaagaaggaggatgagaagaagaagaagaagaagaagggcagcctggacagcgacaatgatgacagcgactgcccctacagcgagaaggtgcccagcatcaagatccccatggacatcatggagcagcagcccttcctgagtgacagcaagcccagcgaccgggagaggagccccaccttcctggagcggcacaccagctgctag

SEQ ID NO: 170801 - DNA, 3285 bp, synthetic construct
  misc_feature 1..3285: note = Description of Artificial Sequence: Synthetic coding sequence
  source 1..3285: mol_type = other DNA
atggaggatgaagctgtgctggacagaggagccagcttcctgaagcacgtgtgtgatgaggaggaggtggagggccaccacaccatctacatcggcgtgcacgtgcccaagagctacagaagaagaagaagacacaagaggaagacaggccacaaggagaagaaggagaaggagcgcatcagcgagaactacagcgacaagagtgacattgaaaatgctgatgagagcagcagcagcatcctgaagcccctcatcagccctgctgctgagcgcatccgcttcatcctgggggaggaggatgacagccctgccccaccccagctgttcacagagctggatgagctgctggccgtggatggccaggagatggagtggaaggagacagcccgctggatcaagtttgaggagaaggtggagcagggcggggagcgctggagcaagccccacgtggccaccctgagcctgcacagcctgtttgagctgcggacctgcatggagaagggcagcatcatgctggaccgggaggccagcagcctgccccagctggtggagatgattgtggaccaccagattgaaacaggcctgctgaagccagagctgaaggacaaggtgacctacaccctgctgaggaagcaccgccaccagaccaagaagagcaacctgcggagcctggccgacatcggcaagacagtgtcctctgccagcaggatgttcaccaacccagacaatggcagccctgccatgacccacaggaacctgaccagcagcagcctgaatgacatcagtgacaagccagagaaggaccagctgaagaacaagttcatgaagaagctgcccagagatgctgaggccagcaatgtgctggtgggggaggtggacttcctggacacccccttcatcgcctttgtgcggctgcagcaggccgtgatgctgggcgccctgacagaggtgcctgtgcccacccgcttcctgttcatcctgctgggccccaagggcaaggccaagagctaccacgagatcggccgggccatcgccaccctgatgtctgatgaggtgttccatgacatcgcctacaaggccaaggacagacatgacctgattgctggcattgatgagttcctggatgaagtcatcgtgctgcccccaggagagtgggaccctgccatcagaattgagccccccaagagcctgcccagcagtgacaagaggaagaacatgtacagcggaggagaaaatgtgcagatgaatggagacacccctcatgatggcggccatggaggcggcggccacggggactgtgaggagctgcagaggacaggccgcttctgtggcggcctcatcaaggacatcaagaggaaggcccccttctttgccagtgacttctatgatgccctgaacatccaggccctgagcgccatcctcttcatctacctggccaccgtgaccaatgccatcacctttggaggcctgctgggagatgccacagacaacatgcagggcgtgctggagagcttcctgggcacagctgtgtctggggccatcttctgcctgtttgctggccagcccctgaccatcctgagcagcactggacctgtgctggtgtttgagcggctgctcttcaacttcagcaaggacaacaactttgactacctggagttccggctgtggattggcctgtggagcgccttcctgtgcctgatcctggtggccacagatgccagcttcctggtgcagtacttcacccgcttcacagaggagggcttcagcagcctcatctccttcatcttcatctatgatgccttcaagaagatgatcaagctggccgactactaccccatcaacagcaacttcaaggtgggctacaacaccctcttcagctgcacctgtgtgcccccagaccctgccaacatcagcatcagcaatgacaccaccctggcccctgagtacctgcccaccatgagcagcacagacatgtaccacaacaccacctttgactgggccttcctgagcaagaaggaatgttccaaatatggaggcaacctggtgggcaacaactgcaactttgtgcctgacatcaccctgatgtccttcatcctcttcctgggcacctacaccagctccatggccctgaagaagttcaagaccagcccctacttccccaccacagccaggaagctgatcagtgactttgccatcatcctgagcatcctgatcttctgtgtgattgatgccctggtgggcgtggacacccccaagctgattgtgcccagcgagttcaagcccaccagccccaacagaggctggtttgtgcccccatttggagagaacccctggtgggtgtgcctggccgccgccatcccagccctgctggtgaccatcctgatcttcatggaccagcagatcacagctgtgattgtgaacaggaaggagcacaagctgaagaagggagctggctaccacctggacctcttctgggtggccatcctgatggtgatctgcagcctgatggccctgccctggtacgtggccgccaccgtcatcagcatcgcccacatcgacagcctgaagatggagacagagaccagcgcccctggagagcagcccaagttcctgggcgtgcgggagcagagggtgacaggcaccctggtgttcatcctgaccggcctgagcgtcttcatggcccccatcctgaagttcatccccatgcctgtgctgtatggagtcttcctgtacatgggcgtggccagcctgaatggagtgcagttcatggaccggctgaagctgctgctgatgcccctgaagcaccagcctgacttcatctacctgcggcacgtgcccctgcggcgggtgcacctgttcaccttcctgcaggtgctgtgcctggccctgctgtggatcctgaagagcacagtggccgccatcatcttccctgtgatgatcctggccctggtggccgtgaggaagggcatggactacctgttcagccagcacgacctgtccttcctggatgatgtgattcctgagaaggacaagaagaagaaggaggatgagaagaagaagaagaagaagaagggcagcctggacagcgacaatgatgatgagaaggaccaccagcacagcctgaatgccacccaccacgccgacaagatccccttcctgcagagcctgggcatgcccagcccccccaggacccctgtgaaggtggtgccccagatccgcatcgagctggagccagaagataatgactacttctggaggagcaagggcacagagaccaccctgtag

SEQ ID NO: 170802 - DNA, 3123 bp, synthetic construct
  misc_feature 1..3123: note = Description of Artificial Sequence: Synthetic coding sequence
  source 1..3123: mol_type = other DNA
atgaaggtgaaggaggagaaggccggcgtgggcaagctggaccacaccaaccacagaagacgcttcccagaccagaaggaatgtcctcccatccacatcggcctgcctgtgcccacctacccccagaggaagacagaccagaagggccacctgagcggcctgcagaaggtgcactggggcctgcggccagaccagccccagcaggagctgactggacctggcagcggggccagcagccaggacagctccatggacctgatcagcaggaccaggagccctgctgctgagcagctgcaggacatcctgggggaggaggatgaggcccccaaccccaccctcttcacagagatggacaccctgcagcatgatggagaccagatggagtggaaggagagcgcccgctggatcaagtttgaggagaaggtggaggagggcggggagcgctggagcaagccccacgtgtccaccctgagcctgcacagcctgtttgagctgcggacctgcctgcagacaggaacagtgctgctggacctggacagcggcagcctgccccagatcattgatgatgtgattgagaagcagattgaagatggcctgctgcggcctgagctgcgggagcgggtgtcctatgtgctgctgcggcggcaccgccaccagaccaagaagcccatccacaggagcctggccgacatcggcaagtctgtgtccaccaccaacagaagccctgcccggagccctggggccggccccagcctgcaccacagcacagaggacctgaggatgaggcagagcgccaactacggccgcctgtgccacgcccagagccgctccatgaatgacatcagcctgacccccaacacagaccagaggaagaacaagttcatgaagaagatccccaaggacagcgaggccagcaatgtgctggtgggggaggtggacttcctggaccagcccttcatcgcctttgtgcggctcatccagagcgccatgctgggcggcgtgacagaggtgcctgtgcccacccgcttcctgttcatcctgctgggccccagcggccgggccaagagctacaatgagatcggccgggccatcgccaccctgatggtggatgacctcttcagtgatgtggcctacaaggccaggaaccgggaggacctgattgctggcattgatgagttcctggatgaagtcatcgtgctgcccccaggagagtgggaccccaacatcagaattgagccccccaagaaggtgcccagcgctgacaagaggaagtctgtgttcagcctggccgagctgggccagatgaatggatctgtgggcggcggcggcggggcccctgggggcggcaatggaggcggcggcggcggcggcagcggcggcggggccggcagcggcggggccggcggcaccagcagtggagatgatggagagatgcctgccatgcatgagatcggggaggagctgatctggacaggccgcttctttggaggcctgtgcctggacatcaagaggaagctgccctggttccccagcgacttctatgatggcttccacatccagagcatcagcgccatcctcttcatctacctgggctgcatcaccaatgccatcacctttggaggcctgctgggagatgccacagacaactaccagggcgtgatggagagcttcctgggcacagccatggccggcagcctcttctgcctcttcagcggccagcccctcatcatcctgagcagcacaggccccatcctgatctttgagaagctgctgtttgacttcagcaaaggaaatggcctggactacatggagttccggctgtggattggcctgcacagcgctgtgcagtgcctgatcctggtggccacagatgccagcttcatcatcaagtacatcacccgcttcacagaggagggcttcagcaccctcatctccttcatcttcatctatgatgccatcaagaagatgattggagccttcaagtactaccccatcaacatggacttcaagcccaacttcatcaccacctacaagtgtgaatgtgtggccccagacacagtgaacaccaccgtcttcaatgccagcgcccccctggccccagacaccaatgccagcctgtacaacctgctgaacctgacagccctggactggagcctgctgagcaagaaggagtgcctgtcctatggaggccgcctgctgggcaacagctgcaagttcatcccagacctggccctgatgtccttcatcctcttcttcggcacctacagcatgaccctgaccctgaagaagttcaagttcagccgctacttccccaccaaggtgcgggccctggtggccgacttcagcatcgtgttcagcatcctgatgttctgtggcattgatgcctgcttcggcctggagacccccaagctgcacgtgcccagcgtcatcaagcccaccaggccagaccggggctggtttgtggccccctttgggaagaacccctggtgggtgtacccagccagcatcctgcctgccctgctggtgaccatcctgatcttcatggaccagcagatcacagctgtgattgtgaacagaaaagaaaacaagctgaagaaggccgccggctaccacctggacctcttctgggtgggcatcctgatggccctgtgcagcttcatgggcctgccctggtacgtggccgccaccgtcatcagcatcgcccacatcgacagcctgaagatggagacagagaccagcgcccctggagagcagccccagttcctgggcgtgcgggagcagagggtgacaggcatcatcgtgttcatcctgaccggcatctctgtgttcctggcccccatcctgaagatcctgggcctcatcatcgtgcggcggctgctggacttcatcttcagccagcacgacctggcctggattgacaacatcctgcctgagaaggagaagaaggagacagacaagaagaggaagaggaagaagggggcccacgaggactgtgatgaggagccccagtttcctccacccagcgtcatcaagatccccatggagagcgtgcagagcgacccccagaatggcatccactgcatcgccaggaagaggagcagctcctggagctacagcctgtag

SEQ ID NO: 170803 - DNA, 3414 bp, synthetic construct
  misc_feature 1..3414: note = Description of Artificial Sequence: Synthetic coding sequence
  source 1..3414: mol_type = other DNA
atgaaggtgaaggaggagaaggccggcgtgggcaagctggaccacaccaaccacagaagacgcttcccagaccagaaggaatgtcctcccatccacatcggcctgcctgtgcccacctacccccagaggaagacagaccagaagggccacctgagcggcctgcagaaggtgcactggggcctgcggccagaccagccccagcaggagctgactggacctggcagcggggccagcagccaggacagctccatggacctgatcagcaggaccaggagccctgctgctgagcagctgcaggacatcctgggggaggaggatgaggcccccaaccccaccctcttcacagagatggacaccctgcagcatgatggagaccagatggagtggaaggagagcgcccgctggatcaagtttgaggagaaggtggaggagggcggggagcgctggagcaagccccacgtgtccaccctgagcctgcacagcctgtttgagctgcggacctgcctgcagacaggaacagtgctgctggacctggacagcggcagcctgccccagatcattgatgatgtgattgagaagcagattgaagatggcctgctgcggcctgagctgcgggagcgggtgtcctatgtgctgctgcggcggcaccgccaccagaccaagaagcccatccacaggagcctggccgacatcggcaagtctgtgtccaccaccaacagaagccctgcccggagccctggggccggccccagcctgcaccacagcacagaggacctgaggatgaggcagagcgccaactacggccgcctgtgccacgcccagagccgctccatgaatgacatcagcctgacccccaacacagaccagaggaagaacaagttcatgaagaagatccccaaggacagcgaggccagcaatgtgctggtgggggaggtggacttcctggaccagcccttcatcgcctttgtgcggctcatccagagcgccatgctgggcggcgtgacagaggtgcctgtgcccacccgcttcctgttcatcctgctgggccccagcggccgggccaagagctacaatgagatcggccgggccatcgccaccctgatggtggatgacctcttcagtgatgtggcctacaaggccaggaaccgggaggacctgattgctggcattgatgagttcctggatgaagtcatcgtgctgcccccaggagagtgggaccccaacatcagaattgagccccccaagaaggtgcccagcgctgacaagaggaagtctgtgttcagcctggccgagctgggccagatgaatggatctgtgggcggcggcggcggggcccctgggggcggcaatggaggcggcggcggcggcggcagcggcggcggggccggcagcggcggggccggcggcaccagcagtggagatgatggagagatgcctgccatgcatgagatcggggaggagctgatctggacaggccgcttctttggaggcctgtgcctggacatcaagaggaagctgccctggttccccagcgacttctatgatggcttccacatccagagcatcagcgccatcctcttcatctacctgggctgcatcaccaatgccatcacctttggaggcctgctgggagatgccacagacaactaccagggcgtgatggagagcttcctgggcacagccatggccggcagcctcttctgcctcttcagcggccagcccctcatcatcctgagcagcacaggccccatcctgatctttgagaagctgctgtttgacttcagcaaaggaaatggcctggactacatggagttccggctgtggattggcctgcacagcgctgtgcagtgcctgatcctggtggccacagatgccagcttcatcatcaagtacatcacccgcttcacagaggagggcttcagcaccctcatctccttcatcttcatctatgatgccatcaagaagatgattggagccttcaagtactaccccatcaacatggacttcaagcccaacttcatcaccacctacaagtgtgaatgtgtggccccagacacagtgaacaccaccgtcttcaatgccagcgcccccctggccccagacaccaatgccagcctgtacaacctgctgaacctgacagccctggactggagcctgctgagcaagaaggagtgcctgtcctatggaggccgcctgctgggcaacagctgcaagttcatcccagacctggccctgatgtccttcatcctcttcttcggcacctacagcatgaccctgaccctgaagaagttcaagttcagccgctacttccccaccaaggtgcgggccctggtggccgacttcagcatcgtgttcagcatcctgatgttctgtggcattgatgcctgcttcggcctggagacccccaagctgcacgtgcccagcgtcatcaagcccaccaggccagaccggggctggtttgtggccccctttgggaagaacccctggtgggtgtacccagccagcatcctgcctgccctgctggtgaccatcctgatcttcatggaccagcagatcacagctgtgattgtgaacagaaaagaaaacaagctgaagaaggccgccggctaccacctggacctcttctgggtgggcatcctgatggccctgtgcagcttcatgggcctgccctggtacgtggccgccaccgtcatcagcatcgcccacatcgacagcctgaagatggagacagagaccagcgcccctggagagcagccccagttcctgggcgtgcgggagcagagggtgacaggcatcatcgtgttcatcctgaccggcatctctgtgttcctggcccccatcctgaagtgcatccccctgcctgtgctgtatggagtcttcctgtacatgggcgtggccagcctgaatggcatccagatgggcactggaggcagcgagttcaagatccagaagaagctgacccccttctgggagcgctgcaagctgttcctgatgcctgccaagcaccagcctgaccacgccttcctgcggcacgtgcccctgcggcgcatccacctgttcaccctggtgcagatcctgtgcctggccgtgctgtggatcctgaagagcacagtggccgccatcatcttccctgtgatgatcctgggcctcatcatcgtgcggcggctgctggacttcatcttcagccagcacgacctggcctggattgacaacatcctgcctgagaaggagaagaaggagacagacaagaagaggaagaggaagaagggggcccacgaggactgtgatgaggagccccagttccccccaccttctgtcatcaagatccccatggagagcgtgcagagcgacccccagaatggcatccactgcatcgccaggaagaggagcagctcctggagctacagcctgtag

SEQ ID NO: 170804 - DNA, 3060 bp, synthetic construct
  misc_feature 1..3060: note = Description of Artificial Sequence: Synthetic coding sequence
  source 1..3060: mol_type = other DNA
atgaaggtgaaggaggagaaggccggcgtgggcaagctggaccacaccaaccacagaagacgcttcccagaccagaagggcagccctgctgctgagcagctgcaggacatcctgggggaggaggatgaggcccccaaccccaccctcttcacagagatggacaccctgcagcatgatggagaccagatggagtggaaggagagcgcccgctggatcaagtttgaggagaaggtggaggagggcggggagcgctggagcaagccccacgtgtccaccctgagcctgcacagcctgtttgagctgcggacctgcctgcagacaggaacagtgctgctggacctggacagcggcagcctgccccagatcattgatgatgtgattgagaagcagattgaagatggcctgctgcggcctgagctgcgggagcgggtgtcctatgtgctgctgcggcggcaccgccaccagaccaagaagcccatccacaggagcctggccgacatcggcaagtctgtgtccaccaccaacagaagccctgcccggagccctggggccggccccagcctgcaccacagcacagaggacctgaggatgaggcagagcgccaactacggccgcctgtgccacgcccagagccgctccatgaatgacatcagcctgacccccaacacagaccagaggaagaacaagttcatgaagaagatccccaaggacagcgaggccagcaatgtgctggtgggggaggtggacttcctggaccagcccttcatcgcctttgtgcggctcatccagagcgccatgctgggcggcgtgacagaggtgcctgtgcccacccgcttcctgttcatcctgctgggccccagcggccgggccaagagctacaatgagatcggccgggccatcgccaccctgatggtggatgacctcttcagtgatgtggcctacaaggccaggaaccgggaggacctgattgctggcattgatgagttcctggatgaagtcatcgtgctgcccccaggagagtgggaccccaacatcagaattgagccccccaagaaggtgcccagcgctgacaagaggaagtctgtgttcagcctggccgagctgggccagatgaatggatctgtgggcggcggcggcggggcccctgggggcggcaatggaggcggcggcggcggcggcagcggcggcggggccggcagcggcggggccggcggcaccagcagtggagatgatggagagatgcctgccatgcatgagatcggggaggagctgatctggacaggccgcttctttggaggcctgtgcctggacatcaagaggaagctgccctggttccccagcgacttctatgatggcttccacatccagagcatcagcgccatcctcttcatctacctgggctgcatcaccaatgccatcacctttggaggcctgctgggagatgccacagacaactaccagggcgtgatggagagcttcctgggcacagccatggccggcagcctcttctgcctcttcagcggccagcccctcatcatcctgagcagcacaggccccatcctgatctttgagaagctgctgtttgacttcagcaaaggaaatggcctggactacatggagttccggctgtggattggcctgcacagcgctgtgcagtgcctgatcctggtggccacagatgccagcttcatcatcaagtacatcacccgcttcacagaggagggcttcagcaccctcatctccttcatcttcatctatgatgccatcaagaagatgattggagccttcaagtactaccccatcaacatggacttcaagcccaacttcatcaccacctacaagtgtgaatgtgtggccccagacacagtgaacaccaccgtcttcaatgccagcgcccccctggccccagacaccaatgccagcctgtacaacctgctgaacctgacagccctggactggagcctgctgagcaagaaggagtgcctgtcctatggaggccgcctgctgggcaacagctgcaagttcatcccagacctggccctgatgtccttcatcctcttcttcggcacctacagcatgaccctgaccctgaagaagttcaagttcagccgctacttccccaccaagcccaccaggccagaccggggctggtttgtggccccctttgggaagaacccctggtgggtgtacccagccagcatcctgcctgccctgctggtgaccatcctgatcttcatggaccagcagatcacagctgtgattgtgaacagaaaagaaaacaagctgaagaaggccgccggctaccacctggacctcttctgggtgggcatcctgatggccctgtgcagcttcatgggcctgccctggtacgtggccgccaccgtcatcagcatcgcccacatcgacagcctgaagatggagacagagaccagcgcccctggagagcagccccagttcctgggcgtgcgggagcagagggtgacaggcatcatcgtgttcatcctgaccggcatctctgtgttcctggcccccatcctgaagtgcatccccctgcctgtgctgtatggagtcttcctgtacatgggcgtggccagcctgaatggcatccagttctgggagcgctgcaagctgttcctgatgcctgccaagcaccagcctgaccacgccttcctgcggcacgtgcccctgcggcgcatccacctgttcaccctggtgcagatcctgtgcctggccgtgctgtggatcctgaagagcacagtggccgccatcatcttccctgtgatgatcctgggcctcatcatcgtgcggcggctgctggacttcatcttcagccagcacgacctggcctggattgacaacatcctgcctgagaaggagaagaaggagacagacaagaagaggaagaggaagaagggggcccacgaggactgtgatgaggagccccagttccccccaccttctgtcatcaagatccccatggagagcgtgcagagcgacccccagaatggcatccactgcatcgccaggaagaggagcagctcctggagctacagcctgtag

SEQ ID NO: 170805 - DNA, 3060 bp, synthetic construct; identical to SEQ ID NO: 170804
  misc_feature 1..3060: note = Description of Artificial Sequence: Synthetic coding sequence
  source 1..3060: mol_type = other DNA

SEQ ID NO: 170806 - DNA, 3123 bp, synthetic construct; identical to SEQ ID NO: 170802
  misc_feature 1..3123: note = Description of Artificial Sequence: Synthetic coding sequence
  source 1..3123: mol_type = other DNA

SEQ ID NO: 170807 - DNA, 3414 bp, synthetic construct; identical to SEQ ID NO: 170803
  misc_feature 1..3414: note = Description of Artificial Sequence: Synthetic coding sequence
  source 1..3414: mol_type = other DNA

SEQ ID NO: 170808 - DNA, 3366 bp, synthetic construct
  misc_feature 1..3366: note = Description of Artificial Sequence: Synthetic coding sequence
  source 1..3366: mol_type = other DNA
atgaaggtgaaggaggagaaggccggcgtgggcaagctggaccacaccaaccacagaagacgcttcccagaccagaaggaatgtcctcccatccacatcggcctgcctgtgcccacctacccccagaggaagacagaccagaagggccacctgagcggcctgcagaaggtgcactggggcctgcggccagaccagccccagcaggagctgactggacctggcagcggggccagcagccaggacagctccatggacctgatcagcaggaccaggagccctgctgctgagcagctgcaggacatcctgggggaggaggatgaggcccccaaccccaccctcttcacagagatggacaccctgcagcatgatggagaccagatggagtggaaggagagcgcccgctggatcaagtttgaggagaaggtggaggagggcggggagcgctggagcaagccccacgtgtccaccctgagcctgcacagcctgtttgagctgcggacctgcctgcagacaggaacagtgctgctggacctggacagcggcagcctgccccagatcattgatgatgtgattgagaagcagattgaagatggcctgctgcggcctgagctgcgggagcgggtgtcctatgtgctgctgcggcggcaccgccaccagaccaagaagcccatccacaggagcctggccgacatcggcaagtctgtgtccaccaccaacagaagccctgcccggagccctggggccggccccagcctgcaccacagcacagaggacctgaggatgaggcagagcgccaactacggccgcctgtgccacgcccagagccgctccatgaatgacatcagcctgacccccaacacagaccagaggaagaacaagttcatgaagaagatccccaaggacagcgaggccagcaatgtgctggtgggggaggtggacttcctggaccagcccttcatcgcctttgtgcggctcatccagagcgccatgctgggcggcgtgacagaggtgcctgtgcccacccgcttcctgttcatcctgctgggccccagcggccgggccaagagctacaatgagatcggccgggccatcgccaccctgatggtggatgacctcttcagtgatgtggcctacaaggccaggaaccgggaggacctgattgctggcattgatgagttcctggatgaagtcatcgtgctgcccccaggagagtgggaccccaacatcagaattgagccccccaagaaggtgcccagcgctgacaagaggaagtctgtgttcagcctggccgagctgggccagatgaatggatctgtgggcggcggcggcggggcccctgggggcggcaatggaggcggcggcggcggcggcagcggcggcggggccggcagcggcggggccggcggcaccagcagtggagatgatggagagatgcctgccatgcatgagatcggggaggagctgatctggacaggccgcttctttggaggcctgtgcctggacatcaagaggaagctgccctggttccccagcgacttctatgatggcttccacatccagagcatcagcgccatcctcttcatctacctgggctgcatcaccaatgccatcacctttggaggcctgctgggagatgccacagacaactaccagggcgtgatggagagcttcctgggcacagccatggccggcagcctcttctgcctcttcagcggccagcccctcatcatcctgagcagcacaggccccatcctgatctttgagaagctgctgtttgacttcagcaaaggaaatggcctggactacatggagttccggctgtggattggcctgcacagcgctgtgcagtgcctgatcctggtggccacagatgccagcttcatcatcaagtacatcacccgcttcacagaggagggcttcagcaccctcatctccttcatcttcatctatgatgccatcaagaagatgattggagccttcaagtactaccccatcaacatggacttcaagcccaacttcatcaccacctacaagtgtgaatgtgtggccccagacacagtgaacaccaccgtcttcaatgccagcgcccccctggccccagacaccaatgccagcctgtacaacctgctgaacctgacagccctggactggagcctgctgagcaagaaggagtgcctgtcctatggaggccgcctgctgggcaacagctgcaagttcatcccagacctggccctgatgtccttcatcctcttcttcggcacctacagcatgaccctgaccctgaagaagttcaagttcagccgctacttccccaccaaggtgcgggccctggtggccgacttcagcatcgtgttcagcatcctgatgttctgtggcattgatgcctgcttcggcctggagacccccaagctgcacgtgcccagcgtcatcaagcccaccaggccagaccggggctggtttgtggccccctttgggaagaacccctggtgggtgtacccagccagcatcctgcctgccctgctggtgaccatcctgatcttcatggaccagcagatcacagctgtgattgtgaacagaaaagaaaacaagctgaagaaggccgccggctaccacctggacctcttctgggtgggcatcctgatggccctgtgcagcttcatgggcctgccctggtacgtggccgccaccgtcatcagcatcgcccacatcgacagcctgaagatggagacagagaccagcgcccctggagagcagccccagttcctgggcgtgcgggagcagagggtgacaggcatcatcgtgttcatcctgaccggcatctctgtgttcctggcccccatcctgaagtgcatccccctgcctgtgctgtatggagtcttcctgtacatgggcgtggccagcctgaatggcatccagttctgggagcgctgcaagctgttcctgatgcctgccaagcaccagcctgaccacgccttcctgcggcacgtgcccctgcggcgcatccacctgttcaccctggtgcagatcctgtgcctggccgtgctgtggatcctgaagagcacagtggccgccatcatcttccctgtgatgatcctgggcctcatcatcgtgcggcggctgctggacttcatcttcagccagcacgacctggcctggattgacaacatcctgcctgagaaggagaagaaggagacagacaagaagaggaagaggaagaagggggcccacgaggactgtgatgaggagccccagttccccccaccttctgtcatcaagatccccatggagagcgtgcagagcgacccccagaatggcatccactgcatcgccaggaagaggagcagctcctggagctacagcctgtag

SEQ ID NO: 170809 - DNA, 2982 bp, synthetic construct
  misc_feature 1..2982: note = Description of Artificial Sequence: Synthetic coding sequence
  source 1..2982: mol_type = other DNA
atgaaggtgaaggaggagaaggccggcgtgggcaagctggaccacaccaaccacagaagacgcttcccagaccagaaggaatgtcctcccatccacatcggcctgcctgtgcccacctacccccagaggaagacagaccagaagggccacctgagcggcctgcagaaggtgcactggggcctgcggccagaccagccccagcaggagctgactggacctggcagcggggccagcagccaggacagctccatggacctgatcagcaggaccaggagccctgctgctgagcagctgcaggacatcctgggggaggaggatgaggcccccaaccccaccctcttcacagagatggacaccctgcagcatgatggagaccagatggagtggaaggagagcgcccgctggatcaagtttgaggagaaggtggaggagggcggggagcgctggagcaagccccacgtgtccaccctgagcctgcacagcctgtttgagctgcggacctgcctgcagacaggaacagtgctgctggacctggacagcggcagcctgccccagatcattgatgatgtgattgagaagcagattgaagatggcctgctgcggcctgagctgcgggagcgggtgtcctatgtgctgctgcggcggcaccgccaccagaccaagaagcccatccacaggagcctggccgacatcggcaagtctgtgtccaccaccaacagaagccctgcccggagccctggggccggccccagcctgcaccacagcacagaggacctgaggatgaggcagagcgccaactacggccgcctgtgccacgcccagagccgctccatgaatgacatcagcctgacccccaacacagaccagaggaagaacaagttcatgaagaagatccccaaggacagcgaggccagcaatgtgctggtgggggaggtggacttcctggaccagcccttcatcgcctttgtgcggctcatccagagcgccatgctgggcggcgtgacagaggtgcctgtgcccacccgcttcctgttcatcctgctgggccccagcggccgggccaagagctacaatgagatcggccgggccatcgccaccctgatggtggatgacctcttcagtgatgtggcctacaaggccaggaaccgggaggacctgattgctggcattgatgagttcctggatgaagtcatcgtgctgcccccaggagagtgggaccccaacatcagaattgagccccccaagaaggtgcccagcgctgacaagaggaagtctgtgttcagcctggccgagctgggccagatgaatggatctgtgggcggcggcggcggggcccctgggggcggcaatggaggcggcggcggcggcggcagcggcggcggggccggcagcggcggggccggcggcaccagcagtggagatgatggagagatgcctgccatgcatgagatcggggaggagctgatctggacaggccgcttctttggaggcctgtgcctggacatcaagaggaagctgccctggttccccagcgacttctatgatggcttccacatccagagcatcagcgccatcctcttcatctacctgggctgcatcaccaatgccatcacctttggaggcctgctgggagatgccacagacaactaccagggcgtgatggagagcttcctgggcacagccatggccggcagcctcttctgcctcttcagcggccagcccctcatcatcctgagcagcacaggccccatcctgatctttgagaagctgctgtttgacttcagcaaaggaaatggcctggactacatggagttccggctgtggattggcctgcacagcgctgtgcagtgcctgatcctggtggccacagatgccagcttcatcatcaagtacatcacccgcttcacagaggagggcttcagcaccctcatctccttcatcttcatctatgatgccatcaagaagatgattggagccttcaagtactaccccatcaacatggacttcaagcccaacttcatcaccacctacaagtgtgaatgtgtggccccagacacagtgaacaccaccgtcttcaatgccagcgcccccctggccccagacaccaatgccagcctgtacaacctgctgaacctgacagccctggactggagcctgctgagcaagaaggagtgcctgtcctatggaggccgcctgctgggcaacagctgcaagttcatcccagacctggccctgatgtccttcatcctcttcttcggcacctacagcatgaccctgaccctgaagaagttcaagttcagccgctacttccccaccaaggtgcgggccctggtggccgacttcagcatcgtgttcagcatcctgatgttctgtggcattgatgcctgcttcggcctggagacccccaagctgcacgtgcccagcgtcatcaagcccaccaggccagaccggggctggtttgtggccccctttgggaagaacccctggtgggtgtacccagccagcatcctgcctgccctgctggtgaccatcctgatcttcatggaccagcagatcacagctgtgattgtgaacagaaaagaaaacaagctgaagggcacagagagcaacagacaccaccggctgcacccagatggcaacctgtgcctgcccggcagccaccccaaggtgtaccccccagctggagctgtgcgcagcctgcccctgcacggccggggcctgcctgagtggcaccctgtgctgggcaccctgcaggccctgcctgatgccagccaggccccagctggcccctgcctgcctgctgcccgggccgccgccccagacccccccctgcaccctggagctgaccccctgcccggcggggccctggacccccagatccatggaggctgccaccacctgcccggccatgaccccggcccccaccacaggagcaaggccagcggcttccacctgtttcctgcccggcccggcctggactag

SEQ ID NO: 170810 - DNA, 2895 bp, synthetic construct
  misc_feature 1..2895: note = Description of Artificial Sequence: Synthetic coding sequence
  source 1..2895: mol_type = other DNA
atgaaggtgaaggaggagaaggccggcgtgggcaagctggaccacaccaaccacagaagacgcttcccagaccagaaggaatgtcctcccatccacatcggcctgcctgtgcccacctacccccagaggaagacagaccagaagggccacctgagcggcctgcagaaggtgcactggggcctgcggccagaccagccccagcaggagctgactggacctggcagcggggccagcagccaggacagctccatggacctgatcagcaggaccaggagccctgctgctgagcagctgcaggacatcctgggggaggaggatgaggcccccaaccccaccctcttcacagagatggacaccctgcagcatgatggagaccagatggagtggaaggagagcgcccgctggatcaagtttgaggagaaggtggaggagggcggggagcgctggagcaagccccacgtgtccaccctgagcctgcacagcctgtttgagctgcggacctgcctgcagacaggaacagtgctgctggacctggacagcggcagcctgccccagatcattgatgatgtgattgagaagcagattgaagatggcctgctgcggcctgagctgcgggagcgggtgtcctatgtgctgctgcggcggcaccgccaccagaccaagaagcccatccacaggagcctggccgacatcggcaagtctgtgtccaccaccaacagaagccctgcccggagccctggggccggccccagcctgcaccacagcacagaggacctgaggatgaggcagagcgccaactacggccgcctgtgccacgcccagagccgctccatgaatgacatcagcctgacccccaacacagaccagaggaagaacaagttcatgaagaagatccccaaggacagcgaggccagcaatgtgctggtgggggaggtggacttcctggaccagcccttcatcgcctttgtgcggctcatccagagcgccatgctgggcggcgtgacagaggtgcctgtgcccacccgcttcctgttcatcctgctgggccccagcggccgggccaagagctacaatgagatcggccgggccatcgccaccctgatggtggatgacctcttcagtgatgtggcctacaaggccaggaaccgggaggacctgattgctggcattgatgagttcctggatgaagtcatcgtgctgcccccaggagagtgggaccccaacatcagaattgagccccccaagaaggtgcccagcgctgacaagaggaagtctgtgttcagcctggccgagctgggccagatgaatggatctgtgggcggcggcggcggggcccctgggggcggcaatggaggcggcggcggcggcggcagcggcggcggggccggcagcggcggggccggcggcaccagcagtggagatgatggagagatgcctgccatgcatgagatcggggaggagctgatctggacaggccgcttctttggaggcctgtgcctggacatcaagaggaagctgccctggttccccagcgacttctatgatggcttccacatccagagcatcagcgccatcctcttcatctacctgggctgcatcaccaatgccatcacctttggaggcctgctgggagatgccacagacaactaccagggcgtgatggagagcttcctgggcacagccatggccggcagcctcttctgcctcttcagcggccagcccctcatcatcctgagcagcacaggccccatcctgatctttgagaagctgctgtttgacttcagcaaaggaaatggcctggactacatggagttccggctgtggattggcctgcacagcgctgtgcagtgcctgatcctggtggccacagatgccagcttcatcatcaagtacatcacccgcttcacagaggagggcttcagcaccctcatctccttcatcttcatctatgatgccatcaagaagatgattggagccttcaagtactaccccatcaacatggacttcaagcccaacttcatcaccacctacaagtgtgaatgtgtggccccagacacagtgaacaccaccgtcttcaatgccagcgcccccctggccccagacaccaatgccagcctgtacaacctgctgaacctgacagccctggactggagcctgctgagcaagaaggagtgcctgtcctatggaggccgcctgctgggcaacagctgcaagttcatcccagacctggccctgatgtccttcatcctcttcttcggcacctacagcatgaccctgaccctgaagaagttcaagttcagccgctacttccccaccaagcccaccaggccagaccggggctggtttgtggccccctttgggaagaacccctggtgggtgtacccagccagcatcctgcctgccctgctggtgaccatcctgatcttcatggaccagcagatcacagctgtgattgtgaacagaaaagaaaacaagctgaagggcacagagagcaacagacaccaccggctgcacccagatggcaacctgtgcctgcccggcagccaccccaaggtgtaccccccagctggagctgtgcgcagcctgcccctgcacggccggggcctgcctgagtggcaccctgtgctgggcaccctgcaggccctgcctgatgccagccaggccccagctggcccctgcctgcctgctgcccgggccgccgccccagacccccccctgcaccctggagctgaccccctgcccggcggggccctggacccccagatccatggaggctgccaccacctgcccggccacgtgtccctgcaccaccgctcctgggccagcagcagctttgagggcttctggatcagcagcttccccagcaccacctggccaggcctgaccaccagctag

SEQ ID NO: 170811 - DNA, 390 bp, synthetic construct
  misc_feature 1..390: note = Description of Artificial Sequence: Synthetic coding sequence
  source 1..390: mol_type = other DNA
atgaaggtgaaggaggagaaggccggcgtgggcaagctggaccacaccaaccacagaagacgcttcccagaccagaaggaatgtcctcccatccacatcggcctgcctgtgcccacctacccccagaggaagacagaccagaagggccacctgagcggcctgcagaaggtgcactggggcctgcggccagaccagccccagcaggagctgactggacctggcagcggggccagcagccaggacagctccatggacctgatcagcaggaccaggagccctgctgctgagcagctgcaggacatcctgggggaggaggatgaggcccccaaccccaccctcttcacagagatggacaccctgcagcatgatggagaccagatggagtggtag

SEQ ID NO: 170812 - DNA, 438 bp, synthetic construct
  misc_feature 1..438: note = Description of Artificial Sequence: Synthetic coding sequence
  source 1..438: mol_type = other DNA
atgaaggtgaaggaggagaaggccggcgtgggcaagctggaccacaccaaccacagaagacgcttcccagaccagaaggaatgtcctcccatccacatcggcctgcctgtgcccacctacccccagaggaagacagaccagaagggccacctgagcggcctgcagaaggtgcactggggcctgcggccagaccagccccagcaggagctgactggacctggcagcggggccagcagccaggacagctccatggacctgatcagcaggaccaggagccctgctgctgagcagctgcaggacatcctgggggaggaggatgaggcccccaaccccaccctcttcacagagatggacaccctgcagcatgatggagaccagatggagtggaaggagagcgcccgctggatcaagtttgaggagaaggtggaggagggctag

SEQ ID NO: 170813 - DNA, 3429 bp, synthetic construct
  misc_feature 1..3429: note = Description of Artificial Sequence: Synthetic coding sequence
  source 1..3429: mol_type = other DNA
atgaaggtgaaggaggagaaggccggcgtgggcaagctggaccacaccaaccacagaagacgcttcccagaccagaaggaatgtcctcccatccacatcggcctgcctgtgcccacctacccccagaggaagacagaccagaagggccacctgagcggcctgcagaaggtgcactggggcctgcggccagaccagccccagcaggagctgactggacctggcagcggggccagcagccaggacagctccatggacctgatcagcaggaccaggagccctgctgctgagcagctgcaggacatcctgggggaggaggatgaggcccccaaccccaccctcttcacagagatggacaccctgcagcatgatggagaccagatggagtggaaggagagcgcccgctggatcaagtttgaggagaaggtggaggagggcggggagcgctggagcaagccccacgtgtccaccctgagcctgcacagcctgtttgagctgcggacctgcctgcagacaggaacagtgctgctggacctggacagcggcagcctgccccagatcattgatgatgtgattgagaagcagattgaagatggcctgctgcggcctgagctgcgggagcgggtgtcctatgtgctgctgcggcggcaccgccaccagaccaagaagcccatccacaggagcctggccgacatcggcaagtctgtgtccaccaccaacagaagccctgcccggagccctggggccggccccagcctgcaccacagcacagaggacctgaggatgaggcagagcgccaactacggccgcctgtgccacgcccagagccgctccatgaatgacatcagcctgacccccaacacagaccagaggaagaacaagttcatgaagaagatccccaaggacagcgaggccagcaatgtgctggtgggggaggtggacttcctggaccagcccttcatcgcctttgtgcggctcatccagagcgccatgctgggcggcgtgacagaggtgcctgtgcccacccgcttcctgttcatcctgctgggccccagcggccgggccaagagctacaatgagatcggccgggccatcgccaccctgatggtggatgacctcttcagtgatgtggcctacaaggccaggaaccgggaggacctgattgctggcattgatgagttcctggatgaagtcatcgtgctgcccccaggagagtgggaccccaacatcagaattgagccccccaagaaggtgcccagcgctgacaagaggaagtctgtgttcagcctggccgagctgggccagatgaatggatctgtgggcggcggcggcggggcccctgggggcggcaatggaggcggcggcggcggcggcagcggcggcggggccggcagcggcggggccggcggcaccagcagtggagatgatggagagatgcctgccatgcatgagatcggggaggagctgatctggacaggccgcttctttggaggcctgtgcctggacatcaagaggaagctgccctggttccccagcgacttctatgatggcttccacatccagagcatcagcgccatcctcttcatctacctgggctgcatcaccaatgccatcacctttggaggcctgctgggagatgccacagacaactaccagggcgtgatggagagcttcctgggcacagccatggccggcagcctcttctgcctcttcagcggccagcccctcatcatcctgagcagcacaggccccatcctgatctttgagaagctgctgtttgacttcagcaaaggaaatggcctggactacatggagttccggctgtggattggcctgcacagcgctgtgcagtgcctgatcctggtggccacagatgccagcttcatcatcaagtacatcacccgcttcacagaggagggcttcagcaccctcatctccttcatcttcatctatgatgccatcaagaagatgattggagccttcaagtactaccccatcaacatggacttcaagcccaacttcatcaccacctacaagtgtgaatgtgtggccccagacacagtgaacaccaccgtcttcaatgccagcgcccccctggccccagacaccaatgccagcctgtacaacctgctgaacctgacagccctggactggagcctgctgagcaagaaggagtgcctgtcctatggaggccgcctgctgggcaacagctgcaagttcatcccagacctggccctgatgtccttcatcctcttcttcggcacctacagcatgaccctgaccctgaagaagttcaagttcagccgctacttccccaccaaggtgcgggccctggtggccgacttcagcatcgtgttcagcatcctgatgttctgtggcattgatgcctgcttcggcctggagacccccaagctgcacgtgcccagcgtcatcaagcccaccaggccagaccggggctggtttgtggccccctttgggaagaacccctggtgggtgtacccagccagcatcctgcctgccctgctggtgaccatcctgatcttcatggaccagcagatcacagctgtgattgtgaacagaaaagaaaacaagctgaagaaggccgccggctaccacctggacctcttctgggtgggcatcctgatggccctgtgcagcttcatgggcctgccctggtacgtggccgccaccgtcatcagcatcgcccacatcgacagcctgaagatggagacagagaccagcgcccctggagagcagccccagttcctgggcgtgcgggagcagagggtgacaggcatcatcgtgttcatcctgaccggcatctctgtgttcctggcccccatcctgaagtgcatccccctgcctgtgctgtatggagtcttcctgtacatgggcgtggccagcctgaatggcatccagatgggcactggaggcagcgagttcaagatccagaagaagctgacccccttctgggagcgctgcaagctgttcctgatgcctgccaagcaccagcctgaccacgccttcctgcggcacgtgcccctgcggcgcatccacctgttcaccctggtgcagatcctgtgcctggccgtgctgtggatcctgaagagcacagtggccgccatcatcttccctgtgatgagcctgagcaccacagacctgggcctcatcatcgtgcggcggctgctggacttcatcttcagccagcacgacctggcctggattgacaacatcctgcctgagaaggagaagaaggagacagacaagaagaggaagaggaagaagggggcccacgaggactgtgatgaggagccccagtttcctccacccagcgtcatcaagatccccatggagagcgtgcagagcgacccccagaatggcatccactgcatcgccaggaagaggagcagctcctggagctacagcctgtag

SEQ ID NO: 170814 - DNA, 3645 bp, synthetic construct
  misc_feature 1..3645: note = Description of Artificial Sequence: Synthetic coding sequence
  source 1..3645: mol_type = other DNA
atggagcgcttccggctggagaagaagctgcccggcccagatgaggaggccgtggtggacctgggcaagaccagcagcacagtgaacaccaagtttgagaaggaggagctggagagccacagagctgtgtacatcggcgtgcacgtgcccttcagcaaggagagcagaagaagacaccgccaccggggccacaagcaccaccacagaagaaggaaggacaaggagagtgacaaggaggatggccgggagagccccagctatgacacccccagccagagggtgcagttcatcctgggcacagaagatgatgatgaggagcacatcccccatgacctcttcacagagatggatgagctgtgctacagagatggagaggagtatgagtggaaggagacagcccgctggctgaagtttgaggaggatgtggaggatggaggagaccgctggagcaagccctacgtggccaccctgagcctgcacagcctgtttgagctgcggagctgcatcctgaatggaacagtgatgctggacatgagggccagcaccctggatgaaattgctgacatggtgctggacaacatgattgccagcggccagctggatgagagcatccgggagaatgtgcgggaggccctgctgaagaggcaccaccaccagaatgagaagcgcttcaccagccgcatccccctggtgcgcagctttgctgacatcggcaagaagcacagcgacccccacctgctggagagaaatggagagggcctgagcgccagccgccacagcctgaggacaggcctgagcgccagcaacctgagcctgcggggggagagccccctgagcctgctgctgggccacctgctgcccagcagcagagctggcaccccagctggcagccgctgcaccacccctgtgcccaccccccagaacagcccccccagcagccccagcatcagccggctgaccagccgcagcagccaggagagccagaggcaggcccctgagctgctggtgtccccagccagtgatgacatccccaccgtggtgatccaccccccagaggaggacctggaggccgccctgaagggggaggagcagaagaatgaggagaatgtggacctgaccccaggcatcctggccagcccccagagcgcccctggcaacctggacaacagcaagagcggggagatcaagggaaatggcagcggcggcagccgggagaacagcacagtggacttcagcaaggtggacatgaacttcatgaggaagatccccaccggggctgaggccagcaatgtgctggtgggggaggtggacttcctggagcggcccatcatcgcctttgtgcggctggccccagctgtgctgctgaccggcctgacagaggtgcctgtgcccacccgcttcctgttcctgctgctgggccctgctgggaaggccccccagtaccacgagatcggccgcagcatcgccaccctgatgacagatgagatcttccatgatgtggcctacaaggccaaggacagaaatgacctgctgagcggcattgatgagttcctggaccaggtgacagtgctgcccccaggagagtgggaccccagcatcagaattgagccccccaagtctgtgcccagccaggagaagaggaagatccctgtgttccacaacggcagcacccccaccctgggggagacccccaaggaggccgcccaccacgccggccctgagctgcagaggacaggccgcctgtttggaggcctcatcctggacatcaagaggaaggcccccttcttcctgagtgacttcaaggatgccctgagcctgcagtgcctggccagcatcctcttcctgtactgtgcctgcatgagccctgtgatcaccttcggcggcctgctgggggaggccacagagggccgcatcagcgccatcgagagcctgtttggagccagcctgaccggcatcgcctacagcctgtttgctggccagcccctgaccatcctgggcagcacaggccctgtgctggtgtttgagaagatcctgtacaagttctgccgggactaccagctgagctacctgagcctgcggaccagcatcggcctgtggaccagcttcctgtgcatcgtgctggtggccacagatgccagcagcctggtgtgctacatcacccgcttcacagaggaggcctttgctgccctgatctgcatcatcttcatctatgaggccctggagaagctgtttgacctgggggagacctacgccttcaacatgcacaacaacctggacaagctgaccagctacagctgtgtgtgcacagagccccccaaccccagcaatgagaccctggcccagtggaagaaggacaacatcacagcccacaacatctcctggaggaacctgactgtgtctgagtgcaagaagctgcggggcgtcttcctgggcagcgcctgtggccaccacggcccctacatcccagatgtgctcttctggtgtgtgatcctcttcttcaccaccttcttcctgagcagcttcctgaagcagttcaagaccaagcgctacttccccaccaaggtgcgcagcaccatcagtgactttgctgtgttcctgaccatcgtcatcatggtgaccatcgactacctggtgggcgtgcccagccccaagctgcacgtgcctgagaagtttgagcccacccaccctgagcggggctggatcatcagccccctgggggacaacccctggtggaccctgctgattgctgccatcccagccctgctgtgcaccatcctgatcttcatggaccagcagatcacagctgtgatcatcaacaggaaggagcacaagctgaagaagggagctggctaccacctggacctgctgatggtgggcgtgatgctgggcgtgtgcagcgtgatgggcctgccctggtttgtggccgccaccgtgctgagcatcagccacgtgaacagcctgaaggtggagagcgagtgcagcgcccctggagagcagcccaagttcctgggcatccgggagcagagggtgacaggcctgatgatcttcatcctgatgggcctgagcgtcttcatgacctctgtgctgaagttcatccccatgcctgtgctgtatggagtcttcctgtacatgggcgtgagcagcctgaagggcatccagctgtttgaccgcatcaagctgtttggcatgcctgccaagcaccagcctgacctgatctacctgcgctacgtgcccctgtggaaggtgcacatcttcaccgtcatccagctgacctgcctggtgctgctgtgggtgatcaaggtgtctgctgctgctgtggtgttccccatgatggtgctggccctggtgtttgtgaggaagctgatggacctgtgcttcaccaagcgggagctgtcctggctggatgacctgatgcctgagagcaagaagaagaaggaggatgacaagaagaagaaggagaaggaggaggccgagaggatgctgcaggatgatgatgacacagtgcacctgccctttgagggcggcagcctgctgcagatccctgtgaaggccctgaagtacagcccagacaagcctgtgtctgtgaagatcagctttgaagatgagcccaggaagaagtatgtggatgctgagaccagcctgtag

SEQ ID NO: 170815 - DNA, 2403 bp, synthetic construct
  misc_feature 1..2403: note = Description of Artificial Sequence: Synthetic coding sequence
  source 1..2403: mol_type = other DNA
atggaggtggtggaggccgagaagatcgtgctgctgaccagcgcccgcttcctgttcctgctgctgggccctgctgggaaggccccccagtaccacgagatcggccgcagcatcgccaccctgatgacagatgagatcttccatgatgtggcctacaaggccaaggacagaaatgacctgctgagcggcattgatgagttcctggaccaggtgacagtgctgcccccaggagagtgggaccccagcatcagaattgagccccccaagtctgtgcccagccaggagaagaggaagatccctgtgttccacaacggcagcacccccaccctgggggagacccccaaggaggccgcccaccacgccggccctgagctgcagaggacaggccgcctgtttggaggcctcatcctggacatcaagaggaaggcccccttcttcctgagtgacttcaaggatgccctgagcctgcagtgcctggccagcatcctcttcctgtactgtgcctgcatgagccctgtgatcaccttcggcggcctgctgggggaggccacagagggccgcatcagcgccatcgagagcctgtttggagccagcctgaccggcatcgcctacagcctgtttgctggccagcccctgaccatcctgggcagcacaggccctgtgctggtgtttgagaagatcctgtacaagttctgccgggactaccagctgagctacctgagcctgcggaccagcatcggcctgtggaccagcttcctgtgcatcgtgctggtggccacagatgccagcagcctggtgtgctacatcacccgcttcacagaggaggcctttgctgccctgatctgcatcatcttcatctatgaggccctggagaagctgtttgacctgggggagacctacgccttcaacatgcacaacaacctggacaagctgaccagctacagctgtgtgtgcacagagccccccaaccccagcaatgagaccctggcccagtggaagaaggacaacatcacagcccacaacatctcctggaggaacctgactgtgtctgagtgcaagaagctgcggggcgtcttcctgggcagcgcctgtggccaccacggcccctacatcccagatgtgctcttctggtgtgtgatcctcttcttcaccaccttcttcctgagcagcttcctgaagcagttcaagaccaagcgctacttccccaccaaggtgcgcagcaccatcagtgactttgctgtgttcctgaccatcgtcatcatggtgaccatcgactacctggtgggcgtgcccagccccaagctgcacgtgcctgagaagtttgagcccacccaccctgagcggggctggatcatcagccccctgggggacaacccctggtggaccctgctgattgctgccatcccagccctgctgtgcaccatcctgatcttcatggaccagcagatcacagctgtgatcatcaacaggaaggagcacaagctgaagaagggagctggctaccacctggacctgctgatggtgggcgtgatgctgggcgtgtgcagcgtgatgggcctgccctggtttgtggccgccaccgtgctgagcatcagccacgtgaacagcctgaaggtggagagcgagtgcagcgcccctggagagcagcccaagttcctgggcatccgggagcagagggtgacaggcctgatgatcttcatcctgatgggcctgagcgtcttcatgacctctgtgctgaagttcatccccatgcctgtgctgtatggagtcttcctgtacatgggcgtgagcagcctgaagggcatccagctgtttgaccgcatcaagctgtttggcatgcctgccaagcaccagcctgacctgatctacctgcgctacgtgcccctgtggaaggtgcacatcttcaccgtcatccagctgacctgcctggtgctgctgtgggtgatcaaggtgtctgctgctgctgtggtgttccccatgatggtgctggccctggtgtttgtgaggaagctgatggacctgtgcttcaccaagcgggagctgtcctggctggatgacctgatgcctgagagcaagaagaagaaggaggatgacaagaagaagaaggagaaggaggaggccgagaggatgctgcaggatgatgatgacacagtgcacctgccctttgagggcggcagcctgctgcagatccctgtgaaggccctgaagtacagcgtggaccccagcatcgtgaacatcagtgatgagatggccaagacagcccagtggaaggccctgtccatgaacacagaaaatgccaaggtgaccaggagcaacatgagcccagacaagcctgtgtctgtgaagatcagctttgaagatgagcccaggaagaagtatgtggatgctgagaccagcctgtag

SEQ ID NO: 170816 - DNA, 1725 bp, synthetic construct
  misc_feature 1..1725: note = Description of Artificial Sequence: Synthetic coding sequence
  source 1..1725: mol_type = other DNA
atggaggctgatggagctggggagcagatgaggcccctgctgacccggggcccagatgaggaggccgtggtggacctgggcaagaccagcagcacagtgaacaccaagtttgagaaggaggagctggagagccacagagctgtgtacatcggcgtgcacgtgcccttcagcaaggagagcagaagaagacaccgccaccggggccacaagcaccaccacagaagaaggaaggacaaggagagtgacaaggaggatggccgggagagccccagctatgacacccccagccagagggtgcagttcatcctgggcacagaagatgatgatgaggagcacatcccccatgacctcttcacagagatggatgagctgtgctacagagatggagaggagtatgagtggaaggagacagcccgctggctgaagtttgaagaagatgtggaggatggaggagaccgctggagcaagccctacgtggccaccctgagcctgcacagcctgtttgagctgcggagctgcatcctgaatggcaccgtgatgctggacatgagggccagcaccctggatgaaattgctgacatggtgctggacaacatgattgccagcggccagctggatgagagcatcagagaaaatgtgcgggaggccctgctgaagaggcaccaccaccagaatgagaagcgcttcaccagccgcatccccctggtgcgcagctttgctgacatcggggagggcctgagcgccagccgccacagcctgaggacaggcctgagcgccagcaacctgagcctgcggggggagagccccctgagcctgctgctgggccacctgctgcccagcagcagagctggcaccccagctggcagccgctgcaccacccctgtgcccaccccccagaacagcccccccagcagccccagcatcagccggctgaccagccgcagcagccaggagagccagaggcaggcccctgagctgctggtgtccccagccagtgatgacatccccaccgtggtgatccaccccccagaggaggacctggaggccgccctgaagggggaggagcagaagaatgaggagaatgtggacctgaccccaggcatcctggccagcccccagagcgcccctggcaacctggacaacagcaagagcggggagatcaagggaaatggcagcggcggcagccgggagaacagcacagtggacttcagcaaggtggacatgaacttcatgaggaagatccccaccggggctgaggccagcaatgtgctggtgggggaggtggacttcctggagcggcccatcatcgcctttgtgcggctggccccagctgtgctgctgaccggcctgacagaggtgcctgtgcccacccgcttcctgttcctgctgctgggccctgctgggaaggccccccagtaccacgagatcggccgcagcatcgccaccctgatgacagatgagatcttccatgatgtggcctacaaggccaaggacagaaatgacctgctgagcggcattgatgagttcctggaccaggtgacagtgctgcccccaggagagtgggaccccagcatcagaattgagccccccaagtctgtgcccagccaggagaagaggaagatccctgtgttccacaacggcagcacccccaccctgggggagacccccaaggaggccgcccaccacgccggccctgagctgcagaggacaggccgggtgcagtag

SEQ ID NO: 170817 - DNA, 3273 bp, synthetic construct
  misc_feature 1..3273: note = Description of Artificial Sequence: Synthetic coding sequence
  source 1..3273: mol_type = other DNA
atggagcgcttccggctggagaagaagctgcccggcccagatgaggaggccgtggtggacctgggcaagaccagcagcacagtgaacaccaagtttgagaaggaggagctggagagccacagagctgtgtacatcggcgtgcacgtgcccttcagcaaggagagcagaagaagacaccgccaccggggccacaagcaccaccacagaagaaggaaggacaaggagagtgacaaggaggatggccgggagagccccagctatgacacccccagccagagggtgcagttcatcctgggcacagaagatgatgatgaggagcacatcccccatgacctcttcacagagatggatgagctgtgctacagagatggagaggagtatgagtggaaggagacagcccgctggctgaagtttgaggaggatgtggaggatggaggagaccgctggagcaagccctacgtggccaccctgagcctgcacagcctgtttgagctgcggagctgcatcctgaatggaacagtgatgctggacatgagggccagcaccctggatgaaattgctgacatggtgctggacaacatgattgccagcggccagctggatgagagcatccgggagaatgtgcgggaggccctgctgaagaggcaccaccaccagaatgagaagcgcttcaccagccgcatccccctggtgcgcagctttgctgacatcggcaagaagcacagcgacccccacctgctggagagaaatggcatcctggccagcccccagagcgcccctggcaacctggacaacagcaagagcggggagatcaagggaaatggcagcggcggcagccgggagaacagcacagtggacttcagcaaggtggacatgaacttcatgaggaagatccccaccggggctgaggccagcaatgtgctggtgggggaggtggacttcctggagcggcccatcatcgcctttgtgcggctggccccagctgtgctgctgaccggcctgacagaggtgcctgtgcccacccgcttcctgttcctgctgctgggccctgctgggaaggccccccagtaccacgagatcggccgcagcatcgccaccctgatgacagatgagatcttccatgatgtggcctacaaggccaaggacagaaatgacctgctgagcggcattgatgagttcctggaccaggtgacagtgctgcccccaggagagtgggaccccagcatcagaattgagccccccaagtctgtgcccagccaggagaagaggaagatccctgtgttccacaacggcagcacccccaccctgggggagacccccaaggaggccgcccaccacgccggccctgagctgcagaggacaggccgcctgtttggaggcctcatcctggacatcaagaggaaggcccccttcttcctgagtgacttcaaggatgccctgagcctgcagtgcctggccagcatcctcttcctgtactgtgcctgcatgagccctgtgatcaccttcggcggcctgctgggggaggccacagagggccgcatcagcgccatcgagagcctgtttggagccagcctgaccggcatcgcctacagcctgtttgctggccagcccctgaccatcctgggcagcacaggccctgtgctggtgtttgagaagatcctgtacaagttctgccgggactaccagctgagctacctgagcctgcggaccagcatcggcctgtggaccagcttcctgtgcatcgtgctggtggccacagatgccagcagcctggtgtgctacatcacccgcttcacagaggaggcctttgctgccctgatctgcatcatcttcatctatgaggccctggagaagctgtttgacctgggggagacctacgccttcaacatgcacaacaacctggacaagctgaccagctacagctgtgtgtgcacagagccccccaaccccagcaatgagaccctggcccagtggaagaaggacaacatcacagcccacaacatctcctggaggaacctgactgtgtctgagtgcaagaagctgcggggcgtcttcctgggcagcgcctgtggccaccacggcccctacatcccagatgtgctcttctggtgtgtgatcctcttcttcaccaccttcttcctgagcagcttcctgaagcagttcaagaccaagcgctacttccccaccaaggtgcgcagcaccatcagtgactttgctgtgttcctgaccatcgtcatcatggtgaccatcgactacctggtgggcgtgcccagccccaagctgcacgtgcctgagaagtttgagcccacccaccctgagcggggctggatcatcagccccctgggggacaacccctggtggaccctgctgattgctgccatcccagccctgctgtgcaccatcctgatcttcatggaccagcagatcacagctgtgatcatcaacaggaaggagcacaagctgaagaagggagctggctaccacctggacctgctgatggtgggcgtgatgctgggcgtgtgcagcgtgatgggcctgccctggtttgtggccgccaccgtgctgagcatcagccacgtgaacagcctgaaggtggagagcgagtgcagcgcccctggagagcagcccaagttcctgggcatccgggagcagagggtgacaggcctgatgatcttcatcctgatgggcctgagcgtcttcatgacctctgtgctgaagttcatccccatgcctgtgctgtatggagtcttcctgtacatgggcgtgagcagcctgaagggcatccagctgtttgaccgcatcaagctgtttggcatgcctgccaagcaccagcctgacctgatctacctgcgctacgtgcccctgtggaaggtgcacatcttcaccgtcatccagctgacctgcctggtgctgctgtgggtgatcaaggtgtctgctgctgctgtggtgttccccatgatggtgctggccctggtgtttgtgaggaagctgatggacctgtgcttcaccaagcgggagctgtcctggctggatgacctgatgcctgagagcaagaagaagaaggaggatgacaagaagaagaaggagaaggaggaggccgagaggatgctgcaggatgatgatgacacagtgcacctgccctttgagggcggcagcctgctgcagatccctgtgaaggccctgaagtacagcccagacaagcctgtgtctgtgaagatcagctttgaagatgagcccaggaagaagtatgtggatgctgagaccagcctgtag

SEQ ID NO: 170818 - DNA, 3408 bp, synthetic construct
  misc_feature 1..3408: note = Description of Artificial Sequence: Synthetic coding sequence
  source 1..3408: mol_type = other DNA
atggaggctgatggagctggggagcagatgaggcccctgctgaccagggtgaccagccggggcccagatgaggaggccgtggtggacctgggcaagaccagcagcacagtgaacaccaagtttgagaaggaggagctggagagccacagagctgtgtacatcggcgtgcacgtgcccttcagcaaggagagcagaagaagacaccgccaccggggccacaagcaccaccacagaagaaggaaggacaaggagagtgacaaggaggatggccgggagagccccagctatgacacccccagccagagggtgcagttcatcctgggcacagaagatgatgatgaggagcacatcccccatgacctcttcacagagatggatgagctgtgctacagagatggagaggagtatgagtggaaggagacagcccgctggctgaagtttgaagaagatgtggaggatggaggagaccgctggagcaagccctacgtggccaccctgagcctgcacagcctgtttgagctgcggagctgcatcctgaatggcaccgtgatgctggacatgagggccagcaccctggatgaaattgctgacatggtgctggacaacatgattgccagcggccagctggatgagagcatcagagaaaatgtgcgggaggccctgctgaagaggcaccaccaccagaatgagaagcgcttcaccagccgcatccccctggtgcgcagctttgctgacatcggcaagaagcacagcgacccccacctgctggagagaaatggcatcctggccagcccccagagcgcccctggcaacctggacaacagcaagtctggagagatcaagggaaatggaagtggcggcagccgggagaacagcacagtggacttcagcaaggtggacatgaacttcatgaggaagatccccactggagctgaggccagcaatgtgctggtgggggaggtggacttcctggagcggcccatcatcgcctttgtgcggctggccccagctgtgctgctgaccggcctgacagaggtgcctgtgcccacccgcttcctgttcctgctgctgggccctgctgggaaggccccccagtaccatgaaattggccgcagcatcgccaccctgatgacagatgagatcttccatgatgtggcctacaaggccaaggacagaaatgacctgctgtctggaattgatgagttcctggaccaggtgacagtgctgcccccaggagagtgggaccccagcatccgcatcgagccccccaagtctgtgcccagccaggagaagaggaagatccctgtgttccacaacggcagcacccccaccctgggggagacccccaaggaggccgcccaccacgccggccctgagctgcagaggacaggccgcctgtttggaggcctcatcctggacatcaagaggaaggcccccttcttcctgagtgacttcaaggatgccctgagcctgcagtgcctggccagcatcctcttcctgtactgtgcctgcatgagccctgtgatcacctttggaggcctgctgggggaggccacagagggccgcatcagcgccatcgagagcctgtttggagccagcctgactggaattgcctacagcctgtttgctggccagcccctgaccatcctgggcagcactggacctgtgctggtgtttgagaagatcctgtacaagttctgccgggactaccagctgagctacctgagcctgcggaccagcatcggcctgtggaccagcttcctgtgcatcgtgctggtggccacagatgccagcagcctggtgtgctacatcacccgcttcacagaggaggcctttgctgccctgatctgcatcatcttcatctatgaggccctggagaagctgtttgacctgggggagacctacgccttcaacatgcacaacaacctggacaagctgaccagctacagctgtgtgtgcacagagccccccaaccccagcaatgagaccctggcccagtggaagaaggacaacatcacagcccacaacatctcctggaggaacctgactgtgtctgagtgcaagaagctgcggggcgtcttcctgggcagcgcctgtggccaccacggcccctacatcccagatgtgctcttctggtgtgtgatcctcttcttcaccaccttcttcctgagcagcttcctgaagcagttcaagaccaagcgctacttccccaccaaggtgcgcagcaccatcagtgactttgctgtgttcctgaccatcgtcatcatggtgaccatcgactacctggtgggcgtgcccagccccaagctgcacgtgcctgagaagtttgagcccacccaccctgagcggggctggatcatcagccccctgggggacaacccctggtggaccctgctgattgctgccatcccagccctgctgtgcaccatcctgatcttcatggaccagcagatcacagctgtgatcatcaacaggaaggagcacaagctgaagaagggggccggctaccacctggacctgctgatggtgggcgtgatgctgggcgtgtgcagcgtgatgggcctgccctggtttgtggccgccaccgtgctgagcatcagccacgtgaacagcctgaaggtggagagtgaatgttctgcccctggagagcagcccaagttcctgggcatccgggagcagagggtgacaggcctgatgatcttcatcctgatgggcctgtctgtgttcatgacctctgtgctgaagttcatccccatgcctgtgctgtatggagtcttcctgtacatgggcgtgagcagcctgaagggcatccagctgtttgaccgcatcaagctgtttggcatgcctgccaagcaccagcctgacctgatctacctgcgctacgtgcccctgtggaaggtgcacatcttcaccgtcatccagctgacctgcctggtgctgctgtgggtgatcaaggtgtctgctgctgctgtggtgttccccatgatggtgctggccctggtgtttgtgaggaagctgatggacctgtgcttcaccaagcgggagctgtcctggctggatgacctgatgcctgagagcaagaagaagaaggaggatgacaagaagaagaaggagaaggaggaggccgagaggatgctgcaggatgatgatgacacagtgcacctgccctttgaaggaggcagcctgctgcagatccctgtgaaggccctgaagtacagcgtggaccccagcatcgtgaacatcagtgatgagatggccaagacagcccagtggaaggccctgtccatgaacacagaaaatgccaaggtgaccaggagcaacatgagcccagacaagcctgtgtctgtgaagatcagctttgaagatgagcccaggaagaagtatgtggatgctgagaccagcctgtag

SEQ ID NO: 170819 - DNA, 3288 bp, synthetic construct
  misc_feature 1..3288: note = Description of Artificial Sequence: Synthetic coding sequence
  source 1..3288: mol_type = other DNA
atggaggctgatggagctggggagcagatgaggcccctgctgacccggggcccagatgaggaggccgtggtggacctgggcaagaccagcagcacagtgaacaccaagtttgagaaggaggagctggagagccacagagctgtgtacatcggcgtgcacgtgcccttcagcaaggagagcagaagaagacaccgccaccggggccacaagcaccaccacagaagaaggaaggacaaggagagtgacaaggaggatggccgggagagccccagctatgacacccccagccagagggtgcagttcatcctgggcacagaagatgatgatgaggagcacatcccccatgacctcttcacagagatggatgagctgtgctacagagatggagaggagtatgagtggaaggagacagcccgctggctgaagtttgaagaagatgtggaggatggaggagaccgctggagcaagccctacgtggccaccctgagcctgcacagcctgtttgagctgcggagctgcatcctgaatggcaccgtgatgctggacatgagggccagcaccctggatgaaattgctgacatggtgctggacaacatgattgccagcggccagctggatgagagcatcagagaaaatgtgcgggaggccctgctgaagaggcaccaccaccagaatgagaagcgcttcaccagccgcatccccctggtgcgcagctttgctgacatcggcaagaagcacagcgacccccacctgctggagagaaatggcatcctggccagcccccagagcgcccctggcaacctggacaacagcaagtctggagagatcaagggaaatggaagtggcggcagccgggagaacagcacagtggacttcagcaaggtggacatgaacttcatgaggaagatccccactggagctgaggccagcaatgtgctggtgggggaggtggacttcctggagcggcccatcatcgcctttgtgcggctggccccagctgtgctgctgaccggcctgacagaggtgcctgtgcccacccgcttcctgttcctgctgctgggccctgctgggaaggccccccagtaccatgaaattggccgcagcatcgccaccctgatgacagatgagatcttccatgatgtggcctacaaggccaaggacagaaatgacctgctgtctggaattgatgagttcctggaccaggtgacagtgctgcccccaggagagtgggaccccagcatccgcatcgagccccccaagtctgtgcccagccaggagaagaggaagatccctgtgttccacaacggcagcacccccaccctgggggagacccccaaggaggccgcccaccacgccggccctgagctgcagaggacaggccgcctgtttggaggcctcatcctggacatcaagaggaaggcccccttcttcctgagtgacttcaaggatgccctgagcctgcagtgcctggccagcatcctcttcctgtactgtgcctgcatgagccctgtgatcacctttggaggcctgctgggggaggccacagagggccgcatcagcgccatcgagagcctgtttggagccagcctgactggaattgcctacagcctgtttgctggccagcccctgaccatcctgggcagcactggacctgtgctggtgtttgagaagatcctgtacaagttctgccgggactaccagctgagctacctgagcctgcggaccagcatcggcctgtggaccagcttcctgtgcatcgtgctggtggccacagatgccagcagcctggtgtgctacatcacccgcttcacagaggaggcctttgctgccctgatctgcatcatcttcatctatgaggccctggagaagctgtttgacctgggggagacctacgccttcaacatgcacaacaacctggacaagctgaccagctacagctgtgtgtgcacagagccccccaaccccagcaatgagaccctggcccagtggaagaaggacaacatcacagcccacaacatctcctggaggaacctgactgtgtctgagtgcaagaagctgcggggcgtcttcctgggcagcgcctgtggccaccacggcccctacatcccagatgtgctcttctggtgtgtgatcctcttcttcaccaccttcttcctgagcagcttcctgaagcagttcaagaccaagcgctacttccccaccaaggtgcgcagcaccatcagtgactttgctgtgttcctgaccatcgtcatcatggtgaccatcgactacctggtgggcgtgcccagccccaagctgcacgtgcctgagaagtttgagcccacccaccctgagcggggctggatcatcagccccctgggggacaacccctggtggaccctgctgattgctgccatcccagccctgctgtgcaccatcctgatcttcatggaccagcagatcacagctgtgatcatcaacaggaaggagcacaagctgaagaagggggccggctaccacctggacctgctgatggtgggcgtgatgctgggcgtgtgcagcgtgatgggcctgccctggtttgtggccgccaccgtgctgagcatcagccacgtgaacagcctgaaggtggagagtgaatgttctgcccctggagagcagcccaagttcctgggcatccgggagcagagggtgacaggcctgatgatcttcatcctgatgggcctgtctgtgttcatgacctctgtgctgaagttcatccccatgcctgtgctgtatggagtcttcctgtacatgggcgtgagcagcctgaagggcatccagctgtttgaccgcatcaagctgtttggcatgcctgccaagcaccagcctgacctgatctacctgcgctacgtgcccctgtggaaggtgcacatcttcaccgtcatccagctgacctgcctggtgctgctgtgggtgatcaaggtgtctgctgctgctgtggtgttccccatgatggtgctggccctggtgtttgtgaggaagctgatggacctgtgcttcaccaagcgggagctgtcctggctggatgacctgatgcctgagagcaagaagaagaaggaggatgacaagaagaagaaggagaaggaggaggccgagaggatgctgcaggatgatgatgacacagtgcacctgccctttgaaggaggcagcctgctgcagatccctgtgaaggccctgaagtacagcccagacaagcctgtgtctgtgaagatcagctttgaagatgagcccaggaagaagtatgtggatgctgagaccagcctgtag

SEQ ID NO: 170820 - DNA, 1392 bp, synthetic construct
  misc_feature 1..1392: note = Description of Artificial Sequence: Synthetic coding sequence
  source 1..1392: mol_type = other DNA
atggaggctgatggagctggggagcagatgaggcccctgctgacccggggcccagatgaggaggccgtggtggacctgggcaagaccagcagcacagtgaacaccaagtttgagaaggaggagctggagagccacagagctgtgtacatcggcgtgcacgtgcccttcagcaaggagagcagaagaagacaccgccaccggggccacaagcaccaccacagaagaaggaaggacaaggagagtgacaaggaggatggccgggagagccccagctatgacacccccagccagagggtgcagttcatcctgggcacagaagatgatgatgaggagcacatcccccatgacctcttcacagagatggatgagctgtgctacagagatggagaggagtatgagtggaaggagacagcccgctggctgaagtttgaagaagatgtggaggatggaggagaccgctggagcaagccctacgtggccaccctgagcctgcacagcctgtttgagctgcggagctgcatcctgaatggcaccgtgatgctggacatgagggccagcaccctggatgaaattgctgacatggtgctggacaacatgattgccagcggccagctggatgagagcatcagagaaaatgtgcgggaggccctgctgaagaggcaccaccaccagaatgagaagcgcttcaccagccgcatccccctggtgcgcagctttgctgacatcggcaagaagcacagcgacccccacctgctggagagaaatggcatcctggccagcccccagagcgcccctggcaacctggacaacagcaagtctggagagatcaagggaaatggaagtggcggcagccgggagaacagcacagtggacttcagcaaggtggacatgaacttcatgaggaagatccccactggagctgaggccagcaatgtgctggtgggggaggtggacttcctggagcggcccatcatcgcctttgtgcggctggccccagctgtgctgctgaccggcctgacagaggtgcctgtgcccacccgcttcctgttcctgctgctgggccctgctgggaaggccccccagtaccatgaaattggccgcagcatcgccaccctgatgacagatgagatcttccatgatgtggcctacaaggccaaggacagaaatgacctgctgtctggaattgatgagttcctggaccaggtgacagtgctgcccccaggagagtgggaccccagcatccgcatcgagccccccaagtctgtgcccagccaggagaagaggaagatccctgtgttccacaacggcagcacccccaccctgggggagacccccaaggaggccgcccaccacgccggccctgagctgcagaggacaggccgggtgcagtag

SEQ ID NO: 170821 - DNA, 1725 bp, synthetic construct; identical to SEQ ID NO: 170816
  misc_feature 1..1725: note = Description of Artificial Sequence: Synthetic coding sequence
  source 1..1725: mol_type = other DNA

SEQ ID NO: 170822 - DNA, 3741 bp, synthetic construct
  misc_feature 1..3741: note = Description of Artificial Sequence: Synthetic coding sequence
  source 1..3741: mol_type = other DNA
atggaggctgatggagctggggagcagatgaggcccctgctgaccagggtgaccagccggggcccagatgaggaggccgtggtggacctgggcaagaccagcagcacagtgaacaccaagtttgagaaggaggagctggagagccacagagctgtgtacatcggcgtgcacgtgcccttcagcaaggagagcagaagaagacaccgccaccggggccacaagcaccaccacagaagaaggaaggacaaggagagtgacaaggaggatggccgggagagccccagctatgacacccccagccagagggtgcagttcatcctgggcacagaagatgatgatgaggagcacatcccccatgacctcttcacagagatggatgagctgtgctacagagatggagaggagtatgagtggaaggagacagcccgctggctgaagtttgaagaagatgtggaggatggaggagaccgctggagcaagccctacgtggccaccctgagcctgcacagcctgtttgagctgcggagctgcatcctgaatggcaccgtgatgctggacatgagggccagcaccctggatgaaattgctgacatggtgctggacaacatgattgccagcggccagctggatgagagcatcagagaaaatgtgcgggaggccctgctgaagaggcaccaccaccagaatgagaagcgcttcaccagccgcatccccctggtgcgcagctttgctgacatcggggagggcctgagcgccagccgccacagcctgaggacaggcctgagcgccagcaacctgagcctgcggggggagagccccctgagcctgctgctgggccacctgctgcccagcagcagagctggcaccccagctggcagccgctgcaccacccctgtgcccaccccccagaacagcccccccagcagccccagcatcagccggctgaccagccgcagcagccaggagagccagaggcaggcccctgagctgctggtgtccccagccagtgatgacatccccaccgtggtgatccaccccccagaggaggacctggaggccgccctgaagggggaggagcagaagaatgaggagaatgtggacctgaccccaggcatcctggccagcccccagagcgcccctggcaacctggacaacagcaagagcggggagatcaagggaaatggcagcggcggcagccgggagaacagcacagtggacttcagcaaggtggacatgaacttcatgaggaagatccccaccggggctgaggccagcaatgtgctggtgggggaggtggacttcctggagcggcccatcatcgcctttgtgcggctggccccagctgtgctgctgaccggcctgacagaggtgcctgtgcccacccgcttcctgttcctgctgctgggccctgctgggaaggccccccagtaccacgagatcggccgcagcatcgccaccctgatgacagatgagatcttccatgatgtggcctacaaggccaaggacagaaatgacctgctgagcggcattgatgagttcctggaccaggtgacagtgctgcccccaggagagtgggaccccagcatcagaattgagccccccaagtctgtgcccagccaggagaagaggaagatccctgtgttccacaacggcagcacccccaccctgggggagacccccaaggaggccgcccaccacgccggccctgagctgcagaggacaggccgcctgtttggaggcctcatcctggacatcaagaggaaggcccccttcttcctgagtgacttcaaggatgccctgagcctgcagtgcctggccagcatcctcttcctgtactgtgcctgcatgagccctgtgatcaccttcggcggcctgctgggggaggccacagagggccgcatcagcgccatcgagagcctgtttggagccagcctgaccggcatcgcctacagcctgtttgctggccagcccctgaccatcctgggcagcacaggccctgtgctggtgtttgagaagatcctgtacaagttctgccgggactaccagctgagctacctgagcctgcggaccagcatcggcctgtggaccagcttcctgtgcatcgtgctggtggccacagatgccagcagcctggtgtgctacatcacccgcttcacagaggaggcctttgctgccctgatctgcatcatcttcatctatgaggccctggagaagctgtttgacctgggggagacctacgccttcaacatgcacaacaacctggacaagctgaccagctacagctgtgtgtgcacagagccccccaaccccagcaatgagaccctggcccagtggaagaaggacaacatcacagcccacaacatctcctggaggaacctgactgtgtctgagtgcaagaagctgcggggcgtcttcctgggcagcgcctgtggccaccacggcccctacatcccagatgtgctcttctggtgtgtgatcctcttcttcaccaccttcttcctgagcagcttcctgaagcagttcaagaccaagcgctacttccccaccaaggtgcgcagcaccatcagtgactttgctgtgttcctgaccatcgtcatcatggtgaccatcgactacctggtgggcgtgcccagccccaagctgcacgtgcctgagaagtttgagcccacccaccctgagcggggctggatcatcagccccctgggggacaacccctggtggaccctgctgattgctgccatcccagccctgctgtgcaccatcctgatcttcatggaccagcagatcacagctgtgatcatcaacaggaaggagcacaagctgaagaagggagctggctaccacctggacctgctgatggtgggcgtgatgctgggcgtgtgcagcgtgatgggcctgccctggtttgtggccgccaccgtgctgagcatcagccacgtgaacagcctgaaggtggagagcgagtgcagcgcccctggagagcagcccaagttcctgggcatccgggagcagagggtgacaggcctgatgatcttcatcctgatgggcctgagcgtcttcatgacctctgtgctgaagttcatccccatgcctgtgctgtatggagtcttcctgtacatgggcgtgagcagcctgaagggcatccagctgtttgaccgcatcaagctgtttggcatgcctgccaagcaccagcctgacctgatctacctgcgctacgtgcccctgtggaaggtgcacatcttcaccgtcatccagctgacctgcctggtgctgctgtgggtgatcaaggtgtctgctgctgctgtggtgttccccatgatggtgctggccctggtgtttgtgaggaagctgatggacctgtgcttcaccaagcgggagctgtcctggctggatgacctgatgcctgagagcaagaagaagaaggaggatgacaagaagaagaaggagaaggaggaggccgagaggatgctgcaggatgatgatgacacagtgcacctgccctttgagggcggcagcctgctgcagatccctgtgaaggccctgaagtacagcgtggaccccagcatcgtgaacatcagtgatgagatggccaagacagcccagtggaaggccctgtccatgaacacagaaaatgccaaggtgaccaggagcaacatgagcccagacaagcctgtgtctgtgaagatcagctttgaagatgagcccaggaagaagtatgtggatgctgagaccagcctgtag

SEQ ID NO: 170823 - DNA, 3780 bp, synthetic construct
  misc_feature 1..3780: note = Description of Artificial Sequence: Synthetic coding sequence
  source 1..3780: mol_type = other DNA
atggaggctgatggagctggggagcagatgaggcccctgctgaccagggtgaccagccggggcccagatgaggaggccgtggtggacctgggcaagaccagcagcacagtgaacaccaagtttgagaaggaggagctggagagccacagagctgtgtacatcggcgtgcacgtgcccttcagcaaggagagcagaagaagacaccgccaccggggccacaagcaccaccacagaagaaggaaggacaaggagagtgacaaggaggatggccgggagagccccagctatgacacccccagccagagggtgcagttcatcctgggcacagaagatgatgatgaggagcacatcccccatgacctcttcacagagatggatgagctgtgctacagagatggagaggagtatgagtggaaggagacagcccgctggctgaagtttgaagaagatgtggaggatggaggagaccgctggagcaagccctacgtggccaccctgagcctgcacagcctgtttgagctgcggagctgcatcctgaatggcaccgtgatgctggacatgagggccagcaccctggatgaaattgctgacatggtgctggacaacatgattgccagcggccagctggatgagagcatcagagaaaatgtgcgggaggccctgctgaagaggcaccaccaccagaatgagaagcgcttcaccagccgcatccccctggtgcgcagctttgctgacatcggcaagaagcacagcgacccccacctgctggagagaaatggagagggcctgagcgccagccgccacagcctgaggacaggcctgagcgccagcaacctgagcctgcggggggagagccccctgagcctgctgctgggccacctgctgcccagcagccgggccggcaccccagctggcagccgctgcaccacccctgtgcccaccccccagaacagcccccccagcagccccagcatcagccggctgaccagccgcagcagccaggagagccagaggcaggcccctgagctgctggtgtccccagccagtgatgacatccccaccgtggtgatccaccccccagaggaggacctggaggccgccctgaagggggaggagcagaagaatgaagaaaatgtggacctgaccccaggcatcctggccagcccccagagcgcccctggcaacctggacaacagcaagtctggagagatcaagggaaatggaagtggcggcagccgggagaacagcacagtggacttcagcaaggtggacatgaacttcatgaggaagatccccactggagctgaggccagcaatgtgctggtgggggaggtggacttcctggagcggcccatcatcgcctttgtgcggctggccccagctgtgctgctgaccggcctgacagaggtgcctgtgcccacccgcttcctgttcctgctgctgggccctgctgggaaggccccccagtaccatgaaattggccgcagcatcgccaccctgatgacagatgagatcttccatgatgtggcctacaaggccaaggacagaaatgacctgctgtctggaattgatgagttcctggaccaggtgacagtgctgcccccaggagagtgggaccccagcatccgcatcgagccccccaagtctgtgcccagccaggagaagaggaagatccctgtgttccacaacggcagcacccccaccctgggggagacccccaaggaggccgcccaccacgccggccctgagctgcagaggacaggccgcctgtttggaggcctcatcctggacatcaagaggaaggcccccttcttcctgagtgacttcaaggatgccctgagcctgcagtgcctggccagcatcctcttcctgtactgtgcctgcatgagccctgtgatcacctttggaggcctgctgggggaggccacagagggccgcatcagcgccatcgagagcctgtttggagccagcctgactggaattgcctacagcctgtttgctggccagcccctgaccatcctgggcagcactggacctgtgctggtgtttgagaagatcctgtacaagttctgccgggactaccagctgagctacctgagcctgcggaccagcatcggcctgtggaccagcttcctgtgcatcgtgctggtggccacagatgccagcagcctggtgtgctacatcacccgcttcacagaggaggcctttgctgccctgatctgcatcatcttcatctatgaggccctggagaagctgtttgacctgggggagacctacgccttcaacatgcacaacaacctggacaagctgaccagctacagctgtgtgtgcacagagccccccaaccccagcaatgagaccctggcccagtggaagaaggacaacatcacagcccacaacatctcctggaggaacctgactgtgtctgagtgcaagaagctgcggggcgtcttcctgggcagcgcctgtggccaccacggcccctacatcccagatgtgctcttctggtgtgtgatcctcttcttcaccaccttcttcctgagcagcttcctgaagcagttcaagaccaagcgctacttccccaccaaggtgcgcagcaccatcagtgactttgctgtgttcctgaccatcgtcatcatggtgaccatcgactacctggtgggcgtgcccagccccaagctgcacgtgcctgagaagtttgagcccacccaccctgagcggggctggatcatcagccccctgggggacaacccctggtggaccctgctgattgctgccatcccagccctgctgtgcaccatcctgatcttcatggaccagcagatcacagctgtgatcatcaacaggaaggagcacaagctgaagaagggggccggctaccacctggacctgctgatggtgggcgtgatgctgggcgtgtgcagcgtgatgggcctgccctggtttgtggccgccaccgtgctgagcatcagccacgtgaacagcctgaaggtggagagtgaatgttctgcccctggagagcagcccaagttcctgggcatccgggagcagagggtgacaggcctgatgatcttcatcctgatgggcctgtctgtgttcatgacctctgtgctgaagttcatccccatgcctgtgctgtatggagtcttcctgtacatgggcgtgagcagcctgaagggcatccagctgtttgaccgcatcaagctgtttggcatgcctgccaagcaccagcctgacctgatctacctgcgctacgtgcccctgtggaaggtgcacatcttcaccgtcatccagctgacctgcctggtgctgctgtgggtgatcaaggtgtctgctgctgctgtggtgttccccatgatggtgctggccctggtgtttgtgaggaagctgatggacctgtgcttcaccaagcgggagctgtcctggctggatgacctgatgcctgagagcaagaagaagaaggaggatgacaagaagaagaaggagaaggaggaggccgagaggatgctgcaggatgatgatgacacagtgcacctgccctttgaaggaggcagcctgctgcagatccctgtgaaggccctgaagtacagcgtggaccccagcatcgtgaacatcagtgatgagatggccaagacagcccagtggaaggccctgtccatgaacacagaaaatgccaaggtgaccaggagcaacatgagcccagacaagcctgtgtctgtgaagatcagctttgaagatgagcccaggaagaagtatgtggatgctgagaccagcctgtag

SEQ ID NO: 170824 - DNA, 3396 bp, synthetic construct
  misc_feature 1..3396: note = Description of Artificial Sequence: Synthetic coding sequence
  source 1..3396: mol_type = other DNA
atggaggctgatggagctggggagcagatgaggcccctgctgacccggggcccagatgaggaggccgtggtggacctgggcaagaccagcagcacagtgaacaccaagtttgagaaggaggagctggagagccacagagctgtgtacatcggcgtgcacgtgcccttcagcaaggagagcagaagaagacaccgccaccggggccacaagcaccaccacagaagaaggaaggacaaggagagtgacaaggaggatggccgggagagccccagctatgacacccccagccagagggtgcagttcatcctgggcacagaagatgatgatgaggagcacatcccccatgacctcttcacagagatggatgagctgtgctacagagatggagaggagtatgagtggaaggagacagcccgctggctgaagtttgaagaagatgtggaggatggaggagaccgctggagcaagccctacgtggccaccctgagcctgcacagcctgtttgagctgcggagctgcatcctgaatggcaccgtgatgctggacatgagggccagcaccctggatgaaattgctgacatggtgctggacaacatgattgccagcggccagctggatgagagcatcagagaaaatgtgcgggaggccctgctgaagaggcaccaccaccagaatgagaagcgcttcaccagccgcatccccctggtgcgcagctttgctgacatcggcaagaagcacagcgacccccacctgctggagagaaatggcatcctggccagcccccagagcgcccctggcaacctggacaacagcaagtctggagagatcaagggaaatggaagtggcggcagccgggagaacagcacagtggacttcagcaaggtggacatgaacttcatgaggaagatccccactggagctgaggccagcaatgtgctggtgggggaggtggacttcctggagcggcccatcatcgcctttgtgcggctggccccagctgtgctgctgaccggcctgacagaggtgcctgtgcccacccgcttcctgttcctgctgctgggccctgctgggaaggccccccagtaccatgaaattggccgcagcatcgccaccctgatgacagatgagatcttccatgatgtggcctacaaggccaaggacagaaatgacctgctgtctggaattgatgagttcctggaccaggtgacagtgctgcccccaggagagtgggaccccagcatccgcatcgagccccccaagtctgtgcccagccaggagaagaggaagatccctgtgttccacaacggcagcacccccaccctgggggagacccccaaggaggccgcccaccacgccggccctgagctgcagaggacaggccgcctgtttggaggcctcatcctggacatcaagaggaaggcccccttcttcctgagtgacttcaaggatgccctgagcctgcagtgcctggccagcatcctcttcctgtactgtgcctgcatgagccctgtgatcacctttggaggcctgctgggggaggccacagagggccgcatcagcgccatcgagagcctgtttggagccagcctgactggaattgcctacagcctgtttgctggccagcccctgaccatcctgggcagcactggacctgtgctggtgtttgagaagatcctgtacaagttctgccgggactaccagctgagctacctgagcctgcggaccagcatcggcctgtggaccagcttcctgtgcatcgtgctggtggccacagatgccagcagcctggtgtgctacatcacccgcttcacagaggaggcctttgctgccctgatctgcatcatcttcatctatgaggccctggagaagctgtttgacctgggggagacctacgccttcaacatgcacaacaacctggacaagctgaccagctacagctgtgtgtgcacagagccccccaaccccagcaatgagaccctggcccagtggaagaaggacaacatcacagcccacaacatctcctggaggaacctgactgtgtctgagtgcaagaagctgcggggcgtcttcctgggcagcgcctgtggccaccacggcccctacatcccagatgtgctcttctggtgtgtgatcctcttcttcaccaccttcttcctgagcagcttcctgaagcagttcaagaccaagcgctacttccccaccaaggtgcgcagcaccatcagtgactttgctgtgttcctgaccatcgtcatcatggtgaccatcgactacctggtgggcgtgcccagccccaagctgcacgtgcctgagaagtttgagcccacccaccctgagcggggctggatcatcagccccctgggggacaacccctggtggaccctgctgattgctgccatcccagccctgctgtgcaccatcctgatcttcatggaccagcagatcacagctgtgatcatcaacaggaaggagcacaagctgaagaagggggccggctaccacctggacctgctgatggtgggcgtgatgctgggcgtgtgcagcgtgatgggcctgccctggtttgtggccgccaccgtgctgagcatcagccacgtgaacagcctgaaggtggagagtgaatgttctgcccctggagagcagcccaagttcctgggcatccgggagcagagggtgacaggcctgatgatcttcatcctgatgggcctgtctgtgttcatgacctctgtgctgaagttcatccccatgcctgtgctgtatggagtcttcctgtacatgggcgtgagcagcctgaagggcatccagctgtttgaccgcatcaagctgtttggcatgcctgccaagcaccagcctgacctgatctacctgcgctacgtgcccctgtggaaggtgcacatcttcaccgtcatccagctgacctgcctggtgctgctgtgggtgatcaaggtgtctgctgctgctgtggtgttccccatgatggtgctggccctggtgtttgtgaggaagctgatggacctgtgcttcaccaagcgggagctgtcctggctggatgacctgatgcctgagagcaagaagaagaaggaggatgacaagaagaagaaggagaaggaggaggccgagaggatgctgcaggatgatgatgacacagtgcacctgccctttgaaggaggcagcctgctgcagatccctgtgaaggccctgaagtacagcgtggaccccagcatcgtgaacatcagtgatgagatggccaagacagcccagtggaaggccctgtccatgaacacagaaaatgccaaggtgaccaggagcaacatgagcccagacaagcctgtgtctgtgaagatcagctttgaagatgagcccaggaagaagtatgtggatgctgagaccagcctgtag

SEQ ID NO: 170825 - DNA, 1392 bp, synthetic construct; identical to SEQ ID NO: 170820
  misc_feature 1..1392: note = Description of Artificial Sequence: Synthetic coding sequence
  source 1..1392: mol_type = other DNA

SEQ ID NO: 170826 - DNA, 3135 bp, synthetic construct; identical to SEQ ID NO: 170788
  misc_feature 1..3135: note = Description of Artificial Sequence: Synthetic coding sequence
  source 1..3135: mol_type = other DNA

SEQ ID NO: 170827 - DNA, 3216 bp, synthetic construct
  misc_feature 1..3216: note = Description of Artificial Sequence: Synthetic coding sequence
  source 1..3216: mol_type = other DNA
atgttcaacaagaacaacagcaacaagctgcggagcaccccccgctacagaagaggagaccccggctacctgaacttcacagagctgggccccctgaagccagagcagaaggaccagtggagccagcacaggccagatgaggaggccgtggtggaccagggcggcaccagcaccatcctgaacatccactatgagaaggaggagctggagggccacaggaccctgtatgtgggcgtgaggatgcccctgggccggcagagccaccgccaccacaggacccacggccagaagcacagaagaagaggccggggcaaaggagccagccagggcgaggagggcctggaggccctggcccatgacacccccagccagagggtgcagttcatcctgggcacagaggaggatgaggagcacgtgccccatgagctgttcacagagctggatgagatctgcatgaaggagggggaggatgctgagtggaaggagacagcccgctggctgaagtttgaagaagatgtggaggatggaggagagcgctggagcaagccctacgtggccaccctgagcctgcacagcctgtttgagctgcggagctgcctgatcaatggcaccgtgctgctggacatgcacgccaacagcattgaggagatcagtgacctgatcctggaccagcaggagctgagcagtgacctgaatgacagcatgagggtgaaggtgcgggaggccctgctgaagaagcaccaccaccagaatgagaagaagaggaacaacctgatccccatcgtgcgcagctttgctgaggtgggcaagaagcagagcgacccccacctgatggacaagcacggccagacagtgagcccccagagcgtgcccaccaccaacctggaggtgaagaatggagtgaactgtgagcacagccctgtggacctgagcaaggtggacctgcacttcatgaagaagatccccactggagctgaggccagcaatgtgctggtgggggaggtggacatcctggaccggcccatcgtggcctttgtgcggctgagccctgctgtgctgctgagcggcctgacagaggtgcccatccccacccgcttcctgttcatcctgctgggccctgtgggcaagggccagcagtaccatgaaattggccgctccatggccaccatcatgacagatgagatcttccatgatgtggcctacaaggccaaggagagagatgacctgctggccggcattgatgagttcctggaccaggtgacagtgctgcccccaggagagtgggaccccagcatccgcatcgagccccccaagaatgtgcccagccaggagaagaggaagatgcctggggtgcccaatggaaatgtgtgccacatcgagcaggagccccacggcggccacagcggccctgagctgcagaggacaggccgcctgtttggaggcctggtgctggacatcaagaggaaggccccctggtactggagcgactacagagatgccctgagcctgcagtgcctggccagcttcctgttcctgtactgtgcctgcatgagccctgtgatcacctttggaggcctgctgggggaggccacagagggccgcatcagcgccatcgagagcctgtttggagcctccatgactggaattgcctacagcctgtttgctggccaggccctgaccatcctgggcagcactggacctgtgctggtgtttgagaagatcctcttcaagttctgcaaggactatgccctgagctacctgagcctgcgggcctgcatcggcctgtggacagccttcctgtgcatcgtgctggtggccacagatgccagcagcctggtgtgctacatcacccgcttcacagaggaggcctttgccagcctcatctgcatcatcttcatctatgaggccatcgagaagctgatccacctggccgagacctaccccatccacatgcacagccagctggaccacctgagcctgtactactgccgctgcaccctgcctgagaaccccaacaaccacaccctgcagtactggaaggaccacaacatcgtgacagctgaggtgcactgggccaacctgactgtgtctgagtgccaggagatgcatggagagttcatgggcagcgcctgtggccaccacggcccctacaccccagatgtgctcttctggagctgcatcctcttcttcaccaccttcatcctgagcagcaccctgaagaccttcaagaccagccgctacttccccaccagggtgcgctccatggtgtctgactttgctgtgttcctgaccatcttcaccatggtgatcatcgacttcctgattggagtgcccagccccaagctgcaggtgcccagcgtcttcaagcccaccagagatgaccggggctggatcatcaaccccatcggccccaacccctggtggacagtgattgctgccatcatcccagccctgctgtgcaccatcctgatcttcatggaccagcagatcacagctgtgatcatcaacaggaaggagcacaagctgaagaagggctgcggctaccacctggacctgctgatggtggccatcatgctgggcgtgtgcagcatcatgggcctgccctggtttgtggccgccaccgtgctgagcatcacccacgtgaacagcctgaagctggagagtgaatgttctgcccctggagagcagcccaagttcctgggcatccgggagcagagggtgacaggcctgatgatctttgtgctgatgggctgcagcgtcttcatgacagccatcctgaagttcatccccatgcctgtgctgtatggagtcttcctgtacatgggcgtgagcagcctgcagggcatccagttctttgaccggctgaagctgtttggcatgcctgccaagcaccagcctgacttcatctacctgcggcacgtgcccctgaggaaggtgcacctgttcaccctcatccagctgacctgcctggtgctgctgtgggtgatcaaggccagccctgctgccatcgtgttccccatgatggtgctggccctggtgtttgtgaggaaggtgatggacctgtgcttcagcaagcgggagctgtcctggctggatgacctgatgcctgagagcaagaagaagaagctggatgatgccaagaagaaggccaaggaggaggaggtgattgtgctggcccccaccgtgtacctgggcgccagcaactaccgcacctag

SEQ ID NO: 170828 - DNA, 2244 bp, synthetic construct; identical to SEQ ID NO: 170787
  misc_feature 1..2244: note = Description of Artificial Sequence: Synthetic coding sequence
  source 1..2244: mol_type = other DNA

SEQ ID NO: 170829 - DNA, 3282 bp, synthetic construct
  misc_feature 1..3282: note = Description of Artificial Sequence: Synthetic coding sequence
  source 1..3282: mol_type = other DNA
atgcctgctgctggcagcaatgaaccagatggagtgctgagctaccagaggccagatgaggaggccgtggtggaccagggcggcaccagcaccatcctgaacatccactatgagaaggaggagctggagggccacaggaccctgtatgtgggcgtgaggatgcccctgggccggcagagccaccgccaccacaggacccacggccagaagcacagaagaagaggccggggcaagggggccagccagggcgaggagggcctggaggccctggcccatgacacccccagccagagggtgcagttcatcctgggcacagaagaagatgaggagcacgtgccccatgagctgttcacagagctggatgagatctgcatgaaggagggagaagatgctgagtggaaggagacagcccgctggctgaagtttgaggaggatgtggaggatggaggagagcgctggagcaagccctacgtggccaccctgagcctgcacagcctgtttgagctgcggagctgcctgatcaatggaacagtgctgctggacatgcacgccaacagcattgaggagatcagtgacctgatcctggaccagcaggagctgagcagtgacctgaatgacagcatgagggtgaaggtgcgggaggccctgctgaagaagcaccaccaccagaatgagaagaagaggaacaacctgatccccatcgtgcgcagctttgctgaggtgggcaagaagcagagcgacccccacctgatggacaagcacggccagacagtgagcccccagagcgtgcccaccaccaacctggaggtgaagaatggagtgaactgtgagcacagccctgtggacctgagcaaggtggacctgcacttcatgaagaagatccccaccggggctgaggccagcaatgtgctggtgggggaggtggacatcctggaccggcccatcgtggcctttgtgcggctgagccctgctgtgctgctgagcggcctgacagaggtgcccatccccacccgcttcctgttcatcctgctgggccctgtgggcaagggccagcagtaccacgagatcggccgctccatggccaccatcatgacagatgagatcttccatgatgtggcctacaaggccaaggagagagatgacctgctggccggcattgatgagttcctggaccaggtgacagtgctgcccccaggagagtgggaccccagcatcagaattgagccccccaagaatgtgcccagccaggagaagaggaagatgcctggggtgcccaatggaaatgtgtgccacatcgagcaggagccccatggaggccacagcggccctgagctgcagaggacaggccgcctgtttggaggcctggtgctggacatcaagaggaaggccccctggtactggagcgactacagagatgccctgagcctgcagtgcctggccagcttcctgttcctgtactgtgcctgcatgagccctgtgatcaccttcggcggcctgctgggggaggccacagagggccgcatcagcgccatcgagagcctgtttggagcctccatgacaggcatcgcctacagcctgtttgctggccaggccctgaccatcctgggcagcacaggccctgtgctggtgtttgagaagatcctcttcaagttctgcaaggactatgccctgagctacctgagcctgcgggcctgcatcggcctgtggacagccttcctgtgcatcgtgctggtggccacagatgccagcagcctggtgtgctacatcacccgcttcacagaggaggcctttgccagcctcatctgcatcatcttcatctatgaggccatcgagaagctgatccacctggccgagacctaccccatccacatgcacagccagctggaccacctgagcctgtactactgccgctgcaccctgcctgagaaccccaacaaccacaccctgcagtactggaaggaccacaacatcgtgacagctgaggtgcactgggccaacctgactgtgtctgagtgccaggagatgcacggggagttcatgggcagcgcctgtggccaccacggcccctacaccccagatgtgctcttctggagctgcatcctcttcttcaccaccttcatcctgagcagcaccctgaagaccttcaagaccagccgctacttccccaccagggtgcgctccatggtgtctgactttgctgtgttcctgaccatcttcaccatggtgatcatcgacttcctgattggagtgcccagccccaagctgcaggtgcccagcgtcttcaagcccaccagagatgaccggggctggatcatcaaccccatcggccccaacccctggtggacagtgattgctgccatcatcccagccctgctgtgcaccatcctgatcttcatggaccagcagatcacagctgtgatcatcaacaggaaggagcacaagctgaagaagggctgcggctaccacctggacctgctgatggtggccatcatgctgggcgtgtgcagcatcatgggcctgccctggtttgtggccgccaccgtgctgagcatcacccacgtgaacagcctgaagctggagagcgagtgcagcgcccctggagagcagcccaagttcctgggcatccgggagcagagggtgacaggcctgatgatctttgtgctgatgggctgcagcgtcttcatgacagccatcctgaagttcatccccatgcctgtgctgtatggagtcttcctgtacatgggcgtgagcagcctgcagggcatccagttctttgaccggctgaagctgtttggcatgcctgccaagcaccagcctgacttcatctacctgcggcacgtgcccctgaggaaggtgcacctgttcaccctcatccagctgacctgcctggtgctgctgtgggtgatcaaggccagccctgctgccatcgtgttccccatgatggtgctggccctggtgtttgtgaggaaggtgatggacctgtgcttcagcaagcgggagctgtcctggctggatgacctgatgcctgagagcaagaagaagaagctggatgatgccaagaagaaggccaaggaggaggaggaggccgagaagatgctggagattggaggagacaagttccccctggagagcaggaagctgctgagcagccctgggaagaacatcagctgccgctgtgaccccagcgagatcaacatcagtgatgagatgcccaagaccaccgtgtggaaggccctgtccatgaacagcggaaatgccaaggagaagagcctcttcaactag

SEQ ID NO: 170830 - DNA, 1917 bp, synthetic construct
  misc_feature 1..1917: note = Description of Artificial Sequence: Synthetic coding sequence
  source 1..1917: mol_type = other DNA
atgcccctgggccggcagagccaccgccaccacaggacccacggccagaagcacagaagaagaggccggggcaaaggagccagccagggcgaggagggcctggaggccctggcccatgacacccccagccagagggtgcagttcatcctgggcacagaggaggatgaggagcacgtgccccatgagctgttcacagagctggatgagatctgcatgaaggagggggaggatgctgagtggaaggagacagcccgctggctgaagtttgaagaagatgtggaggatggaggagagcgctggagcaagccctacgtggccaccctgagcctgcacagcctgtttgagctgcggagctgcctgatcaatggcaccgtgctgctggacatgcacgccaacagcattgaggagatcagtgacctgatcctggaccagcaggagctgagcagtgacctgaatgacagcatgagggtgaaggtgcgggaggccctgctgaagaagcaccaccaccagaatgagaagaagaggaacaacctgatccccatcgtgcgcagctttgctgaggtgggcaagaagcagagcgacccccacctgatggacaagcacggccagacagtgagcccccagagcgtgcccaccaccaacctggaggtgaagaatggagtgaactgtgagcacagccctgtggacctgagcaaggtggacctgcacttcatgaagaagatccccactggagctgaggccagcaatgtgctggtgggggaggtggacatcctggaccggcccatcgtggcctttgtgcggctgagccctgctgtgctgctgagcggcctgacagaggtgcccatccccacccgcttcctgttcatcctgctgggccctgtgggcaagggccagcagtaccatgaaattggccgctccatggccaccatcatgacagatgagatcttccatgatgtggcctacaaggccaaggagagagatgacctgctggccggcattgatgagttcctggaccaggtgacagtgctgcccccaggagagtgggaccccagcatccgcatcgagccccccaagaatgtgcccagccaggagaagaggaagatgcctggggtgcccaatggaaatgtgtgccacatcgagcaggagccccacggcggccacagcggccctgagctgcagaggacaggccgcctgtttggaggcctggtgctggacatcaagaggaaggccccctggtactggagcgactacagagatgccctgagcctgcagtgcctggccagcttcctgttcctgtactgtgcctgcatgagccctgtgatcacctttggaggcctgctgggggaggccacagagggccgcatcagcgccatcgagagcctgtttggagcctccatgactggaattgcctacagcctgtttgctggccaggccctgaccatcctgggcagcactggacctgtgctggtgtttgagaagatcctcttcaagttctgcaaggactatgccctgagctacctgagcctgcgggcctgcatcggcctgtggacagccttcctgtgcatcgtgctggtggccacagatgccagcagcctggtgtgctacatcacccgcttcacagaggaggcctttgccagcctcatctgcatcatcttcatctatgaggccatcgagaagctgatccacctggccgagacctaccccatccacatgcacagccagctggaccacctgagcctgtactactgccgctgcaccctgcctgagaaccccaacaaccacaccctgcagtactggaaggaccacaacatcgtgacagctgaggtgcactgggccaacctgactgtgtctgtgtccctgggcgccgcccgctgccccagcatcgtgaccaccggcctgggcggcaccagcaagtag

SEQ ID NO: 170831 - DNA, 2976 bp, synthetic construct
  misc_feature 1..2976: note = Description of Artificial Sequence: Synthetic coding sequence
  source 1..2976: mol_type = other DNA
atgcccctgggccggcagagccaccgccaccacaggacccacggccagaagcacagaagaagaggccggggcaaaggagccagccagggcgaggagggcctggaggccctggcccatgacacccccagccagagggtgcagttcatcctgggcacagaggaggatgaggagcacgtgccccatgagctgttcacagagctggatgagatctgcatgaaggagggggaggatgctgagtggaaggagacagcccgctggctgaagtttgaagaagatgtggaggatggaggagagcgctggagcaagccctacgtggccaccctgagcctgcacagcctgtttgagctgcggagctgcctgatcaatggcaccgtgctgctggacatgcacgccaacagcattgaggagatcagtgacctgatcctggaccagcaggagctgagcagtgacctgaatgacagcatgagggtgaaggtgcgggaggccctgctgaagaagcaccaccaccagaatgagaagaagaggaacaacctgatccccatcgtgcgcagctttgctgaggtgggcaagaagcagagcgacccccacctgatggacaagcacggccagacagtgagcccccagagcgtgcccaccaccaacctggaggtgaagaatggagtgaactgtgagcacagccctgtggacctgagcaaggtggacctgcacttcatgaagaagatccccactggagctgaggccagcaatgtgctggtgggggaggtggacatcctggaccggcccatcgtggcctttgtgcggctgagccctgctgtgctgctgagcggcctgacagaggtgcccatccccacccgcttcctgttcatcctgctgggccctgtgggcaagggccagcagtaccatgaaattggccgctccatggccaccatcatgacagatgagatcttccatgatgtggcctacaaggccaaggagagagatgacctgctggccggcattgatgagttcctggaccaggtgacagtgctgcccccaggagagtgggaccccagcatccgcatcgagccccccaagaatgtgcccagccaggagaagaggaagatgcctggggtgcccaatggaaatgtgtgccacatcgagcaggagccccacggcggccacagcggccctgagctgcagaggacaggccgcctgtttggaggcctggtgctggacatcaagaggaaggccccctggtactggagcgactacagagatgccctgagcctgcagtgcctggccagcttcctgttcctgtactgtgcctgcatgagccctgtgatcacctttggaggcctgctgggggaggccacagagggccgcatcagcgccatcgagagcctgtttggagcctccatgactggaattgcctacagcctgtttgctggccaggccctgaccatcctgggcagcactggacctgtgctggtgtttgagaagatcctcttcaagttctgcaaggactatgccctgagctacctgagcctgcgggcctgcatcggcctgtggacagccttcctgtgcatcgtgctggtggccacagatgccagcagcctggtgtgctacatcacccgcttcacagaggaggcctttgccagcctcatctgcatcatcttcatctatgaggccatcgagaagctgatccacctggccgagacctaccccatccacatgcacagccagctggaccacctgagcctgtactactgccgctgcaccctgcctgagaaccccaacaaccacaccctgcagtactggaaggaccacaacatcgtgacagctgaggtgcactgggccaacctgactgtgtctgagtgccaggagatgcatggagagttcatgggcagcgcctgtggccaccacggcccctacaccccagatgtgctcttctggagctgcatcctcttcttcaccaccttcatcctgagcagcaccctgaagaccttcaagaccagccgctacttccccaccagggtgcgctccatggtgtctgactttgctgtgttcctgaccatcttcaccatggtgatcatcgacttcctgattggagtgcccagccccaagctgcaggtgcccagcgtcttcaagcccaccagagatgaccggggctggatcatcaaccccatcggccccaacccctggtggacagtgattgctgccatcatcccagccctgctgtgcaccatcctgatcttcatggaccagcagatcacagctgtgatcatcaacaggaaggagcacaagctgaagaagggctgcggctaccacctggacctgctgatggtggccatcatgctgggcgtgtgcagcatcatgggcctgccctggtttgtggccgccaccgtgctgagcatcacccacgtgaacagcctgaagctggagagtgaatgttctgcccctggagagcagcccaagttcctgggcatccgggagcagagggtgacaggcctgatgatctttgtgctgatgggctgcagcgtcttcatgacagccatcctgaagttcatccccatgcctgtgctgtatggagtcttcctgtacatgggcgtgagcagcctgcagggcatccagttctttgaccggctgaagctgtttggcatgcctgccaagcaccagcctgacttcatctacctgcggcacgtgcccctgaggaaggtgcacctgttcaccctcatccagctgacctgcctggtgctgctgtgggtgatcaaggccagccctgctgccatcgtgttccccatgatggtgctggccctggtgtttgtgaggaaggtgatggacctgtgcttcagcaagcgggagctgtcctggctggatgacctgatgcctgagagcaagaagaagaagctggatgatgccaagaagaaggccaaggaggaggaggtgattgtgctggcccccaccgtgtacctgggcgccagcaactaccgcacctag

SEQ ID NO: 170832 - DNA, 3321 bp, synthetic construct
  misc_feature 1..3321: note = Description of Artificial Sequence: Synthetic coding sequence
  source 1..3321: mol_type = other DNA
atggagatcaaggaccagggcgcccagatggagcccctgctgcccaccagaaatgatgaggaggccgtggtggacagaggaggcaccaggagcatcctgaagacccactttgagaaggaggacctggagggccacaggaccctcttcatcggcgtgcacgtgcccctgggcggcaggaagagccacagaagacaccgccaccggggccacaagcacaggaagagggaccgggagcgggacagcggcctggaggatggccgggagagccccagctttgacacccccagccagagggtgcagttcatcctgggcacagaagatgatgatgaggagcacatcccccatgacctcttcacagagctggatgagatctgctggagggagggggaggatgctgagtggagggagacagcccgctggctgaagtttgaagaagatgtggaggatggaggagagcgctggagcaagccctacgtggccaccctgagcctgcacagcctgtttgagctgcggagctgcatcctgaatggcaccgtgctgctggacatgcacgccaacaccctggaggagattgctgacatggtgctggaccagcaggtgagcagcggccagctgaatgaagatgtgcgccaccgggtgcatgaggccctgatgaagcagcaccaccaccagaaccagaagaagctgaccaaccgcatccccatcgtgcgcagctttgctgacatcggcaagaagcagagcgagcccaacagcatggacaagaatgccggccaggtggtgagcccccagagcgccccagcctgtgtggagaacaagaatgatgtgtcccgggagaacagcacagtggacttcagcaaggtggacctgcacttcatgaagaagatccccccaggagctgaggccagcaacatcctggtgggggagctggagttcctggacagaacagtggtggcctttgtgcggctgagccctgctgtgctgctgcagggcctggccgaggtgcccatccccacccgcttcctgttcatcctgctgggccccctgggcaagggccagcagtaccatgaaattggccgcagcatcgccaccctgatgacagatgaggtgttccatgatgtggcctacaaggccaaggacagaaatgacctggtgtctggaattgatgagttcctggaccaggtgacagtgctgcccccaggagagtgggaccccagcatccgcatcgagccccccaagaatgtgcccagccaggagaagaggaagatcccagctgtgcccaatggaacagctgcccacggggaggccgagccccacggcggccacagcggccctgagctgcagaggacaggccgcatctttggaggcctcatcctggacatcaagaggaaggccccctacttctggagcgacttcagagatgccttcagcctgcagtgcctggccagcttcctgttcctgtactgtgcctgcatgagccctgtgatcacctttggaggcctgctgggggaggccacagagggccgcatcagcgccatcgagagcctgtttggagcctccatgactggaattgcctacagcctgtttggaggccagcccctgaccatcctgggcagcactggacctgtgctggtgtttgagaagatcctcttcaagttctgcaaggagtatggcctgagctacctgagcctgcgggccagcatcggcctgtggacagccaccctgtgcatcatcctggtggccacagatgccagcagcctggtgtgctacatcacccgcttcacagaggaggcctttgccagcctcatctgcatcatcttcatctatgaggccctggagaagctgtttgagctgtctgaggcctaccccatcaacatgcacaatgacctggagctgctgacccagtacagctgcaactgtgtggagccccacaaccccagcaatggcaccctgaaggagtggagggagagcaacatcagcgccagtgacatcatctgggagaacctgactgtgtctgagtgcaagagcctgcatggagaatatgtgggccgggcctgtggccatgaccacccctacgtgcctgatgtgctcttctggagcgtcatcctcttcttcagcacagtgaccctgagcgccaccctgaagcagttcaagaccagccgctacttccccaccaaggtgcgcagcatcgtgtctgactttgctgtgttcctgaccatcctgtgcatggtgctgattgattatgccatcggcatccccagccccaagctgcaggtgcccagcgtcttcaagcccaccagagatgaccggggctggtttgtgacccccctgggccccaacccctggtggacagtgattgctgccatcatcccagccctgctgtgcaccatcctgatcttcatggaccagcagatcacagctgtgatcatcaacaggaaggagcacaagctgaagaagggctgcggctaccacctggacctgctgatggtggccgtgatgctgggcgtgtgcagcatcatgggcctgccctggtttgtggccgccaccgtgctgagcatcacccacgtgaacagcctgaagctggagagtgaatgttctgcccctggagagcagcccaagttcctgggcatccgggagcagagggtgacaggcctgatgatcttcatcctgatgggcagctctgtgttcatgaccagcatcctgaagttcatccccatgcctgtgctgtatggagtcttcctgtacatgggcgccagcagcctgaagggcatccagttctttgaccgcatcaagctgttctggatgcctgccaagcaccagcctgacttcatctacctgcggcacgtgcccctgaggaaggtgcacctgttcaccatcatccagatgagctgcctgggcctgctgtggatcatcaaggtgtccagagctgccatcgtgttccccatgatggtgctggccctggtgtttgtgaggaagctgatggacctgctcttcaccaagcgggagctgtcctggctggatgacctgatgcctgagagcaagaagaagaagctggaggatgctgagaaggaggaggagcagagcatgctggccatggaggatgagggcaccgtgcagctgcccctggagggccactacagagatgaccccagcgtcatcaacatcagtgatgagatgagcaagacagccctgtggaggaacctgctgatcacagctgacaacagcaaggacaaggagagcagcttccccagcaagagcattgagagcaggaaggagaagaaggctgacagcggcaagggcgtggaccgggagacctgcctgtag

SEQ ID NO: 170833 - DNA, 3300 bp, synthetic construct
  misc_feature 1..3300: note = Description of Artificial Sequence: Synthetic coding sequence
  source 1..3300: mol_type = other DNA
atgcagagcctgggcgtgtctggcaacaggaaggtgatgcagagcggcacctgtgagcccttccagagcctgagccaccagagaaatgatgaggaggccgtggtggaccggggcggcaccaggagcatcctgaagacccactttgagaaggaggacctggagggccacaggaccctcttcatcggcgtgcacgtgcccctgggcggcaggaagagccaccggcggcaccgccaccggggccacaagcacaggaagagggaccgggagcgggacagcggcctggaggatggccgggagagccccagctttgacacccccagccagagggtgcagttcatcctgggcacagaagatgatgatgaggagcacatcccccatgacctcttcacagagctggatgagatctgctggagagaaggagaagatgctgagtggagggagacagcccgctggctgaagtttgaggaggatgtggaggatggaggagagcgctggagcaagccctacgtggccaccctgagcctgcacagcctgtttgagctgcggagctgcatcctgaatggaacagtgctgctggacatgcacgccaacaccctggaggagattgctgacatggtgctggaccagcaggtgagcagcggccagctgaatgaagatgtgcgccaccgggtgcatgaggccctgatgaagcagcaccaccaccagaaccagaagaagctgaccaaccgcatccccatcgtgcgcagctttgctgacatcggcaagaagcagagcgagcccaacagcatggacaagaatgccggccaggtggtgagcccccagagcgccccagcctgtgtggagaacaagaatgatgtgtcccgggagaacagcacagtggacttcagcaaggtggacctgcacttcatgaagaagatccccccaggagctgaggccagcaacatcctggtgggggagctggagttcctggacagaacagtggtggcctttgtgcggctgagccctgctgtgctgctgcagggcctggccgaggtgcccatccccacccgcttcctgttcatcctgctgggccccctgggcaagggccagcagtaccacgagatcggccgcagcatcgccaccctgatgacagatgaggtgttccatgatgtggcctacaaggccaaggacagaaatgacctggtgtctggaattgatgagttcctggaccaggtgacagtgctgcccccaggagagtgggaccccagcatcagaattgagccccccaagaatgtgcccagccaggagaagaggaagatcccagctgtgcccaacggcacagctgcccatggagaggccgagccccatggaggccacagcggccctgagctgcagaggacaggccgcatctttggaggcctcatcctggacatcaagaggaaggccccctacttctggagcgacttcagagatgccttcagcctgcagtgcctggccagcttcctgttcctgtactgtgcctgcatgagccctgtgatcaccttcggcggcctgctgggggaggccacagagggccgcatcagcgccatcgagagcctgtttggagcctccatgacaggcatcgcctacagcctgtttggaggccagcccctgaccatcctgggcagcacaggccctgtgctggtgtttgagaagatcctcttcaagttctgcaaggagtatggcctgagctacctgagcctgcgggccagcatcggcctgtggacagccaccctgtgcatcatcctggtggccacagatgccagcagcctggtgtgctacatcacccgcttcacagaggaggcctttgccagcctcatctgcatcatcttcatctatgaggccctggagaagctgtttgagctgtctgaggcctaccccatcaacatgcacaatgacctggagctgctgacccagtacagctgcaactgtgtggagccccacaaccccagcaatggcaccctgaaggagtggagggagagcaacatcagcgccagtgacatcatctgggagaacctgactgtgtctgagtgcaagagcctgcacggggagtatgtgggccgggcctgtggccatgaccacccctacgtgcctgatgtgctcttctggagcgtcatcctcttcttcagcacagtgaccctgagcgccaccctgaagcagttcaagaccagccgctacttccccaccaaggtgcgcagcatcgtgtctgactttgctgtgttcctgaccatcctgtgcatggtgctgattgattatgccatcggcatccccagccccaagctgcaggtgcccagcgtcttcaagcccaccagagatgaccggggctggtttgtgacccccctgggccccaacccctggtggacagtgattgctgccatcatcccagccctgctgtgcaccatcctgatcttcatggaccagcagatcacagctgtgatcatcaacaggaaggagcacaagctgaagaagggctgcggctaccacctggacctgctgatggtggccgtgatgctgggcgtgtgcagcatcatgggcctgccctggtttgtggccgccaccgtgctgagcatcacccacgtgaacagcctgaagctggagagcgagtgcagcgcccctggagagcagcccaagttcctgggcatccgggagcagagggtgacaggcctgatgatcttcatcctgatgggcagcagcgtcttcatgaccagcatcctgaagttcatccccatgcctgtgctgtatggagtcttcctgtacatgggcgccagcagcctgaagggcatccagttctttgaccgcatcaagctgttctggatgcctgccaagcaccagcctgacttcatctacctgcggcacgtgcccctgaggaaggtgcacctgttcaccatcatccagatgagctgcctgggcctgctgtggatcatcaaggtgtcccgggccgccatcgtgttccccatgatggtgctggccctggtgtttgtgaggaagctgatggacctgctcttcaccaagcgggagctgtcctggctggatgacctgatgcctgagagcaagaagaagaagctggaggatgctgagaaggaggaggagcagagcatgctggccatggaggatgagggcaccgtgcagctgcccctggagggccactacagagatgaccccagcgtcatcaacatcagtgatgagatgagcaagacagccctgtggaggaacctgctgatcacagctgacaacagcaaggacaaggagagcagcttccccagcaagagcagccccagctag

SEQ ID NO: 170834 - DNA, 3354 bp, synthetic construct
  misc_feature 1..3354: note = Description of Artificial Sequence: Synthetic coding sequence
  source 1..3354: mol_type = other DNA
atggagatcaaggaccagggcgcccagatggagcccctgctgcccaccagaaatgatgaggaggccgtggtggacagaggaggcaccaggagcatcctgaagacccactttgagaaggaggacctggagggccacaggaccctcttcatcggcgtgcacgtgcccctgggcggcaggaagagccacagaagacaccgccaccggggccacaagcacaggaagagggaccgggagcgggacagcggcctggaggatggccgggagagccccagctttgacacccccagccagagggtgcagttcatcctgggcacagaagatgatgatgaggagcacatcccccatgacctcttcacagagctggatgagatctgctggagggagggggaggatgctgagtggagggagacagcccgctggctgaagtttgaagaagatgtggaggatggaggagagcgctggagcaagccctacgtggccaccctgagcctgcacagcctgtttgagctgcggagctgcatcctgaatggcaccgtgctgctggacatgcacgccaacaccctggaggagattgctgacatggtgctggaccagcaggtgagcagcggccagctgaatgaagatgtgcgccaccgggtgcatgaggccctgatgaagcagcaccaccaccagaaccagaagaagctgaccaaccgcatccccatcgtgcgcagctttgctgacatcggcaagaagcagagcgagcccaacagcatggacaagaatggccaggtggtgagcccccagagcgccccagcctgtgtggagaacaagaatgatgtgtcccgggagaacagcacagtggacttcagcaagggcctgggcggccagcagaagggccacaccagcccctgtggcatgaagcagagacatgagaagggccccccccaccagcaggagcgggaggtggacctgcacttcatgaagaagatccccccaggagctgaggccagcaacatcctggtgggggagctggagttcctggacagaacagtggtggcctttgtgcggctgagccctgctgtgctgctgcagggcctggccgaggtgcccatccccacccgcttcctgttcatcctgctgggccccctgggcaagggccagcagtaccacgagatcggccgcagcatcgccaccctgatgacagatgaggtgttccatgatgtggcctacaaggccaaggacagaaatgacctggtgtctggaattgatgagttcctggaccaggtgacagtgctgcccccaggagagtgggaccccagcatcagaattgagccccccaagaatgtgcccagccaggagaagaggaagatcccagctgtgcccaacggcacagctgcccatggagaggccgagccccatggaggccacagcggccctgagctgcagaggacaggccgcatctttggaggcctcatcctggacatcaagaggaaggccccctacttctggagcgacttcagagatgccttcagcctgcagtgcctggccagcttcctgttcctgtactgtgcctgcatgagccctgtgatcaccttcggcggcctgctgggggaggccacagagggccgcatcagcgccatcgagagcctgtttggagcctccatgacaggcatcgcctacagcctgtttggaggccagcccctgaccatcctgggcagcacaggccctgtgctggtgtttgagaagatcctcttcaagttctgcaaggagtatggcctgagctacctgagcctgcgggccagcatcggcctgtggacagccaccctgtgcatcatcctggtggccacagatgccagcagcctggtgtgctacatcacccgcttcacagaggaggcctttgccagcctcatctgcatcatcttcatctatgaggccctggagaagctgtttgagctgtctgaggcctaccccatcaacatgcacaatgacctggagctgctgacccagtacagctgcaactgtgtggagccccacaaccccagcaatggcaccctgaaggagtggagggagagcaacatcagcgccagtgacatcatctgggagaacctgactgtgtctgagtgcaagagcctgcacggggagtatgtgggccgggcctgtggccatgaccacccctacgtgcctgatgtgctcttctggagcgtcatcctcttcttcagcacagtgaccctgagcgccaccctgaagcagttcaagaccagccgctacttccccaccaaggtgcgcagcatcgtgtctgactttgctgtgttcctgaccatcctgtgcatggtgctgattgattatgccatcggcatccccagccccaagctgcaggtgcccagcgtcttcaagcccaccagagatgaccggggctggtttgtgacccccctgggccccaacccctggtggacagtgattgctgccatcatcccagccctgctgtgcaccatcctgatcttcatggaccagcagatcacagctgtgatcatcaacaggaaggagcacaagctgaagaagggctgcggctaccacctggacctgctgatggtggccgtgatgctgggcgtgtgcagcatcatgggcctgccctggtttgtggccgccaccgtgctgagcatcacccacgtgaacagcctgaagctggagagcgagtgcagcgcccctggagagcagcccaagttcctgggcatccgggagcagagggtgacaggcctgatgatcttcatcctgatgggcagcagcgtcttcatgaccagcatcctgaagttcatccccatgcctgtgctgtatggagtcttcctgtacatgggcgccagcagcctgaagggcatccagttctttgaccgcatcaagctgttctggatgcctgccaagcaccagcctgacttcatctacctgcggcacgtgcccctgaggaaggtgcacctgttcaccatcatccagatgagctgcctgggcctgctgtggatcatcaaggtgtcccgggccgccatcgtgttccccatgatggtgctggccctggtgtttgtgaggaagctgatggacctgctcttcaccaagcgggagctgtcctggctggatgacctgatgcctgagagcaagaagaagaagctggaggatgctgagaaggaggaggagcagagcatgctggccatggaggatgagggcaccgtgcagctgcccctggagggccactacagagatgaccccagcgtcatcaacatcagtgatgagatgagcaagacagccctgtggaggaacctgctgatcacagctgacaacagcaaggacaaggagagcagcttccccagcaagagcagccccagctag

SEQ ID NO: 170835 - DNA, 3267 bp, synthetic construct
  misc_feature 1..3267: note = Description of Artificial Sequence: Synthetic coding sequence
  source 1..3267: mol_type = other DNA
atggagatcaaggaccagggcgcccagatggagcccctgctgcccaccagaaatgatgaggaggccgtggtggacagaggaggcaccaggagcatcctgaagacccactttgagaaggaggacctggagggccacaggaccctcttcatcggcgtgcacgtgcccctgggcggcaggaagagccacagaagacaccgccaccggggccacaagcacaggaagagggaccgggagcgggacagcggcctggaggatggccgggagagccccagctttgacacccccagccagagggtgcagttcatcctgggcacagaagatgatgatgaggagcacatcccccatgacctcttcacagagctggatgagatctgctggagggagggggaggatgctgagtggagggagacagcccgctggctgaagtttgaagaagatgtggaggatggaggagagcgctggagcaagccctacgtggccaccctgagcctgcacagcctgtttgagctgcggagctgcatcctgaatggcaccgtgctgctggacatgcacgccaacaccctggaggagattgctgacatggtgctggaccagcaggtgagcagcggccagctgaatgaagatgtgcgccaccgggtgcatgaggccctgatgaagcagcaccaccaccagaaccagaagaagctgaccaaccgcatccccatcgtgcgcagctttgctgacatcggcaagaagcagagcgagcccaacagcatggacaagaatgccggccaggtggtgagcccccagagcgccccagcctgtgtggagaacaagaatgatgtgtcccgggagaacagcacagtggacttcagcaaggtggacctgcacttcatgaagaagatccccccaggagctgaggccagcaacatcctggtgggggagctggagttcctggacagaacagtggtggcctttgtgcggctgagccctgctgtgctgctgcagggcctggccgaggtgcccatccccacccgcttcctgttcatcctgctgggccccctgggcaagggccagcagtaccatgaaattggccgcagcatcgccaccctgatgacagatgaggtgttccatgatgtggcctacaaggccaaggacagaaatgacctggtgtctggaattgatgagttcctggaccaggtgacagtgctgcccccaggagagtgggaccccagcatccgcatcgagccccccaagaatgtgcccagccaggagaagaggaagatcccagctgtgcccaatggaacagctgcccacggggaggccgagccccacggcggccacagcggccctgagctgcagaggacaggccgcatctttggaggcctcatcctggacatcaagaggaaggccccctacttctggagcgacttcagagatgccttcagcctgcagtgcctggccagcttcctgttcctgtactgtgcctgcatgagccctgtgatcacctttggaggcctgctgggggaggccacagagggccgcatcagcgccatcgagagcctgtttggagcctccatgactggaattgcctacagcctgtttggaggccagcccctgaccatcctgggcagcactggacctgtgctggtgtttgagaagatcctcttcaagttctgcaaggagtatggcctgagctacctgagcctgcgggccagcatcggcctgtggacagccaccctgtgcatcatcctggtggccacagatgccagcagcctggtgtgctacatcacccgcttcacagaggaggcctttgccagcctcatctgcatcatcttcatctatgaggccctggagaagctgtttgagctgtctgaggcctaccccatcaacatgcacaatgacctggagctgctgacccagtacagctgcaactgtgtggagccccacaaccccagcaatggcaccctgaaggagtggagggagagcaacatcagcgccagtgacatcatctgggagaacctgactgtgtctgagtgcaagagcctgcatggagaatatgtgggccgggcctgtggccatgaccacccctacgtgcctgatgtgctcttctggagcgtcatcctcttcttcagcacagtgaccctgagcgccaccctgaagcagttcaagaccagccgctacttccccaccaaggtgcgcagcatcgtgtctgactttgctgtgttcctgaccatcctgtgcatggtgctgattgattatgccatcggcatccccagccccaagctgcaggtgcccagcgtcttcaagcccaccagagatgaccggggctggtttgtgacccccctgggccccaacccctggtggacagtgattgctgccatcatcccagccctgctgtgcaccatcctgatcttcatggaccagcagatcacagctgtgatcatcaacaggaaggagcacaagctgaagaagggctgcggctaccacctggacctgctgatggtggccgtgatgctgggcgtgtgcagcatcatgggcctgccctggtttgtggccgccaccgtgctgagcatcacccacgtgaacagcctgaagctggagagtgaatgttctgcccctggagagcagcccaagttcctgggcatccgggagcagagggtgacaggcctgatgatcttcatcctgatgggcagctctgtgttcatgaccagcatcctgaagttcatccccatgcctgtgctgtatggagtcttcctgtacatgggcgccagcagcctgaagggcatccagttctttgaccgcatcaagctgttctggatgcctgccaagcaccagcctgacttcatctacctgcggcacgtgcccctgaggaaggtgcacctgttcaccatcatccagatgagctgcctgggcctgctgtggatcatcaaggtgtccagagctgccatcgtgttccccatgatggtgctggccctggtgtttgtgaggaagctgatggacctgctcttcaccaagcgggagctgtcctggctggatgacctgatgcctgagagcaagaagaagaagctggaggatgctgagaaggaggaggagcagagcatgctggccatggaggatgagggcaccgtgcagctgcccctggagggccactacagagatgaccccagcgtcatcaacatcagtgatgagatgagcaagacagccctgtggaggaacctgctgatcacagctgacaacagcaaggacaaggagagcagcttccccagcaagagcagccccagctag

SEQ ID NO: 170836 - DNA, 3165 bp, synthetic construct
  misc_feature 1..3165: note = Description of Artificial Sequence: Synthetic coding sequence
  source 1..3165: mol_type = other DNA
atggagatcaaggaccagggcgcccagatggagcccctgctgcccaccagaaatgatgaggaggccgtggtggacagaggaggcaccaggagcatcctgaagacccactttgagaaggaggacctggagggccacaggaccctcttcatcggcgtgcacgtgcccctgggcggcaggaagagccacagaagacaccgccaccggggccacaagcacaggaagagggaccgggagcgggacagcggcctggaggatggccgggagagccccagctttgacacccccagccagagggtgcagttcatcctgggcacagaagatgatgatgaggagcacatcccccatgacctcttcacagagctggatgagatctgctggagggagggggaggatgctgagtggagggagacagcccgctggctgaagtttgaagaagatgtggaggatggaggagagcgctggagcaagccctacgtggccaccctgagcctgcacagcctgtttgagctgcggagctgcatcctgaatggcaccgtgctgctggacatgcacgccaacaccctggaggagattgctgacatggtgctggaccagcaggtgagcagcggccagctgaatgaagatgtgcgccaccgggtgcatgaggccctgatgaagcagcaccaccaccagaaccagaagaagctgaccaaccgcatccccatcgtgcgcagctttgctgacatcggcaagaagcagagcgagcccaacagcatggacaagaatgccggccaggtggtgagcccccagagcgccccagcctgtgtggagaacaagaatgatgtgtcccgggagaacagcacagtggacttcagcaagggcctgggcggccagcagaagggccacaccagcccctgtggcatgaagcagagacatgagaagggccccccccaccagcaggagcgggaggtggacctgcacttcatgaagaagatccccccaggagctgaggccagcaacatcctggtgggggagctggagttcctggacagaacagtggtggcctttgtgcggctgagccctgctgtgctgctgcagggcctggccgaggtgcccatccccacccgcttcctgttcatcctgctgggccccctgggcaagggccagcagtaccatgaaattggccgcagcatcgccaccctgatgacagatgaggtgttccatgatgtggcctacaaggccaaggacagaaatgacctggtgtctggaattgatgagttcctggaccaggtgacagtgctgcccccaggagagtgggaccccagcatccgcatcgagccccccaagaatgtgcccagccaggagaagaggaagatcccagctgtgcccaatggaacagctgcccacggggaggccgagccccacggcggccacagcggccctgagctgcagaggacaggccgcatctttggaggcctcatcctggacatcaagaggaaggccccctacttctggagcgacttcagagatgccttcagcctgcagtgcctggccagcttcctgttcctgtactgtgcctgcatgagccctgtgatcacctttggaggcctgctgggggaggccacagagggccgcatcagcgccatcgagagcctgtttggagcctccatgactggaattgcctacagcctgtttggaggccagcccctgaccatcctgggcagcactggacctgtgctggtgtttgagaagatcctcttcaagttctgcaaggagtatggcctgagctacctgagcctgcgggccagcatcggcctgtggacagccaccctgtgcatcatcctggtggccacagatgccagcagcctggtgtgctacatcacccgcttcacagaggaggcctttgccagcctcatctgcatcatcttcatctatgaggccctggagaagctgtttgagctgtctgaggcctaccccatcaacatgcacaatgacctggagctgctgacccagtacagctgcaactgtgtggagccccacaaccccagcaatggcaccctgaaggagtggagggagagcaacatcagcgccagtgacatcatctgggagaacctgactgtgtctgagtgcaagagcctgcatggagaatatgtgggccgggcctgtggccatgaccacccctacgtgcctgatgtgctcttctggagcgtcatcctcttcttcagcacagtgaccctgagcgccaccctgaagcagttcaagaccagccgctacttccccaccaaggtgcgcagcatcgtgtctgactttgctgtgttcctgaccatcctgtgcatggtgctgattgattatgccatcggcatccccagccccaagctgcaggtgcccagcgtcttcaagcccaccagagatgaccggggctggtttgtgacccccctgggccccaacccctggtggacagtgattgctgccatcatcccagccctgctgtgcaccatcctgatcttcatggaccagcagatcacagctgtgatcatcaacaggaaggagcacaagctgaagaagggctgcggctaccacctggacctgctgatggtggccgtgatgctgggcgtgtgcagcatcatgggcctgccctggtttgtggccgccaccgtgctgagcatcacccacgtgaacagcctgaagctggagagtgaatgttctgcccctggagagcagcccaagttcctgggcatccgggagcagagggtgacaggcctgatgatcttcatcctgatgggcagctctgtgttcatgaccagcatcctgaagttcatccccatgcctgtgctgtatggagtcttcctgtacatgggcgccagcagcctgaagggcatccagttctttgaccgcatcaagctgttctggatgcctgccaagcaccagcctgacttcatctacctgcggcacgtgcccctgaggaaggtgcacctgttcaccatcatccagatgagctgcctgggcctgctgtggatcatcaaggtgtccagagctgccatcgtgttccccatgatggtgctggccctggtgtttgtgaggaagctgatggacctgctcttcaccaagcgggagctgtcctggctggatgacctgatgcctgagagcaagaagaagaagctggaggatgctgagaaggagcactag

SEQ ID NO: 170837 - DNA, 3357 bp, synthetic construct
  misc_feature 1..3357: note = Description of Artificial Sequence: Synthetic coding sequence
  source 1..3357: mol_type = other DNA
atggagatcaaggaccagggcgcccagatggagcccctgctgcccaccagaaatgatgaggaggccgtggtggacagaggaggcaccaggagcatcctgaagacccactttgagaaggaggacctggagggccacaggaccctcttcatcggcgtgcacgtgcccctgggcggcaggaagagccacagaagacaccgccaccggggccacaagcacaggaagagggaccgggagcgggacagcggcctggaggatggccgggagagccccagctttgacacccccagccagagggtgcagttcatcctgggcacagaagatgatgatgaggagcacatcccccatgacctcttcacagagctggatgagatctgctggagggagggggaggatgctgagtggagggagacagcccgctggctgaagtttgaagaagatgtggaggatggaggagagcgctggagcaagccctacgtggccaccctgagcctgcacagcctgtttgagctgcggagctgcatcctgaatggcaccgtgctgctggacatgcacgccaacaccctggaggagattgctgacatggtgctggaccagcaggtgagcagcggccagctgaatgaagatgtgcgccaccgggtgcatgaggccctgatgaagcagcaccaccaccagaaccagaagaagctgaccaaccgcatccccatcgtgcgcagctttgctgacatcggcaagaagcagagcgagcccaacagcatggacaagaatgccggccaggtggtgagcccccagagcgccccagcctgtgtggagaacaagaatgatgtgtcccgggagaacagcacagtggacttcagcaagggcctgggcggccagcagaagggccacaccagcccctgtggcatgaagcagagacatgagaagggccccccccaccagcaggagcgggaggtggacctgcacttcatgaagaagatccccccaggagctgaggccagcaacatcctggtgggggagctggagttcctggacagaacagtggtggcctttgtgcggctgagccctgctgtgctgctgcagggcctggccgaggtgcccatccccacccgcttcctgttcatcctgctgggccccctgggcaagggccagcagtaccatgaaattggccgcagcatcgccaccctgatgacagatgaggtgttccatgatgtggcctacaaggccaaggacagaaatgacctggtgtctggaattgatgagttcctggaccaggtgacagtgctgcccccaggagagtgggaccccagcatccgcatcgagccccccaagaatgtgcccagccaggagaagaggaagatcccagctgtgcccaatggaacagctgcccacggggaggccgagccccacggcggccacagcggccctgagctgcagaggacaggccgcatctttggaggcctcatcctggacatcaagaggaaggccccctacttctggagcgacttcagagatgccttcagcctgcagtgcctggccagcttcctgttcctgtactgtgcctgcatgagccctgtgatcacctttggaggcctgctgggggaggccacagagggccgcatcagcgccatcgagagcctgtttggagcctccatgactggaattgcctacagcctgtttggaggccagcccctgaccatcctgggcagcactggacctgtgctggtgtttgagaagatcctcttcaagttctgcaaggagtatggcctgagctacctgagcctgcgggccagcatcggcctgtggacagccaccctgtgcatcatcctggtggccacagatgccagcagcctggtgtgctacatcacccgcttcacagaggaggcctttgccagcctcatctgcatcatcttcatctatgaggccctggagaagctgtttgagctgtctgaggcctaccccatcaacatgcacaatgacctggagctgctgacccagtacagctgcaactgtgtggagccccacaaccccagcaatggcaccctgaaggagtggagggagagcaacatcagcgccagtgacatcatctgggagaacctgactgtgtctgagtgcaagagcctgcatggagaatatgtgggccgggcctgtggccatgaccacccctacgtgcctgatgtgctcttctggagcgtcatcctcttcttcagcacagtgaccctgagcgccaccctgaagcagttcaagaccagccgctacttccccaccaaggtgcgcagcatcgtgtctgactttgctgtgttcctgaccatcctgtgcatggtgctgattgattatgccatcggcatccccagccccaagctgcaggtgcccagcgtcttcaagcccaccagagatgaccggggctggtttgtgacccccctgggccccaacccctggtggacagtgattgctgccatcatcccagccctgctgtgcaccatcctgatcttcatggaccagcagatcacagctgtgatcatcaacaggaaggagcacaagctgaagaagggctgcggctaccacctggacctgctgatggtggccgtgatgctgggcgtgtgcagcatcatgggcctgccctggtttgtggccgccaccgtgctgagcatcacccacgtgaacagcctgaagctggagagtgaatgttctgcccctggagagcagcccaagttcctgggcatccgggagcagagggtgacaggcctgatgatcttcatcctgatgggcagctctgtgttcatgaccagcatcctgaagttcatccccatgcctgtgctgtatggagtcttcctgtacatgggcgccagcagcctgaagggcatccagttctttgaccgcatcaagctgttctggatgcctgccaagcaccagcctgacttcatctacctgcggcacgtgcccctgaggaaggtgcacctgttcaccatcatccagatgagctgcctgggcctgctgtggatcatcaaggtgtccagagctgccatcgtgttccccatgatggtgctggccctggtgtttgtgaggaagctgatggacctgctcttcaccaagcgggagctgtcctggctggatgacctgatgcctgagagcaagaagaagaagctggaggatgctgagaaggaggaggagcagagcatgctggccatggaggatgagggcaccgtgcagctgcccctggagggccactacagagatgaccccagcgtcatcaacatcagtgatgagatgagcaagacagccctgtggaggaacctgctgatcacagctgacaacagcaaggacaaggagagcagcttccccagcaagagcagccccagctag

SEQ ID NO: 170838 - DNA, 3318 bp, synthetic construct
  misc_feature 1..3318: note = Description of Artificial Sequence: Synthetic coding sequence
  source 1..3318: mol_type = other DNA
atggagatcaaggaccagggcgcccagatggagcccctgctgcccaccagaaatgatgaggaggccgtggtggacagaggaggcaccaggagcatcctgaagacccactttgagaaggaggacctggagggccacaggaccctcttcatcggcgtgcacgtgcccctgggcggcaggaagagccacagaagacaccgccaccggggccacaagcacaggaagagggaccgggagcgggacagcggcctggaggatggccgggagagccccagctttgacacccccagccagagggtgcagttcatcctgggcacagaagatgatgatgaggagcacatcccccatgacctcttcacagagctggatgagatctgctggagggagggggaggatgctgagtggagggagacagcccgctggctgaagtttgaagaagatgtggaggatggaggagagcgctggagcaagccctacgtggccaccctgagcctgcacagcctgtttgagctgcggagctgcatcctgaatggcaccgtgctgctggacatgcacgccaacaccctggaggagattgctgacatggtgctggaccagcaggtgagcagcggccagctgaatgaagatgtgcgccaccgggtgcatgaggccctgatgaagcagcaccaccaccagaaccagaagaagctgaccaaccgcatccccatcgtgcgcagctttgctgacatcggcaagaagcagagcgagcccaacagcatggacaagaatggccaggtggtgagcccccagagcgccccagcctgtgtggagaacaagaatgatgtgtcccgggagaacagcacagtggacttcagcaaggtggacctgcacttcatgaagaagatccccccaggagctgaggccagcaacatcctggtgggggagctggagttcctggacagaacagtggtggcctttgtgcggctgagccctgctgtgctgctgcagggcctggccgaggtgcccatccccacccgcttcctgttcatcctgctgggccccctgggcaagggccagcagtaccacgagatcggccgcagcatcgccaccctgatgacagatgaggtgttccatgatgtggcctacaaggccaaggacagaaatgacctggtgtctggaattgatgagttcctggaccaggtgacagtgctgcccccaggagagtgggaccccagcatcagaattgagccccccaagaatgtgcccagccaggagaagaggaagatcccagctgtgcccaacggcacagctgcccatggagaggccgagccccatggaggccacagcggccctgagctgcagaggacaggccgcatctttggaggcctcatcctggacatcaagaggaaggccccctacttctggagcgacttcagagatgccttcagcctgcagtgcctggccagcttcctgttcctgtactgtgcctgcatgagccctgtgatcaccttcggcggcctgctgggggaggccacagagggccgcatcagcgccatcgagagcctgtttggagcctccatgacaggcatcgcctacagcctgtttggaggccagcccctgaccatcctgggcagcacaggccctgtgctggtgtttgagaagatcctcttcaagttctgcaaggagtatggcctgagctacctgagcctgcgggccagcatcggcctgtggacagccaccctgtgcatcatcctggtggccacagatgccagcagcctggtgtgctacatcacccgcttcacagaggaggcctttgccagcctcatctgcatcatcttcatctatgaggccctggagaagctgtttgagctgtctgaggcctaccccatcaacatgcacaatgacctggagctgctgacccagtacagctgcaactgtgtggagccccacaaccccagcaatggcaccctgaaggagtggagggagagcaacatcagcgccagtgacatcatctgggagaacctgactgtgtctgagtgcaagagcctgcacggggagtatgtgggccgggcctgtggccatgaccacccctacgtgcctgatgtgctcttctggagcgtcatcctcttcttcagcacagtgaccctgagcgccaccctgaagcagttcaagaccagccgctacttccccaccaaggtgcgcagcatcgtgtctgactttgctgtgttcctgaccatcctgtgcatggtgctgattgattatgccatcggcatccccagccccaagctgcaggtgcccagcgtcttcaagcccaccagagatgaccggggctggtttgtgacccccctgggccccaacccctggtggacagtgattgctgccatcatcccagccctgctgtgcaccatcctgatcttcatggaccagcagatcacagctgtgatcatcaacaggaaggagcacaagctgaagaagggctgcggctaccacctggacctgctgatggtggccgtgatgctgggcgtgtgcagcatcatgggcctgccctggtttgtggccgccaccgtgctgagcatcacccacgtgaacagcctgaagctggagagcgagtgcagcgcccctggagagcagcccaagttcctgggcatccgggagcagagggtgacaggcctgatgatcttcatcctgatgggcagcagcgtcttcatgaccagcatcctgaagttcatccccatgcctgtgctgtatggagtcttcctgtacatgggcgccagcagcctgaagggcatccagttctttgaccgcatcaagctgttctggatgcctgccaagcaccagcctgacttcatctacctgcggcacgtgcccctgaggaaggtgcacctgttcaccatcatccagatgagctgcctgggcctgctgtggatcatcaaggtgtcccgggccgccatcgtgttccccatgatggtgctggccctggtgtttgtgaggaagctgatggacctgctcttcaccaagcgggagctgtcctggctggatgacctgatgcctgagagcaagaagaagaagctggaggatgctgagaaggaggaggagcagagcatgctggccatggaggatgagggcaccgtgcagctgcccctggagggccactacagagatgaccccagcgtcatcaacatcagtgatgagatgagcaagacagccctgtggaggaacctgctgatcacagctgacaacagcaaggacaaggagagcagcttccccagcaagagcattgagagcaggaaggagaagaaggctgacagcgggaaaggagtggaccgggagacctgcctgtag

SEQ ID NO: 170839 - DNA, 1227 bp, synthetic construct
  misc_feature 1..1227: note = Description of Artificial Sequence: Synthetic coding sequence
  source 1..1227: mol_type = other DNA
atggagatcaaggaccagggcgcccagatggagcccctgctgcccaccagaaatgatgaggaggccgtggtggacagaggaggcaccaggagcatcctgaagacccactttgagaaggaggacctggagggccacaggaccctcttcatcggcgtgcacgtgcccctgggcggcaggaagagccacagaagacaccgccaccggggccacaagcacaggaagagggaccgggagcgggacagcggcctggaggatggccgggagagccccagctttgacacccccagccagagggtgcagttcatcctgggcacagaagatgatgatgaggagcacatcccccatgacctcttcacagagctggatgagatctgctggagggagggggaggatgctgagtggagggagacagcccgctggctgaagtttgaagaagatgtggaggatggaggagagcgctggagcaagccctacgtggccaccctgagcctgcacagcctgtttgagctgcggagctgcatcctgaatggcaccgtgctgctggacatgcacgccaacaccctggaggagattgctgacatggtgctggaccagcaggtgagcagcggccagctgaatgaagatgtgcgccaccgggtgcatgaggccctgatgaagcagcaccaccaccagaaccagaagaagctgaccaaccgcatccccatcgtgcgcagctttgctgacatcggcaagaagcagagcgagcccaacagcatggacaagaatgccggccaggtggtgagcccccagagcgccccagcctgtgtggagaacaagaatgatgtgtcccgggagaacagcacagtggacttcagcaagggcctgggcggccagcagaagggccacaccagcccctgtggcatgaagcagagacatgagaagggccccccccaccagcaggagcgggaggtggacctgcacttcatgaagaagatccccccaggagctgaggccagcaacatcctggtgggggagctggagttcctggacagaacagtggtggcctttgtgcggctgagccctgctgtgctgctgcagggcctggccgaggtgcccatccccacccgctacttcatgatgctgcccatcaagctgaagatcgtgatgacctggtaccaggagctgatgtccttctggatccggctgctcttcagcctgctggagaatggcatccaggcctttgaatag

SEQ ID NO: 170840 - DNA, 2676 bp, synthetic construct
  misc_feature 1..2676: note = Description of Artificial Sequence: Synthetic coding sequence
  source 1..2676: mol_type = other DNA
atgagccaggtgggcggccgcggggaccgctgcacccaggaggtgcagggcctggtgcacggggccggggacctgagcgccagcctggccgagaacagccccaccatgagccagaatggctactttgaggacagcagctactacaagtgtgacacagatgacacctttgaggcccgggaggagatcctgggagatgaggcctttgacacagccaacagcagcatcgtgtctggagagagcatccgcttctttgtgaatgtgaacctggagatgcaggccaccaacacagaaaatgaggccaccagcggcggctgtgtgctgctgcacaccagcaggaagtacctgaagctgaagaacttcaaggaggagatccgggcccaccgggacctggatggcttcctggcccaggccagcatcgtgctgaatgaaacagccaccagcctggacaacgtgctgcggaccatgctgcggagatttgcccgggaccctgacaacaatgagcccaactgcaacctggacctgctgatggccatgctgttcacagatgctggggcccccatgaggggcaaggtgcacctgctgagtgacaccatccagggcgtgacagccaccgtgactggagtgcgctaccagcagagctggctgtgcatcatctgcaccatgaaggccctgcagaagagacatgtgtgcatcagccggctggtgcggccccagaactggggcgagaacagctgtgaggtgcgctttgtgatcctggtgctggccccacccaagatgaagagcaccaagacagccatggaggtggcccggacctttgccaccatgttcagtgacatcgccttccggcagaagctgctggagaccaggacagaggaggagttcaaggaggccctggtgcaccagaggcagctgctgaccatggtgagccacggccctgtggcccccaggaccaaggagaggagcacagtgtccctgcctgcccaccgccaccctgagccccccaagtgcaaggactttgtgccctttgggaagggcatccgggaggacatcgcccggcgcttccccctgtaccccctggacttcacagatggcatcatcggcaagaacaaggctgtgggcaagtacatcaccaccaccctcttcctgtactttgcctgcctgctgcccaccatcgccttcggcagcctgaatgatgaaaatacagatggagccattgatgtgcagaagaccatcgccggccagagcatcggcggcctgctgtatgccctcttcagcggccagcccctggtgatcctgctgaccacagcccccctggccctgtacatccaggtgatccgggtcatctgtgatgattatgacctggacttcaacagcttctacgcctggacaggcctgtggaacagcttcttcctggccctgtatgccttcttcaacctgagcctggtgatgagcctcttcaagaggagcacagaggagatcatcgccctcttcatcagcatcacctttgtgctggatgctgtgaagggcaccgtgaagatcttctggaagtactactacggccactacctggatgactaccacaccaagaggaccagcagcctggtgtccctgagcggcctgggcgccagcctgaatgccagcctgcacacagccctgaatgccagcttcctggccagccccacagagctgcccagcgccacccacagcggccaggccacagctgtgctgagcctgctgatcatgctgggcaccctgtggctgggctacaccctgtaccagttcaagaagagcccctacctgcacccctgtgtgcgggagatcctgagtgactgtgccctgcccatcgctgtgctggccttcagcctcatcagcagccacggcttccgggagattgagatgagcaagttccgctacaaccccagcgagagcccctttgccatggcccagatccagagcctgagcctgcgggctgtgtctggggccatgggcctgggcttcctgctgtccatgctgttcttcatcgagcagaacctggtggccgccctggtgaatgccccagaaaatcggctggtgaagggcacagcctaccactgggacctgctgctgctggccatcatcaacacaggcctgagcctgtttggcctgccctggattcatgctgcctacccccacagccccctgcacgtgcgggccctggccctggtggaggagcgggtggagaatggccacatctatgacaccatcgtgaatgtgaaggagacccggctgaccagcctgggcgcctctgtgctggtgggcctgagcctgctgctgctgcctgtgcccctgcagtggatccccaagcctgtgctgtatggcctcttcctgtacatcgccctgaccagcctggatggcaaccagctggtgcagagggtggccctgctgctgaaggagcagacagcctacccacccacccactacatccggcgggtgccccagaggaagatccactacttcaccggcctgcaggtgctgcagctgctgctgctgtgtgccttcggcatgagcagcctgccctacatgaagatgatcttccccctcatcatgattgccatgatccccatccgctacatcctgctgccccgcatcatcgaggccaagtacctggatgtgatggatgctgagcaccggccctag

SEQ ID NO: 170841 - DNA, 2757 bp, synthetic construct
  misc_feature 1..2757: note = Description of Artificial Sequence: Synthetic coding sequence
  source 1..2757: mol_type = other DNA
atgggcgtgtatggcccccaggacagaagtgagagcgagaagagagatgtgcagagggaccccccaccctggcacccccggcgggagggggagaggcctgcccgggcccggagcctgcccctggccgccgccggccagggcttcctgaggaagacctggatcagcgagcacgagaacagccccaccatgagccagaatggctactttgaggacagcagctactacaagtgtgacacagatgacacctttgaggcccgggaggagatcctgggagatgaggcctttgacacagccaacagcagcatcgtgtctggagagagcatccgcttctttgtgaatgtgaacctggagatgcaggccaccaacacagaaaatgaggccaccagcggcggctgtgtgctgctgcacaccagcaggaagtacctgaagctgaagaacttcaaggaggagatccgggcccaccgggacctggatggcttcctggcccaggccagcatcgtgctgaatgaaacagccaccagcctggacaacgtgctgcggaccatgctgcggagatttgcccgggaccctgacaacaatgagcccaactgcaacctggacctgctgatggccatgctgttcacagatgctggggcccccatgaggggcaaggtgcacctgctgagtgacaccatccagggcgtgacagccaccgtgactggagtgcgctaccagcagagctggctgtgcatcatctgcaccatgaaggccctgcagaagagacatgtgtgcatcagccggctggtgcggccccagaactggggcgagaacagctgtgaggtgcgcttcgtcatcctggtgctggccccacccaagatgaagagcaccaagacagccatggaggtggcccggacctttgccaccatgttcagtgacatcgccttccggcagaagctgctggagaccaggacagaggaggagttcaaggaggccctggtgcaccagaggcagctgctgaccatggtgagccacggccctgtggcccccaggaccaaggagaggagcacagtgtccctgcctgcccaccgccaccctgagccccccaagtgcaaggactttgtgccctttgggaagggcatcagagaagatattgcccggcgcttccccctgtaccccctggacttcacagatggcatcatcggcaagaacaaggctgtgggcaagtacatcaccaccaccctcttcctgtactttgcctgcctgctgcccaccatcgccttcggcagcctgaatgatgagaacacagatggagccattgatgtgcagaagaccatcgccggccagagcattggaggcctgctgtatgccctcttcagcggccagcccctggtgatcctgctgaccacagcccccctggccctgtacatccaggtgatccgggtcatctgtgatgattatgacctggacttcaacagcttctacgcctggacaggcctgtggaacagcttcttcctggccctgtatgccttcttcaacctgagcctggtgatgagcctcttcaagaggagcacagaggagatcatcgccctcttcatcagcatcacctttgtgctggatgctgtgaagggcaccgtgaagatcttctggaagtactactacggccactacctggatgactaccacaccaagaggaccagcagcctggtgtccctgagcggcctgggcgccagcctgaatgccagcctgcacacagccctgaatgccagcttcctggccagccccacagagctgcccagcgccacccacagcggccaggccacagctgtgctgagcctgctgatcatgctgggcaccctgtggctgggctacaccctgtaccagttcaagaagagcccctacctgcacccctgtgtgcgggagatcctgagtgactgtgccctgcccatcgctgtgctggccttcagcctcatcagcagccacggcttccgggagattgagatgagcaagttccgctacaaccccagcgagagcccctttgccatggcccagatccagagcctgagcctgcgggctgtgtctggggccatgggcctgggcttcctgctgtccatgctgttcttcatcgagcagaacctggtggccgccctggtgaatgcccctgagaaccggctggtgaagggcacagcctaccactgggacctgctgctgctggccatcatcaacacaggcctgagcctgtttggcctgccctggattcatgctgcctacccccacagccccctgcacgtgcgggccctggccctggtggaggagcgggtggagaatggccacatctatgacaccatcgtgaatgtgaaggagacccggctgaccagcctgggcgcctctgtgctggtgggcctgagcctgctgctgctgcctgtgcccctgcagtggatccccaagcctgtgctgtatggcctcttcctgtacatcgccctgaccagcctggatggcaaccagctggtgcagagggtggccctgctgctgaaggagcagacagcctacccacccacccactacatcagaagagtgccccagaggaagatccactacttcaccggcctgcaggtgctgcagctgctgctgctgtgtgccttcggcatgagcagcctgccctacatgaagatgatcttccccctcatcatgattgccatgatccccatccgctacatcctgctgccccgcatcatcgaggccaagtacctggatgtgatggatgctgagcaccggccctag

SEQ ID NO: 170842 - DNA, 951 bp, synthetic construct
  misc_feature 1..951: note = Description of Artificial Sequence: Synthetic coding sequence
  source 1..951: mol_type = other DNA
atggctgctgccacccggcgggtcttccacctgcagccctgtgagaacagccccaccatgagccagaatggctactttgaggacagcagctactacaagtgtgacacagatgacacctttgaggcccgggaggagatcctgggagatgaggcctttgacacagccaacagcagcatcgtgtctggagagagcatccgcttctttgtgaatgtgaacctggagatgcaggccaccaacacagaaaatgaggccaccagcggcggctgtgtgctgctgcacaccagcaggaagtacctgaagctgaagaacttcaaggaggagatccgggcccaccgggacctggatggcttcctggcccaggccagcatcgtgctgaatgaaacagccaccagcctggacaacgtgctgcggaccatgctgcggagatttgcccgggaccctgacaacaatgagcccaactgcaacctggacctgctgatggccatgctgttcacagatgctggggcccccatgaggggcaaggtgcacctgctgagtgacaccatccagggcgtgacagccaccgtgactggagtgcgctaccagcagagctggctgtgcatcatctgcaccatgaaggccctgcagaagagacatgtgtgcatcagccggctggtgcggccccagaactggggcgagaacagctgtgaggtgcgctttgtgatcctggtgctggccccacccaagatgaagagcaccaagacagccatggaggtggcccggacctttgccaccatgttcagtgacatcgccttccggcagaagctgctggagaccaggacagaggaggagttcaaggaggccctggtgcaccagaggcagctgctgaccatggtgagccacggccctgtggcccccaggaccaaggagaggagcacagtgtccctgcctgcccaccgccaccctgagtag

SEQ ID NO: 170843 - DNA, 2628 bp, synthetic construct
  misc_feature 1..2628: note = Description of Artificial Sequence: Synthetic coding sequence
  source 1..2628: mol_type = other DNA
atggctgctgccacccggcgggtcttccacctgcagccctgtgagaacagccccaccatgagccagaatggctactttgaggacagcagctactacaagtgtgacacagatgacacctttgaggcccgggaggagatcctgggagatgaggcctttgacacagccaacagcagcatcgtgtctggagagagcatccgcttctttgtgaatgtgaacctggagatgcaggccaccaacacagaaaatgaggccaccagcggcggctgtgtgctgctgcacaccagcaggaagtacctgaagctgaagaacttcaaggaggagatccgggcccaccgggacctggatggcttcctggcccaggccagcatcgtgctgaatgaaacagccaccagcctggacaacgtgctgcggaccatgctgcggagatttgcccgggaccctgacaacaatgagcccaactgcaacctggacctgctgatggccatgctgttcacagatgctggggcccccatgaggggcaaggtgcacctgctgagtgacaccatccagggcgtgacagccaccgtgactggagtgcgctaccagcagagctggctgtgcatcatctgcaccatgaaggccctgcagaagagacatgtgtgcatcagccggctggtgcggccccagaactggggcgagaacagctgtgaggtgcgctttgtgatcctggtgctggccccacccaagatgaagagcaccaagacagccatggaggtggcccggacctttgccaccatgttcagtgacatcgccttccggcagaagctgctggagaccaggacagaggaggagttcaaggaggccctggtgcaccagaggcagctgctgaccatggtgagccacggccctgtggcccccaggaccaaggagaggagcacagtgtccctgcctgcccaccgccaccctgagccccccaagtgcaaggactttgtgccctttgggaagggcatccgggaggacatcgcccggcgcttccccctgtaccccctggacttcacagatggcatcatcggcaagaacaaggctgtgggcaagtacatcaccaccaccctcttcctgtactttgcctgcctgctgcccaccatcgccttcggcagcctgaatgatgaaaatacagatggagccattgatgtgcagaagaccatcgccggccagagcatcggcggcctgctgtatgccctcttcagcggccagcccctggtgatcctgctgaccacagcccccctggccctgtacatccaggtgatccgggtcatctgtgatgattatgacctggacttcaacagcttctacgcctggacaggcctgtggaacagcttcttcctggccctgtatgccttcttcaacctgagcctggtgatgagcctcttcaagaggagcacagaggagatcatcgccctcttcatcagcatcacctttgtgctggatgctgtgaagggcaccgtgaagatcttctggaagtactactacggccactacctggatgactaccacaccaagaggaccagcagcctggtgtccctgagcggcctgggcgccagcctgaatgccagcctgcacacagccctgaatgccagcttcctggccagccccacagagctgcccagcgccacccacagcggccaggccacagctgtgctgagcctgctgatcatgctgggcaccctgtggctgggctacaccctgtaccagttcaagaagagcccctacctgcacccctgtgtgcgggagatcctgagtgactgtgccctgcccatcgctgtgctggccttcagcctcatcagcagccacggcttccgggagattgagatgagcaagttccgctacaaccccagcgagagcccctttgccatggcccagatccagagcctgagcctgcgggctgtgtctggggccatgggcctgggcttcctgctgtccatgctgttcttcatcgagcagaacctggtggccgccctggtgaatgccccagaaaatcggctggtgaagggcacagcctaccactgggacctgctgctgctggccatcatcaacacaggcctgagcctgtttggcctgccctggattcatgctgcctacccccacagccccctgcacgtgcgggccctggccctggtggaggagcgggtggagaatggccacatctatgacaccatcgtgaatgtgaaggagacccggctgaccagcctgggcgcctctgtgctggtgggcctgagcctgctgctgctgcctgtgcccctgcagtggatccccaagcctgtgctgtatggcctcttcctgtacatcgccctgaccagcctggatggcaaccagctggtgcagagggtggccctgctgctgaaggagcagacagcctacccacccacccactacatccggcgggtgccccagaggaagatccactacttcaccggcctgcaggtgctgcagctgctgctgctgtgtgccttcggcatgagcagcctgccctacatgaagatgatcttccccctcatcatgattgccatgatccccatccgctacatcctgctgccccgcatcatcgaggccaagtacctggatgtgatggatgctgagcaccggccctag

SEQ ID NO: 170844 - DNA, 1113 bp, synthetic construct
  misc_feature 1..1113: note = Description of Artificial Sequence: Synthetic coding sequence
  source 1..1113: mol_type = other DNA
atgaccctggccagccggctgagcacagctgccaacacaggccagattgatgacccccaggagcagcacagggtcatcagcagcaacctggccctgatccaggtgcaggccaccgtggtgggcctgctggccgctgtggccgccctgctgctgggcgtggtgtcccgggaggaggtggatgtggccaaggtggagctgctgtgtgccagctctgtgctgacagccttcctggccgcctttgccctgggcgtgctgatggtgtgcatcgtgattggagccaggaagctgggcgtgaacccagacaacatcgccacccccatcgccgccagcctgggggacctgatcaccctgagcatcctggccctggtgtcctccttcttctaccgccacaaggacagccgctacctgacccccctggtgtgcctgagctttgctgccctgacccctgtgtgggtgctgattgccaagcagagcccccccatcgtgaagatcctgaagtttggctggttccccatcatcctggccatggtgatcagcagctttggaggcctcatcctgagcaagacagtgtccaagcagcagtacaagggcatggccatcttcacccctgtgatctgtggggtgggcggcaacctggtggccatccagaccagccgcatcagcacctacctgcacatgtggagcgcccctggggtgctgcccctgcagatgaagaagttctggcccaacccctgcagcaccttctgcaccagcgagatcaacagcatgtctgcccgggtgctgctgctgctggtggtgcccggccacctgatcttcttctacatcatctacctggtggagggccagagcgtcatcaacagccagacctttgtggtgctgtacctgctggccggcctcatccaggtgaccatcctgctgtacctggccgaggtgatggtgcggctgacctggcaccaggccctggaccctgacaaccactgcatcccctacctgaccggcctgggggacctgctgggcaccggcctgctggccctgtgcttcttcacagactggctgctgaagagcaaggccgagctgggcggcatcagcgagctggccagcggccccccatag

SEQ ID NO: 170845 - DNA, 1542 bp, synthetic construct
  misc_feature 1..1542: note = Description of Artificial Sequence: Synthetic coding sequence
  source 1..1542: mol_type = other DNA
atgagcagcaagccagagcccaaggatgtgcaccagctgaatggcaccggccccagcgccagcccctgcagcagtgatggccctggccgggagcccctggccggcaccagcgagttcctgggcccagatggagctggggtggaggtggtgattgagagccgggccaatgccaagggcgtgcgggaggaggatgccctgctggagaatggcagccagagcaatgaaagtgatgatgtgtccacagaccggggccctgccccacccagccccctgaaggagaccagcttcagcatcggcctgcaggtgctcttccccttcctgctggccggctttggaacagtggccgccggcatggtgctggacatcgtgcagcactgggaggtgttccagaaggtgacagaggtgttcatcctggtgcctgccctgctgggcctgaagggcaacctggagatgaccctggccagccggctgagcacagctgccaacatcggccacatggacacccccaaggagctgtggaggatgatcactggaaacatggccctgatccaggtgcaggccaccgtggtgggcttcctggccagcattgctgctgtggtgtttggctggatcccagatggccacttcagcatcccccacgccttcctgctgtgtgccagctctgtggccacagccttcatcgccagcctggtgctgggcatgatcatgattggagtcatcatcggcagcaggaagattggcatcaacccagacaacgtggccacccccatcgccgccagcctgggggacctgatcaccctggccctgctgagcggcatctcctggggcctgtacctggagctgaaccactggagatacatctaccccctggtgtgtgccttctttgtggccctgctgcctgtgtgggtggtgctggcccggcgcagccctgccacccgggaggtgctgtacagcggctgggagcccgtcatcatcgccatggccatcagctctgtgggcggcctcatcctggacaagacagtgtctgaccccaactttgctggcatggctgtgttcacccctgtgatcaatggagtgggcggcaacctggtggccgtgcaggccagccgcatcagcaccttcctgcacatgaatggcatgcctggagaaaattctgagcaggccccccggcgctgccccagcccctgcaccaccttcttctccccagatgtgaacagccgcagcgcccgggtgctcttcctgctggtggtgcccggccacctggtgttcctgtacaccatcagctgcatgcagggcggccacaccaccctgaccctcatcttcatcatcttctacatgacagctgccctgctgcaggtgctgatcctgctgtacatcgctgactggatggtgcactggatgtggggccggggcctggaccctgacaacttcagcatcccctacctgacagccctgggggacctgctgggcaccggcctgctggccctgtccttccacgtgctgtggctgattggagaccgggacacagatgtgggggactag

SEQ ID NO: 170846 - DNA, 1722 bp, synthetic construct
  misc_feature 1..1722: note = Description of Artificial Sequence: Synthetic coding sequence
  source 1..1722: mol_type = other DNA
atgaccaacagcaagggccgcagcatcacagacaagaccagcggcggccccagcagcggcggcggctttgtggactggaccctgcggctgaacaccatccagagcgacaagttcctgaacctgctgctgtccatggtgcctgtgatctaccagaagaaccaggaggacagacacaagaaggccaacggcatctggcaggacggcctgagcacagctgtgcagaccttcagcaacagaagtgagcagcacatggagtaccacagcttcagcgagcagagcttccacgccaacaacggccacgccagcagcagctgcagccagaagtatgatgattatgccaactacaactactgtgatggccgggagaccagcgagaccacagccatgctgcaggatgaggacatcagcagtgatggagatgaagatgccatcgtggaggtgacccccaagctgcccaaggagagcagcggcatcatggccctgcagatcctggtgcccttcctgctggccggcttcggcaccgtgtctgctggcatggtgctggacatcgtgcagcactgggaggtgttcaggaaggtgacagaggtgttcatcctggtgcctgccctgctgggcctgaagggcaacctggagatgaccctggccagccggctgagcacagctgtgaacatcggcaagatggacagccccatcgagaagtggaacctgatcatcggcaacctggccctgaagcaggtgcaggccaccgtggtgggcttcctggccgctgtggccgccatcatcctgggctggatccctgagggcaagtactacctggaccacagcatcctgctgtgcagcagctctgtggccacagccttcatcgccagcctgctgcagggcatcatcatggtgggcgtgattgtgggcagcaagaagacaggcatcaacccagacaacgtggccacccccatcgccgccagctttggagacctgatcaccctggccatcctggcctggatcagccagggcctgtacagctgcctggagacctactactacatcagccccctggtgggcgtcttcttcctggccctgacccccatctggatcatcatcgccgccaagcacccagccaccaggacagtgctgcacagcggctgggagcctgtgatcacagccatggtgatcagcagcattggaggcctcatcctggacaccaccgtgtctgaccccaacctggtgggcatcgtggtgtacacccctgtgatcaatggcatcggcggcaacctggtggccatccaggccagccgcatcagcacctacctgcacctgcacagcatccctggagagctgcctgatgagcccaagggctgctactaccccttccgcaccttcttcggccctggggtgaacaacaagagcgcccaggtgctgctgctgctggtgattcctggccacctgatcttcctgtacaccatccacctgatgaagagcggccacaccagcctgaccatcatcttcatcgtggtgtacctgtttggagctgtgctgcaggtgttcaccctgctgtggattgctgactggatggtgcaccacttctggaggaagggcaaggaccctgacagcttcagcatcccctacctgacagccctgggggacctgctgggcacagccctgctggccctgtccttccacttcctgtggctgattggagacagagatggagatgtgggggactag

SEQ ID NO: 170847 - DNA, 369 bp, synthetic construct
  misc_feature 1..369: note = Description of Artificial Sequence: Synthetic coding sequence
  source 1..369: mol_type = other DNA
atgaccaacagcaagggccgcagcatcacagacaagaccagcggcggccccagcagcggcggcggctttgtggactggaccctgcggctgaacaccatccagagcgacaagttcctgaacctgctgctgtccatggtgcctgtgatctaccagaagaaccaggaggacagacacaagaaggccaacggcatctggcaggacggcctgagcacagctgtgcagaccttcagcaacagaagtgagcagcacatggagtaccacagcttcagcgagcagagcttccacgccaacaacggccacgccagcagcagctgcagccagaagtatgatgattatgccaactacaactactgtgatggccgggagtag

SEQ ID NO: 170848 - DNA, 432 bp, synthetic construct
  misc_feature 1..432: note = Description of Artificial Sequence: Synthetic coding sequence
  source 1..432: mol_type = other DNA
atgaccaacagcaagggccgcagcatcacagacaagaccagcggcggccccagcagcggcggcggctttgtggactggaccctgcggctgaacaccatccagagcgacaagttcctgaacctgctgctgtccatggtgcctgtgatctaccagaagaaccaggaggacagacacaagaaggccaacggcatctggcaggacggcctgagcacagctgtgcagaccttcagcaacagaagtgagcagcacatggagtaccacagcttcagcgagcagagcttccacgccaacaacggccacgccagcagcagctgcagccagaagtatgatgattatgccaactacaactactgtgatggccgggagaccagcgagaccacagccatgctgcaggatgaggacatcagcagtgatggagatgaagatgcctag

SEQ ID NO: 170849 - DNA, 141 bp, synthetic construct
  misc_feature 1..141: note = Description of Artificial Sequence: Synthetic coding sequence
  source 1..141: mol_type = other DNA
atgaccaacagcaagggccgcagcatcacagacaagaccagcggcggccccagcagcggcggcggctttgtggactggaccctgcggctgaacaccatccagagcgacaagttcctgaacctgctgctgtccatggtgtag

SEQ ID NO: 170850 - DNA, 219 bp, synthetic construct
  misc_feature 1..219: note = Description of Artificial Sequence: Synthetic coding sequence
  source 1..219: mol_type = other DNA
atgaccaacagcaagggccgcagcatcacagacaagaccagcggcggccccagcagcggcggcggctttgtggactggaccctgcggctgaacaccatccagagcgacaagttcctgaacctgctgctgtccatggtgcctgtgatctaccagaagaaccaggaggacagacacaagaaggccaacggcatctggcaggacggcctgagcacagcctag

SEQ ID NO: 170851 - DNA, 39 bp, synthetic construct
  misc_feature 1..39: note = Description of Artificial Sequence: Synthetic coding sequence
  source 1..39: mol_type = other DNA
atgaccaacagcaagggccgcagcatcacagacaagtag

SEQ ID NO: 170852 - DNA, 231 bp, synthetic construct
  misc_feature 1..231: note = Description of Artificial Sequence: Synthetic coding sequence
  source 1..231: mol_type = other DNA
atgaccaacagcaagggccgcagcatcacagacaagaccagcggcggccccagcagcggcggcggctttgtggactggaccctgcggctgaacaccatccagagcgacaagttcctgaacctgctgctgtccatggtgcctgtgatctaccagaagaaccaggaggacagacacaagaaggccaacggcatctggcaggacggcctgagcacagctgtgcagaccttctag

SEQ ID NO: 170853 - DNA, 285 bp, synthetic construct
  misc_feature 1..285: note = Description of Artificial Sequence: Synthetic coding sequence
  source 1..285: mol_type = other DNA
atgaccaacagcaagggccgcagcatcacagacaagaccagcggcggccccagcagcggcggcggctttgtggactggaccctgcggctgaacaccatccagagcgacaagttcctgaacctgctgctgtccatggtgcctgtgatctaccagaagaaccaggaggacagacacaagaaggccaacggcatctggcaggacggcctgagcacagctgtgcagaccttcagcaacagaagtgagcagcacatggagtaccacagcttcagcgagcagagcttctag

SEQ ID NO: 170854 - DNA, 1524 bp, synthetic construct
  misc_feature 1..1524: note = Description of Artificial Sequence: Synthetic coding sequence
  source 1..1524: mol_type = other DNA
atggatggaacagagacccggcagaggcggctggacagctgtgggaagccaggagagctgggcctgccccaccccctgagcactggaggcctgcctgtggcctctgaagatggagccctgcgggcccctgagagccagagcgtgacccccaagcccctggagacagagcccagccgggagaccacctggagcatcggcctgcaggtgacagtgcccttcatgtttgctggcctgggcctgtcctgggccggcatgctgctggactacttccagcactggcctgtgtttgtggaggtgaaggacctgctgaccctggtgccccccctggtgggcctgaagggcaacctggagatgaccctggccagccggctgagcacagctgccaacacaggccagattgatgacccccaggagcagcacagggtcatcagcagcaacctggccctgatccaggtgcaggccaccgtggtgggcctgctggccgctgtggccgccctgctgctgggcgtggtgtcccgggaggaggtggatgtggccaaggtggagctgctgtgtgccagctctgtgctgacagccttcctggccgcctttgccctgggcgtgctgatggtgtgcatcgtcatcggggccaggaagctgggcgtgaacccagacaacatcgccacccccatcgccgccagcctgggggacctgatcaccctgagcatcctggccctggtgagcagcttcttctaccgccacaaggacagccgctacctgacccccctggtgtgcctgagctttgctgccctgacccctgtgtgggtgctgattgccaagcagagcccccccatcgtgaagatcctgaagtttggctggttccccatcatcctggccatggtgatcagcagctttggaggcctcatcctgagcaagacagtgtccaagcagcagtacaagggcatggccatcttcacccctgtgatctgtggggtgggcggcaacctggtggccatccagaccagccgcatcagcacctacctgcacatgtggagcgcccctggggtgctgcccctgcagatgaagaagttctggcccaacccctgcagcaccttctgcaccagcgagatcaacagcatgtctgcccgggtgctgctgctgctggtggtgcccggccacctgatcttcttctacatcatctacctggtggagggccagagcgtcatcaacagccagacctttgtggtgctgtacctgctggccggcctcatccaggtgaccatcctgctgtacctggccgaggtgatggtgcggctgacctggcaccaggccctggaccctgacaaccactgcatcccctacctgaccggcctgggggacctgctgggcagcagctctgtgggccacacagctgctgtgccccggcgctgcacagccagccctggctggggcctcatccagcccttcatctgcacccagcacctgattgtgtccctgctgtccttctacttccccttctgcctgctggccaagaccagcatctag

SEQ ID NO: 170855 - DNA, 1416 bp, synthetic construct
  misc_feature 1..1416: note = Description of Artificial Sequence: Synthetic coding sequence
  source 1..1416: mol_type = other DNA
atggatggaacagagacccggcagaggcggctggacagctgtgggaagccaggagagctgggcctgccccaccccctgagcactggaggcctgcctgtggcctctgaagatggagccctgcgggcccctgagagccagagcgtgacccccaagcccctggagacagagcccagccgggagaccacctggagcatcggcctgcaggtgacagtgcccttcatgtttgctggcctgggcctgtcctgggccggcatgctgctggactacttccaggccaacacaggccagattgatgacccccaggagcagcacagggtcatcagcagcaacctggccctgatccaggtgcaggccaccgtggtgggcctgctggccgctgtggccgccctgctgctgggcgtggtgtcccgggaggaggtggatgtggccaaggtggagctgctgtgtgccagctctgtgctgacagccttcctggccgcctttgccctgggcgtgctgatggtgtgcatcgtcatcggggccaggaagctgggcgtgaacccagacaacatcgccacccccatcgccgccagcctgggggacctgatcaccctgagcatcctggccctggtgagcagcttcttctaccgccacaaggacagccgctacctgacccccctggtgtgcctgagctttgctgccctgacccctgtgtgggtgctgattgccaagcagagcccccccatcgtgaagatcctgaagtttggctggttccccatcatcctggccatggtgatcagcagctttggaggcctcatcctgagcaagacagtgtccaagcagcagtacaagggcatggccatcttcacccctgtgatctgtggggtgggcggcaacctggtggccatccagaccagccgcatcagcacctacctgcacatgtggagcgcccctggggtgctgcccctgcagatgaagaagttctggcccaacccctgcagcaccttctgcaccagcgagatcaacagcatgtctgcccgggtgctgctgctgctggtggtgcccggccacctgatcttcttctacatcatctacctggtggagggccagagcgtcatcaacagccagacctttgtggtgctgtacctgctggccggcctcatccaggtgaccatcctgctgtacctggccgaggtgatggtgcggctgacctggcaccaggccctggaccctgacaaccactgcatcccctacctgaccggcctgggggacctgctgggcagcagctctgtgggccacacagctgctgtgccccggcgctgcacagccagccctggctggggcctcatccagcccttcatctgcacccagcacctgattgtgtccctgctgtccttctacttccccttctgcctgctggccaagaccagcatctag

SEQ ID NO: 170856 - DNA, 1464 bp, synthetic construct
  misc_feature 1..1464: note = Description of Artificial Sequence: Synthetic coding sequence
  source 1..1464: mol_type = other DNA
atggatggaacagagacccggcagaggcggctggacagctgtgggaagccaggagagctgggcctgccccaccccctgagcactggaggcctgcctgtggcctctgaagatggagccctgcgggcccctgagagccagagcgtgacccccaagcccctggagacagagcccagccgggagaccacctggagcatcggcctgcaggtgacagtgcccttcatgtttgctggcctgggcctgtcctgggccggcatgctgctggactacttccagcactggcctgtgtttgtggaggtgaaggacctgctgaccctggtgccccccctggtgggcctgaagggcaacctggagatgaccctggccagccggctgagcacagctgccaacacaggccagattgatgacccccaggagcagcacagggtcatcagcagcaacctggccctgatccaggtgcaggccaccgtggtgggcctgctggccgctgtggccgccctgctgctgggcgtggtgtcccgggaggaggtggatgtggccaaggtggagctgctgtgtgccagctctgtgctgacagccttcctggccgcctttgccctgggcgtgctgatggtgtgcatcgtcatcggggccaggaagctgggcgtgaacccagacaacatcgccacccccatcgccgccagcctgggggacctgatcaccctgagcatcctggccctggtgagcagcttcttctaccgccacaaggacagccgctacctgacccccctggtgtgcctgagctttgctgccctgacccctgtgtgggtgctgattgccaagcagagcccccccatcgtgaagatcctgaagtttggctggttccccatcatcctggccatggtgatcagcagctttggaggcctcatcctgagcaagacagtgtccaagcagcagtacaagggcatggccatcttcacccctgtgatctgtggggtgggcggcaacctggtggccatccagaccagccgcatcagcacctacctgcacatgtggagcgcccctggggtgctgcccctgcagatgaagaagttctggcccaacccctgcagcaccttctgcaccagcgagatcaacagcatgtctgcccgggtgctgctgctgctggtggtgcccggccacctgatcttcttctacatcatctacctggtggagggccagagcgtcatcaacagccagacctttgtggtgctgtacctgctggccggcctcatccaggtgaccatcctgctgtacctggccgaggtgatggtgcggctgacctggcaccaggccctggaccctgacaaccactgcatcccctacctgaccggcctgggggacctgctgggcaccggcctgctggccctgtgcttcttcacagactggctgctgaagagcaaggccgagctgggcggcatcagcgagctggccagcggccccccatag

SEQ ID NO: 170857 - DNA, 1386 bp, synthetic construct
  misc_feature 1..1386: note = Description of Artificial Sequence: Synthetic coding sequence
  source 1..1386: mol_type = other DNA
atggtggtgacccagctgaacctggagttctgcttccagggcaagaagctgcggggcttcagctgtgagctgaccaggagcccccatggagtgctgcctgagagcttcttcaccatcatgtgccaggtggtggtgcccatcctgctgagcggcctgtgcatgatgacagctggcctggtgatgaacaccatccagcactggcctgtgtttgtggaggtgaaggacctgctgaccctggtgccccccctggtgggcctgaagggcaacctggagatgaccctggccagccggctgagcacagctgccaacacaggccagattgatgacccccaggagcagcacagggtcatcagcagcaacctggccctgatccaggtgcaggccaccgtggtgggcctgctggccgctgtggccgccctgctgctgggcgtggtgtcccgggaggaggtggatgtggccaaggtggagctgctgtgtgccagctctgtgctgacagccttcctggccgcctttgccctgggcgtgctgatggtgtgcatcgtcatcggggccaggaagctgggcgtgaacccagacaacatcgccacccccatcgccgccagcctgggggacctgatcaccctgagcatcctggccctggtgagcagcttcttctaccgccacaaggacagccgctacctgacccccctggtgtgcctgagctttgctgccctgacccctgtgtgggtgctgattgccaagcagagcccccccatcgtgaagatcctgaagtttggctggttccccatcatcctggccatggtgatcagcagctttggaggcctcatcctgagcaagacagtgtccaagcagcagtacaagggcatggccatcttcacccctgtgatctgtggggtgggcggcaacctggtggccatccagaccagccgcatcagcacctacctgcacatgtggagcgcccctggggtgctgcccctgcagatgaagaagttctggcccaacccctgcagcaccttctgcaccagcgagatcaacagcatgtctgcccgggtgctgctgctgctggtggtgcccggccacctgatcttcttctacatcatctacctggtggagggccagagcgtcatcaacagccagacctttgtggtgctgtacctgctggccggcctcatccaggtgaccatcctgctgtacctggccgaggtgatggtgcggctgacctggcaccaggccctggaccctgacaaccactgcatcccctacctgaccggcctgggggacctgctgggcaccggcctgctggccctgtgcttcttcacagactggctgctgaagagcaaggccgagctgggcggcatcagcgagctggccagcggccccccatag

SEQ ID NO: 170858 - DNA, 1437 bp, synthetic construct
  misc_feature 1..1437: note = Description of Artificial Sequence: Synthetic coding sequence
  source 1..1437: mol_type = other DNA
atggatggaacagagacccggcagaggcggctggacagctgtgggaagccaggagagctgggcctgccccaccccctgagcactggaggcctgcctgtggcctctgaagatggagccctgcgggcccctgagagccagagcgtgacccccaagcccctggagacagagcccagccgggtgacagtgcccttcatgtttgctggcctgggcctgtcctgggccggcatgctgctggactacttccagcactggcctgtgtttgtggaggtgaaggacctgctgaccctggtgccccccctggtgggcctgaagggcaacctggagatgaccctggccagccggctgagcacagctgccaacacaggccagattgatgacccccaggagcagcacagggtcatcagcagcaacctggccctgatccaggtgcaggccaccgtggtgggcctgctggccgctgtggccgccctgctgctgggcgtggtgtcccgggaggaggtggatgtggccaaggtggagctgctgtgtgccagctctgtgctgacagccttcctggccgcctttgccctgggcgtgctgatggtgtgcatcgtgattggagccaggaagctgggcgtgaacccagacaacatcgccacccccatcgccgccagcctgggggacctgatcaccctgagcatcctggccctggtgtcctccttcttctaccgccacaaggacagccgctacctgacccccctggtgtgcctgagctttgctgccctgacccctgtgtgggtgctgattgccaagcagagcccccccatcgtgaagatcctgaagtttggctggttccccatcatcctggccatggtgatcagcagctttggaggcctcatcctgagcaagacagtgtccaagcagcagtacaagggcatggccatcttcacccctgtgatctgtggggtgggcggcaacctggtggccatccagaccagccgcatcagcacctacctgcacatgtggagcgcccctggggtgctgcccctgcagatgaagaagttctggcccaacccctgcagcaccttctgcaccagcgagatcaacagcatgtctgcccgggtgctgctgctgctggtggtgcccggccacctgatcttcttctacatcatctacctggtggagggccagagcgtcatcaacagccagacctttgtggtgctgtacctgctggccggcctcatccaggtgaccatcctgctgtacctggccgaggtgatggtgcggctgacctggcaccaggccctggaccctgacaaccactgcatcccctacctgaccggcctgggggacctgctgggcaccggcctgctggccctgtgcttcttcacagactggctgctgaagagcaaggccgagctgggcggcatcagcgagctggccagcggccccccatag

SEQ ID NO: 170859 - DNA, 459 bp, synthetic construct
  misc_feature 1..459: note = Description of Artificial Sequence: Synthetic coding sequence
  source 1..459: mol_type = other DNA
atggatggaacagagacccggcagaggcggctggacagctgtgggaagccaggagagctgggcctgccccaccccctgagcactggaggcctgcctgtggcctctgaagatggagccctgcgggcccctgagagccagagcgtgacccccaagcccctggagacagagcccagccgggagaccacctggagcatcggcctgcaggtgacagtgcccttcatgtttgctggcctgggcctgtcctgggccggcatgctgctggactacttccagcactggcctgtgtttgtggaggtgaaggacctgctgaccctggtgccccccctggtgggcctgaagggcaacctggagatgaccctggccagccggctgagcacagctgccaacacaggccagattgatgacccccaggagcagcacagggtcatcagcagcaacctggccctgatccaggtgtag

SEQ ID NO: 170860 - DNA, 459 bp, synthetic construct; identical to SEQ ID NO: 170859
  misc_feature 1..459: note = Description of Artificial Sequence: Synthetic coding sequence
  source 1..459: mol_type = other DNA

SEQ ID NO: 170861 - DNA, 261 bp, synthetic construct
  misc_feature 1..261: note = Description of Artificial Sequence: Synthetic coding sequence
  source 1..261: mol_type = other DNA
atggatggaacagagacccggcagaggcggctggacagctgtgggaagccaggagagctgggcctgccccaccccctgagcactggaggcctgcctgtggcctctgaagatggagccctgcgggcccctgagagccagagcgtgacccccaagcccctggagacagagcccagccgggagaccacctggagcatcggcctgcaggtgacagtgcccttcatgtttgctggcctgggcctgtcctgggccggcatgctgtag

SEQ ID NO: 170862 - DNA, 606 bp, synthetic construct
  misc_feature 1..606: note = Description of Artificial Sequence: Synthetic coding sequence
  source 1..606: mol_type = other DNA
atggatggaacagagacccggcagaggcggctggacagctgtgggaagccaggagagctgggcctgccccaccccctgagcactggaggcctgcctgtggcctctgaagatggagccctgcgggcccctgagagccagagcgtgacccccaagcccctggagacagagcccagccgggagaccacctggagcatcggcctgcaggtgacagtgcccttcatgtttgctggcctgggcctgtcctgggccggcatgctgctggactacttccagcactggcctgtgtttgtggaggtgaaggacctgctgaccctggtgccccccctggtgggcctgaagggcaacctggagatgaccctggccagccggctgagcacagctgccaacacaggccagattgatgacccccaggagcagcacagggtcatcagcagcaacctggccctgatccaggtgcaggccaccgtggtgggcctgctggccgctgtggccgccctgctgctgggcgtggtgtcccgggaggaggtggatgtggccaaggtggagctgctgtgtgccagctctgtgctgacagccttcctggccgcctttgccctgggggagtag

SEQ ID NO: 170863 - DNA, 414 bp, synthetic construct
  misc_feature 1..414: note = Description of Artificial Sequence: Synthetic coding sequence
  source 1..414: mol_type = other DNA
atggatggaacagagacccggcagaggcggctggacagctgtgggaagccaggagagctgggcctgccccaccccctgagcactggaggcctgcctgtggcctctgaagatggagccctgcgggcccctgagagccagagcgtgacccccaagcccctggagacagagcccagccgggagaccacctggagcatcggcctgcaggtgacagtgcccttcatgtttgctggcctgggcctgtcctgggccggcatgctgctggactacttccaggccaacacaggccagattgatgacccccaggagcagcacagggtcatcagcagcaacctggccctgatccaggtgcaggccaccgtggtgggcctgctggccgctgtggccgccctgctgctgggcgtggtgtccaggtag

SEQ ID NO: 170864 - DNA, 459 bp, synthetic construct; identical to SEQ ID NO: 170859
  misc_feature 1..459: note = Description of Artificial Sequence: Synthetic coding sequence
  source 1..459: mol_type = other DNA

SEQ ID NO: 170865 - DNA, 1680 bp, synthetic construct
  misc_feature 1..1680: note = Description of Artificial Sequence: Synthetic coding sequence
  source 1..1680: mol_type = other DNA
atggcccccaccctgcagcaggcctacagaagacgctggtggatggcctgcacagctgtgctggagaacctcttcttctctgctgtgctgctgggctggggcagcctgctgatcatcctgaagaatgaaggcttctacagcagcacctgcccagctgagagcagcaccaacaccacccaggatgagcagaggcgctggccaggctgtgaccagcaggatgagatgctgaacctgggcttcaccatcggcagctttgtgctgagcgccaccaccctgcccctgggcatcctgatggacagatttggccccaggcctgtgcggctggtgggcagcgcctgcttcaccgccagctgcaccctgatggccctggccagcagagatgtggaggccctgagccccctcatcttcctggccctgagcctgaatggatttggaggcatctgcctgaccttcaccagcctgaccctgcccaacatgtttggaaacctgcggagcaccctgatggccctgatgattggcagctatgccagcagcgccatcaccttccctggcatcaagctgatctatgatgctggggtggcctttgtggtgatcatgttcacctggagcggcctggcctgcctgatcttcctgaactgcaccctgaactggcccatcgaggccttccctgcccctgaggaggtgaactacaccaagaagatcaagctgagcggcctggccctggaccacaaggtgactggagacctcttctacacccacgtgaccaccatgggccagaggctgagccagaaggcccccagcctggaggatggcagtgatgccttcatgagcccccaggatgtgcggggcaccagcgagaacctgcctgagaggtctgtgcccctgaggaagagcctgtgcagccccaccttcctgtggagcctgctgaccatgggcatgacccagctgcgcatcatcttctacatggctgctgtgaacaagatgctggagtacctggtgactggaggccaggagcacgagaccaatgagcagcagcagaaggtggccgagaccgtgggcttctacagctctgtgtttggagccatgcagctgctgtgcctgctgacctgccccctgattggctacatcatggactggaggatcaaggactgtgtggatgcccccacccagggcaccgtgctgggagatgccagagatggagtggccaccaagagcatccggccccgctactgcaagatccagaagctgaccaatgccatcagcgccttcaccctgaccaacctgctgctggtgggcttcggcatcacctgcctgatcaacaacctgcacctgcagtttgtgacctttgtgctgcacaccatcgtgcggggcttcttccacagcgcctgtggcagcctgtatgctgctgtgttccccagcaaccacttcggcaccctgaccggcctgcagagcctcatctctgctgtgtttgccctgctgcagcagcccctcttcatggccatggtgggccccctgaagggggagcccttctgggtgaacctgggcctgctgctcttcagcctgctgggcttcctgctgcccagctacctgttctactaccgggcccggctgcagcaggagtatgctgccaacggcatgggccccctgaaggtgctgagcggcagcgaggtgacagcctag

SEQ ID NO: 170866 - DNA, 1680 bp, synthetic construct; identical to SEQ ID NO: 170865
  misc_feature 1..1680: note = Description of Artificial Sequence: Synthetic coding sequence
  source 1..1680: mol_type = other DNA

SEQ ID NO: 170867 - DNA, 333 bp, synthetic construct
  misc_feature 1..333: note = Description of Artificial Sequence: Synthetic coding sequence
  source 1..333: mol_type = other DNA
atggcccccaccctgcagcaggcctacagaagacgctggtggatggcctgcacagctgtgctggagaacctcttcttctctgctgtgctgctgggctggggcagcctgctgatcatcctgaagaatgaaggcttctacagcagcacctgcccagctgagagcagcaccaacaccacccaggatgagcagaggcgctggccaggctgtgaccagcaggatgagatgctgaacctgggcttcaccatcggcagctttgtgctgagcgccaccaccctgcccctgggcatcctgatggacagatttggccccaggcctgtgcggctggtgggctag

SEQ ID NO: 170868 - DNA, 1710 bp, synthetic construct
  misc_feature 1..1710: note = Description of Artificial Sequence: Synthetic coding sequence
  source 1..1710: mol_type = other DNA
atggcccccaccctggccacagcccacagaagacgctggtggatggcctgcacagctgtgctggagaacctgctcttctctgctgtgctgctgggctggggcagcctgctgatcatgctgaagtctgagggcttctacagctacctgtgcacagagccagaaaatgtgaccaacggcaccgtgggcggcacagctgagcccggccacgaggaggtgtcctggatgaatggctggctgagctgccaggcccaggatgagatgctgaacctggccttcaccgtgggcagcttcctgctgagcgccatcaccctgcccctgggcatcgtgatggacaagtatggccccaggaagctgcggctgctgggcagcgcctgctttgctgtgtcctgcctgctgattgcctatggagccagcaagcccaatgccctgtctgtgctgatcttcatcgccctggccctgaatggatttggaggcatgtgcatgaccttcaccagcctgaccctgcccaacatgtttggagacctgcggagcaccttcatcgccctgatgattggcagctatgccagcagcgctgtgaccttccctggcatcaagctgatctatgatgctggggtgtccttcatcgtggtgctggtggtgtgggccggctgcagcggcctggtgttcctgaactgcttcttcaactggcccctggagcccttccctggccctgaggacatggactacagcgtgaagatcaagttctcctggctgggctttgaccacaagatcaccgggaagcagttctacaagcaggtgaccaccgtgggccgccgcctgtctgtgggcagctccatgaggtctgccaaggagcaggtggccctgcaggagggccacaagctgtgcctgagcacagtggacctggaggtgaagtgccagccagatgctgctgtggcccccagcttcatgcacagcgtcttcagccccatcctgctgctgagcctggtgaccatgtgtgtgacccagctgcggctcatcttctacatgggcgccatgaacaacatcctgaagttcctggtgtctggggaccagaagacagtgggcctgtacaccagcatctttggagtgctgcagctgctgtgcctgctgacagcccctgtgattggctacatcatggactggaggctgaaggaatgtgaagatgccagcgaggagcctgaggagaaggatgccaaccagggcgagaagaagaagaagaagagggaccggcagatccagaagatcaccaatgccatgagggcctttgccttcaccaacctgctgctggtgggcttcggcgtgacctgcctgatccccaacctgcccctgcagatcctgtccttcatcctgcacaccatcgtgcggggcttcatccacagcgctgtgggcggcctgtatgctgctgtgtaccccagcacccagtttggcagcctgaccggcctgcagagcctcatcagcgccctgtttgccctgctgcagcagcccctcttcctggccatgatgggccccctgcagggcgaccccctgtgggtgaatgtgggcctgctgctgctgagcctgctgggcttctgcctgcccctgtacctgatctgctaccgccggcagctggagcggcagctgcagcagaggcaggaggatgacaagctgttcctgaagatcaatggcagcagcaaccaggaggcctttgtgtag

SEQ ID NO: 170869 - DNA, 1722 bp, synthetic construct
  misc_feature 1..1722: note = Description of Artificial Sequence: Synthetic coding sequence
  source 1..1722: mol_type = other DNA
atggcccccaccctggccacagcccacagaagacgctggtggatggcctgcacagctgtgctggagaacctgctcttctctgctgtgctgctgggctggggcagcctgctgatcatgctgaagtctgagggcttctacagctacctgtgcacagagccagaaaatgtgaccaacggcaccgtgggcggcacagctgagcccggccacgaggaggtgtcctggatgaatggctggctgagctgccaggcccaggatgagatgctgaacctggccttcaccgtgggcagcttcctgctgagcgccatcaccctgcccctgggcatcgtgatggacaagtatggccccaggaagctgcggctgctgggcagcgcctgctttgctgtgtcctgcctgctgattgcctatggagccagcaagcccaatgccctgtctgtgctgatcttcatcgccctggccctgaatggatttggaggcatgtgcatgaccttcaccagcctgaccctgcccaacatgtttggagacctgcggagcaccttcatcgccctgatgattggcagctatgccagcagcgctgtgaccttccctggcatcaagctgatctatgatgctggggtgtccttcatcgtggtgctggtggtgtgggccggctgcagcggcctggtgttcctgaactgcttcttcaactggcccctggagcccttccctggccctgaggacatggactacagcgtgaagatcaagttctcctggctgggctttgaccacaagatcaccgggaagcagttctacaagcaggtgaccaccgtgggccgccgcctgtctgtgggcagctccatgaggtctgccaaggagcaggtggccctgcaggagggccacaagctgtgcctgagcacagtggacctggaggtgaagtgccagccagatgctgctgtggcccccagcttcatgcacagcgtcttcagccccatcctgctgctgagcctggtgaccatgtgtgtgacccagctgcggctcatcttctacatgggcgccatgaacaacatcctgaagttcctggtgtctggggaccagaagacagccagcagcacagtgggcctgtacaccagcatctttggagtgctgcagctgctgtgcctgctgacagcccctgtgattggctacatcatggactggaggctgaaggaatgtgaagatgccagcgaggagcctgaggagaaggatgccaaccagggcgagaagaagaagaagaagagggaccggcagatccagaagatcaccaatgccatgagggcctttgccttcaccaacctgctgctggtgggcttcggcgtgacctgcctgatccccaacctgcccctgcagatcctgtccttcatcctgcacaccatcgtgcggggcttcatccacagcgctgtgggcggcctgtatgctgctgtgtaccccagcacccagtttggcagcctgaccggcctgcagagcctcatcagcgccctgtttgccctgctgcagcagcccctcttcctggccatgatgggccccctgcagggcgaccccctgtgggtgaatgtgggcctgctgctgctgagcctgctgggcttctgcctgcccctgtacctgatctgctaccgccggcagctggagcggcagctgcagcagaggcaggaggatgacaagctgttcctgaagatcaatggcagcagcaaccaggaggcctttgtgtag

SEQ ID NO: 170870 - DNA, 1299 bp, synthetic construct
  misc_feature 1..1299: note = Description of Artificial Sequence: Synthetic coding sequence
  source 1..1299: mol_type = other DNA
atgacctacggcagcccccaggccaatgccagccccagtgatgctgtggccctggaccacggggaggtgtcccggcggcagcagcaggagctgcccaacatgtttggagacctgcggagcaccttcatcgccctgatgattggcagctatgccagcagcgctgtgaccttccctggcatcaagctgatctatgatgctggggtgtccttcatcgtggtgctggtggtgtgggccggctgcagcggcctggtgttcctgaactgcttcttcaactggcccctggagcccttccctggccctgaggacatggactacagcgtgaagatcaagttctcctggctgggctttgaccacaagatcaccgggaagcagttctacaagcaggtgaccaccgtgggccggcggctgtctgtgggcagctccatgaggtctgccaaggagcaggtggccctgcaggagggccacaagctgtgcctgagcacagtggacctggaggtgaagtgccagccagatgctgctgtggcccccagcttcatgcacagcgtcttcagccccatcctgctgctgagcctggtgaccatgtgtgtgacccagctgcggctcatcttctacatgggcgccatgaacaacatcctgaagttcctggtgtctggggaccagaagacagtgggcctgtacaccagcatcttcggcgtgctgcagctgctgtgcctgctgacagcccctgtgattggctacatcatggactggaggctgaaggaatgtgaagatgccagcgaggagcctgaggagaaggatgccaaccagggcgagaagaagaagaagaagagggaccggcagatccagaagatcaccaatgccatgagggcctttgccttcaccaacctgctgctggtgggctttggagtgacctgcctgatccccaacctgcccctgcagatcctgtccttcatcctgcacaccatcgtgcggggcttcatccacagcgctgtgggcggcctgtatgctgctgtgtaccccagcacccagtttggcagcctgaccggcctgcagagcctcatcagcgccctgtttgccctgctgcagcagcccctcttcctggccatgatgggccccctgcagggcgaccccctgtgggtgaatgtgggcctgctgctgctgagcctgctgggcttctgcctgcccctgtacctgatctgctaccgccggcagctggagcggcagctgcagcagaggcaggaggatgacaagctgttcctgaagatcaatggcagcagcaaccaggaggcctttgtgtag

SEQ ID NO: 170871 - DNA, 1341 bp, synthetic construct
  misc_feature 1..1341: note = Description of Artificial Sequence: Synthetic coding sequence
  source 1..1341: mol_type = other DNA
atgaccagcaaggagatcatcctgggcctgtgcctgctgagcctggtgctgtccatgatcctgatggtgatcatccgctacatcagccgggtgctggtgtggatcctgaccatcctggtgatcctgggcagcctgggcggcaccggggtgctgtggtggctgtatgccaagcagaggaggagccccaaggagaccgtgaccccagagcagctgcagattgctgaggacaacctgcgggccctgctgatctatgccatcagcgccaccgtcttcaccgtcatcctcttcctgatcatgctggtgatgaggaagagggtggccctgaccatcgccctcttccacgtggccggcaaggtgttcatccacctgcccctgctggtgttccagcccttctggaccttctttgccctggtgctcttctgggtgtactggatcatgaccctgctcttcctgggcaccaccggcagccctgtgcagaatgagcagggctttgtggagttcaagatcagcggccccctgcagtacatgtggtggtaccacgtggtgggcctcatctggatcagcgagttcatcctggcctgccagcagatgacagtggccggggctgtggtgacctactacttcacccgggacaagaggaacctgcccttcacccccatcctggcctctgtgaacagactcatccgctaccacctgggcaccgtggccaagggcagcttcatcatcaccctggtgaagatccccaggatgatcctgatgtacatccacagccagctgaagggcaaggaaaatgcctgtgcccgctgtgtgctgaagagctgcatctgctgcctgtggtgcctggagaagtgcctgaactacctgaaccagaatgcctacacagccacagccatcaacagcaccaacttctgcaccagcgccaaggatgcctttgtgatcctggtggagaatgccctgcgggtggccaccatcaacacagtgggggacttcatgctgttcctgggcaaggtgctgattgtgtgcagcacaggcctggccggcatcatgctgctgaactaccagcaggactacacagtgtgggtgctgcccctcatcatcgtgtgcctgtttgccttcctggtggcccactgcttcctgagcatctatgagatggtggtggatgtgctcttcctgtgctttgccatcgacaccaagtacaatgatggcagccctggccgggagttctacatggacaaggtgctgatggagtttgtggagaacagcaggaaggccatgaaggaggccggcaagggcggcgtggccgacagccgggagctgaagcccatgctgaagaagaggtag

SEQ ID NO: 170872 - DNA, 1974 bp, synthetic construct
  misc_feature 1..1974: note = Description of Artificial Sequence: Synthetic coding sequence
  source 1..1974: mol_type = other DNA
atgggctgctgcagcagcgccagcagcgctgcccagagcagcaagcgggagtggaagcccctggaggacaggagctgcacagacatcccctggctgctgctcttcatcctcttctgcatcggcatgggcttcatctgtggcttcagcatcgccaccggggctgctgcccggctggtgtctggctatgacagctatggcaacatctgtggccagaagaacaccaagctggaggccatccccaacagcggcatggaccacacccagaggaaatatgtgttcttcctggacccctgcaacctggacctgatcaacaggaagatcaagtctgtggccctgtgtgtggccgcctgcccccggcaggagctgaagaccctgagtgatgtgcagaagtttgctgagatcaatggaagtgccctgtgcagctacaacctgaagcccagcgagtacaccaccagccccaagagctctgtgctgtgccccaagctgcctgtgcctgccagcgcccccatccccttcttccaccgctgtgcccctgtgaacatcagctgctacgccaagtttgctgaggccctgatcacctttgtgtctgacaacagcgtgctgcacaggctcatcagcggcgtgatgaccagcaaggagatcatcctgggcctgtgcctgctgagcctggtgctgtccatgatcctgatggtgatcatccgctacatcagccgggtgctggtgtggatcctgaccatcctggtgatcctgggcagcctgggcggcaccggggtgctgtggtggctgtatgccaagcagaggaggagccccaaggagaccgtgaccccagagcagctgcagattgctgaggacaacctgcgggccctgctgatctatgccatcagcgccaccgtcttcaccgtcatcctcttcctgatcatgctggtgatgaggaagagggtggccctgaccatcgccctcttccacgtggccggcaaggtgttcatccacctgcccctgctggtgttccagcccttctggaccttctttgccctggtgctcttctgggtgtactggatcatgaccctgctcttcctgggcaccaccggcagccctgtgcagaatgagcagggctttgtggagttcaagatcagcggccccctgcagtacatgtggtggtaccacgtggtgggcctcatctggatcagcgagttcatcctggcctgccagcagatgacagtggccggggctgtggtgacctactacttcacccgggacaagaggaacctgcccttcacccccatcctggcctctgtgaacagactcatccgctaccacctgggcaccgtggccaagggcagcttcatcatcaccctggtgaagatccccaggatgatcctgatgtacatccacagccagctgaagggcaaggaaaatgcctgtgcccgctgtgtgctgaagagctgcatctgctgcctgtggtgcctggagaagtgcctgaactacctgaaccagaatgcctacacagccacagccatcaacagcaccaacttctgcaccagcgccaaggatgcctttgtgatcctggtggagaatgccctgcgggtggccaccatcaacacagtgggggacttcatgctgttcctgggcaaggtgctgattgtgtgcagcacaggcctggccggcatcatgctgctgaactaccagcaggactacacagtgtgggtgctgcccctcatcatcgtgtgcctgtttgccttcctggtggcccactgcttcctgagcatctatgagatggtggtggatgtgctcttcctgtgctttgccatcgacaccaagtacaatgatggcagccctggccgggagttctacatggacaaggtgctgatggagtttgtggagaacagcaggaaggccatgaaggaggccggcaagggcggcgtggccgacagccgggagctgaagcccatggccagcggggccagcagcgcctag

SEQ ID NO: 170873 - DNA, 1959 bp, synthetic construct
  misc_feature 1..1959: note = Description of Artificial Sequence: Synthetic coding sequence
  source 1..1959: mol_type = other DNA
atgggctgctgcagcagcgccagcagcgctgcccagagcagcaagcgggagtggaagcccctggaggacaggagctgcacagacatcccctggctgctgctcttcatcctcttctgcatcggcatgggcttcatctgtggcttcagcatcgccaccggggctgctgcccggctggtgtctggctatgacagctatggcaacatctgtggccagaagaacaccaagctggaggccatccccaacagcggcatggaccacacccagaggaaatatgtgttcttcctggacccctgcaacctggacctgatcaacaggaagatcaagtctgtggccctgtgtgtggccgcctgcccccggcaggagctgaagaccctgagtgatgtgcagaagtttgctgagatcaatggaagtgccctgtgcagctacaacctgaagcccagcgagtacaccaccagccccaagagctctgtgctgtgccccaagctgcctgtgcctgccagcgcccccatccccttcttccaccgctgtgcccctgtgaacatcagctgctacgccaagtttgctgaggccctgatcacctttgtgtctgacaacagcgtgctgcacaggctcatcagcggcgtgatgaccagcaaggagatcatcctgggcctgtgcctgctgagcctggtgctgtccatgatcctgatggtgatcatccgctacatcagccgggtgctggtgtggatcctgaccatcctggtgatcctgggcagcctgggcggcaccggggtgctgtggtggctgtatgccaagcagaggaggagccccaaggagaccgtgaccccagagcagctgcagattgctgaggacaacctgcgggccctgctgatctatgccatcagcgccaccgtcttcaccgtcatcctcttcctgatcatgctggtgatgaggaagagggtggccctgaccatcgccctcttccacgtggccggcaaggtgttcatccacctgcccctgctggtgttccagcccttctggaccttctttgccctggtgctcttctgggtgtactggatcatgaccctgctcttcctgggcaccaccggcagccctgtgcagaatgagcagggctttgtggagttcaagatcagcggccccctgcagtacatgtggtggtaccacgtggtgggcctcatctggatcagcgagttcatcctggcctgccagcagatgacagtggccggggctgtggtgacctactacttcacccgggacaagaggaacctgcccttcacccccatcctggcctctgtgaacagactcatccgctaccacctgggcaccgtggccaagggcagcttcatcatcaccctggtgaagatccccaggatgatcctgatgtacatccacagccagctgaagggcaaggaaaatgcctgtgcccgctgtgtgctgaagagctgcatctgctgcctgtggtgcctggagaagtgcctgaactacctgaaccagaatgcctacacagccacagccatcaacagcaccaacttctgcaccagcgccaaggatgcctttgtgatcctggtggagaatgccctgcgggtggccaccatcaacacagtgggggacttcatgctgttcctgggcaaggtgctgattgtgtgcagcacaggcctggccggcatcatgctgctgaactaccagcaggactacacagtgtgggtgctgcccctcatcatcgtgtgcctgtttgccttcctggtggcccactgcttcctgagcatctatgagatggtggtggatgtgctcttcctgtgctttgccatcgacaccaagtacaatgatggcagccctggccgggagttctacatggacaaggtgctgatggagtttgtggagaacagcaggaaggccatgaaggaggccggcaagggcggcgtggccgacagccgggagctgaagcccatgatcaagtag

SEQ ID NO: 170874 - DNA, 1965 bp, synthetic construct
  misc_feature 1..1965: note = Description of Artificial Sequence: Synthetic coding sequence
  source 1..1965: mol_type = other DNA
atgggctgctgcagcagcgccagcagcgctgcccagagcagcaagcgggagtggaagcccctggaggacaggagctgcacagacatcccctggctgctgctcttcatcctcttctgcatcggcatgggcttcatctgtggcttcagcatcgccaccggggctgctgcccggctggtgtctggctatgacagctatggcaacatctgtggccagaagaacaccaagctggaggccatccccaacagcggcatggaccacacccagaggaaatatgtgttcttcctggacccctgcaacctggacctgatcaacaggaagatcaagtctgtggccctgtgtgtggccgcctgcccccggcaggagctgaagaccctgagtgatgtgcagaagtttgctgagatcaatggaagtgccctgtgcagctacaacctgaagcccagcgagtacaccaccagccccaagagctctgtgctgtgccccaagctgcctgtgcctgccagcgcccccatccccttcttccaccgctgtgcccctgtgaacatcagctgctacgccaagtttgctgaggccctgatcacctttgtgtctgacaacagcgtgctgcacaggctcatcagcggcgtgatgaccagcaaggagatcatcctgggcctgtgcctgctgagcctggtgctgtccatgatcctgatggtgatcatccgctacatcagccgggtgctggtgtggatcctgaccatcctggtgatcctgggcagcctgggcggcaccggggtgctgtggtggctgtatgccaagcagaggaggagccccaaggagaccgtgaccccagagcagctgcagattgctgaggacaacctgcgggccctgctgatctatgccatcagcgccaccgtcttcaccgtcatcctcttcctgatcatgctggtgatgaggaagagggtggccctgaccatcgccctcttccacgtggccggcaaggtgttcatccacctgcccctgctggtgttccagcccttctggaccttctttgccctggtgctcttctgggtgtactggatcatgaccctgctcttcctgggcaccaccggcagccctgtgcagaatgagcagggctttgtggagttcaagatcagcggccccctgcagtacatgtggtggtaccacgtggtgggcctcatctggatcagcgagttcatcctggcctgccagcagatgacagtggccggggctgtggtgacctactacttcacccgggacaagaggaacctgcccttcacccccatcctggcctctgtgaacagactcatccgctaccacctgggcaccgtggccaagggcagcttcatcatcaccctggtgaagatccccaggatgatcctgatgtacatccacagccagctgaagggcaaggaaaatgcctgtgcccgctgtgtgctgaagagctgcatctgctgcctgtggtgcctggagaagtgcctgaactacctgaaccagaatgcctacacagccacagccatcaacagcaccaacttctgcaccagcgccaaggatgcctttgtgatcctggtggagaatgccctgcgggtggccaccatcaacacagtgggggacttcatgctgttcctgggcaaggtgctgattgtgtgcagcacaggcctggccggcatcatgctgctgaactaccagcaggactacacagtgtgggtgctgcccctcatcatcgtgtgcctgtttgccttcctggtggcccactgcttcctgagcatctatgagatggtggtggatgtgctcttcctgtgctttgccatcgacaccaagtacaatgatggcagccctggccgggagttctacatggacaaggtgctgatggagtttgtggagaacagcaggaaggccatgaaggaggccggcaagggcggcgtggccgacagccgggagctgaagcccatgctgaagaagaggtag

SEQ ID NO: 170875 - DNA, 1974 bp, synthetic construct; identical to SEQ ID NO: 170872
  misc_feature 1..1974: note = Description of Artificial Sequence: Synthetic coding sequence
  source 1..1974: mol_type = other DNA

SEQ ID NO: 170876 - DNA, 2121 bp, synthetic construct
  misc_feature 1..2121: note = Description of Artificial Sequence: Synthetic coding sequence
  source 1..2121: mol_type = other DNA
atgggagatgagcggccccactactacggcaagcacggcaccccccagaagtatgaccccaccttcaagggccccatctacaacagaggctgcacagacatcatctgctgcgtgttcctgctgctggccatcgtgggctacgtggccgtgggcatcatcgcctggacccatggagaccccaggaaggtgatctaccccacagacagcagaggagagttctgtggccagaagggcaccaagaatgaaaacaagccctacctgttctacttcaacatcgtgaagtgtgccagccccctggtgctgctggagttccagtgccccaccccccagatctgtgtggagaagtgcccagaccgctacctgacctacctgaatgcccggagcagccgggactttgagtactacaagcagttctgtgtgcccggcttcaagaacaacaagggcgtggccgaggtgctgcaggatggagactgcccagctgtgctgatccccagcaagcccctggcccggcgctgcttccctgccatccacgcctacaagggcgtgctgatggtgggcaatgagaccacctatgaagatggccacggcagcaggaagaacatcacagacctggtggagggcgccaagaaggccaacggggtgctggaggcccggcagctggccatgaggatctttgaggactacacagtgtcctggtactggatcatcatcggcctggtgattgccatggccatgagcctgctcttcatcatcctgctgcgcttcctggccggcatcatggtgtgggtgatgatcatcatggtgatcctggtgctgggctacggcatcttccactgctacatggagtacagccggctgcggggggaggccggcagtgatgtgtccctggtggacctgggcttccagacagacttccgggtgtacctgcacctgcggcagacctggctggccttcatgatcatcctgagcatcctggaggtgatcatcatcctgctgctgatcttcctgaggaagaggatcctgattgccatcgccctgatcaaggaggccagcagagctgtgggctacgtgatgtgcagcctgctgtaccccctggtgaccttcttcctgctgtgcctgtgcatcgcctactgggccagcacagctgtgttcctgagcaccagcaatgaagctgtgtacaagatctttgatgacagcccctgccccttcaccgccaagacctgcaaccctgagaccttccccagcagcaatgaaagccggcagtgccccaatgcccgctgccagtttgccttctacggcggggagagcggctaccaccgggccctgctgggcctgcagatcttcaatgccttcatgttcttctggctggccaactttgtgctggccctgggccaggtgaccctggccggggcctttgccagctactactgggccctgaggaagccagatgacctgcctgccttccccctcttcagcgccttcggccgggccctgcgctaccacacaggcagcctggcctttggagccctgatcctggccatcgtgcagatcatccgggtcatcctggagtacctggaccagaggctgaaggctgctgagaacaagtttgccaagtgcctgatgacctgcctgaagtgctgcttctggtgcctggagaagttcatcaagttcctgaacagaaatgcctacatcatgattgccatctacggcaccaacttctgcaccagcgccagaaatgccttcttcctgctgatgaggaacatcatccgggtggccgtgctggacaaggtgacagacttcctgttcctgctgggcaagctgctgattgtgggctctgtgggcatcctggccttcttcttcttcacccaccgcatcagaattgtgcaggacacagccccacccctgaactactactgggtgcccatcctgaccgtcatcgtgggcagctacctgattgcccacggcttcttctctgtgtatggcatgtgtgtggacaccctcttcctgtgcttcctggaggacctggagagaaatgatggcagcgctgagcggccctacttcatgagcagcaccctgaagaagctgctgaacaagaccaacaagaaggctgctgagagctag

SEQ ID NO: 170877 - DNA, 2121 bp, synthetic construct
  misc_feature 1..2121: note = Description of Artificial Sequence: Synthetic coding sequence
  source 1..2121: mol_type = other DNA
atgggagatgagcggccccactactacggcaagcacggcaccccccagaagtatgaccccaccttcaagggccccatctacaacagaggctgcacagacatcatctgctgcgtgttcctgctgctggccatcgtgggctacgtggccgtgggcatcatcgcctggacccatggagaccccaggaaggtgatctaccccacagacagcagaggagagttctgtggccagaagggcaccaagaatgaaaacaagccctacctgttctacttcaacatcgtgaagtgtgccagccccctggtgctgctggagttccagtgccccaccccccagatctgtgtggagaagtgcccagaccgctacctgacctacctgaatgcccggagcagccgggactttgagtactacaagcagttctgtgtgcccggcttcaagaacaacaagggcgtggccgaggtgctgcaggatggagactgcccagctgtgctgatccccagcaagcccctggcccggcgctgcttccctgccatccacgcctacaagggcgtgctgatggtgggcaatgagaccacctatgaagatggccacggcagcaggaagaacatcacagacctggtggagggcgccaagaaggccaacggggtgctggaggcccggcagctggccatgaggatctttgaggactacacagtgtcctggtactggatcatcatcggcctggtgattgccatggccatgagcctgctcttcatcatcctgctgcgcttcctggccggcatcatggtgtgggtgatgatcatcatggtgatcctggtgctgggctacggcatcttccactgctacatggagtacagccggctgcggggggaggccggcagtgatgtgtccctggtggacctgggcttccagacagacttccgggtgtacctgcacctgcggcagacctggctggccttcatgatcatcctgagcatcctggaggtgatcatcatcctgctgctgatcttcctgaggaagaggatcctgattgccatcgccctgatcaaggaggccagcagagctgtgggctacgtgatgtgcagcctgctgtaccccctggtgaccttcttcctgctgtgcctgtgcatcgcctactgggccagcacagctgtgttcctgagcaccagcaatgaagctgtgtacaagatctttgatgacagcccctgccccttcaccgccaagacctgcaaccctgagaccttccccagcagcaatgaaagccggcagtgccccaatgcccgctgccagtttgccttctacggcggggagagcggctaccaccgggccctgctgggcctgcagatcttcaatgccttcatgttcttctggctggccaactttgtgctggccctgggccaggtgaccctggccggggcctttgccagctactactgggccctgaggaagccagatgacctgcctgccttccccctcttcagcgccttcggccgggccctgcgctaccacacaggcagcctggcctttggagccctgatcctggccatcgtgcagatcatccgggtcatcctggagtacctggaccagaggctgaaggctgctgagaacaagtttgccaagtgcctgatgacctgcctgaagtgctgcttctggtgcctggagaagttcatcaagttcctgaacagaaatgcctacatcatgattgccatctacggcaccaacttctgcaccagcgccagaaatgccttcttcctgctgatgaggaacatcatccgggtggccgtgctggacaaggtgacagacttcctgttcctgctgggcaagctgctgattgtgggctctgtgggcatcctggccttcttcttcttcacccaccgcatcagaattgtgcaggacacagccccacccctgaactactactgggtgcccatcctgaccgtcatcgtgggcagctacctgattgcccacggcttcttctctgtgtatggcatgtgtgtggacaccctcttcctgtgcttctgtgaggacctggagagaaatgatggcagccaggagcggccctacttcatgagccctgagctgcgggacatcctgctgaagggcagcgctgaggagggcaagaggtag

SEQ ID NO: 170878 - DNA, 2115 bp, synthetic construct
  misc_feature 1..2115: note = Description of Artificial Sequence: Synthetic coding sequence
  source 1..2115: mol_type = other DNA
atggaggatgagaggaagaatggagcctacggcaccccccagaagtatgaccccaccttcaagggccccatctacaacagaggctgcacagacatcatctgctgcgtgttcctgctgctggccatcgtgggctacgtggccgtgggcatcatcgcctggacccatggagaccccaggaaggtgatctaccccacagacagcagaggagagttctgtggccagaagggcaccaagaatgaaaacaagccctacctgttctacttcaacatcgtgaagtgtgccagccccctggtgctgctggagttccagtgccccaccccccagatctgtgtggagaagtgcccagaccgctacctgacctacctgaatgcccggagcagccgggactttgagtactacaagcagttctgtgtgcccggcttcaagaacaacaagggcgtggccgaggtgctgcaggatggagactgcccagctgtgctgatccccagcaagcccctggcccggcgctgcttccctgccatccacgcctacaagggcgtgctgatggtgggcaatgagaccacctatgaagatggccacggcagcaggaagaacatcacagacctggtggagggcgccaagaaggccaacggggtgctggaggcccggcagctggccatgaggatctttgaggactacacagtgtcctggtactggatcatcatcggcctggtgattgccatggccatgagcctgctcttcatcatcctgctgcgcttcctggccggcatcatggtgtgggtgatgatcatcatggtgatcctggtgctgggctacggcatcttccactgctacatggagtacagccggctgcggggggaggccggcagtgatgtgtccctggtggacctgggcttccagacagacttccgggtgtacctgcacctgcggcagacctggctggccttcatgatcatcctgagcatcctggaggtgatcatcatcctgctgctgatcttcctgaggaagaggatcctgattgccatcgccctgatcaaggaggccagcagagctgtgggctacgtgatgtgcagcctgctgtaccccctggtgaccttcttcctgctgtgcctgtgcatcgcctactgggccagcacagctgtgttcctgagcaccagcaatgaagctgtgtacaagatctttgatgacagcccctgccccttcaccgccaagacctgcaaccctgagaccttccccagcagcaatgaaagccggcagtgccccaatgcccgctgccagtttgccttctacggcggggagagcggctaccaccgggccctgctgggcctgcagatcttcaatgccttcatgttcttctggctggccaactttgtgctggccctgggccaggtgaccctggccggggcctttgccagctactactgggccctgaggaagccagatgacctgcctgccttccccctcttcagcgccttcggccgggccctgcgctaccacacaggcagcctggcctttggagccctgatcctggccatcgtgcagatcatccgggtcatcctggagtacctggaccagaggctgaaggctgctgagaacaagtttgccaagtgcctgatgacctgcctgaagtgctgcttctggtgcctggagaagttcatcaagttcctgaacagaaatgcctacatcatgattgccatctacggcaccaacttctgcaccagcgccagaaatgccttcttcctgctgatgaggaacatcatccgggtggccgtgctggacaaggtgacagacttcctgttcctgctgggcaagctgctgattgtgggctctgtgggcatcctggccttcttcttcttcacccaccgcatcagaattgtgcaggacacagccccacccctgaactactactgggtgcccatcctgaccgtcatcgtgggcagctacctgattgcccacggcttcttctctgtgtatggcatgtgtgtggacaccctcttcctgtgcttcctggaggacctggagagaaatgatggcagcgctgagcggccctacttcatgagcagcaccctgaagaagctgctgaacaagaccaacaagaaggctgctgagagctag

SEQ ID NO: 170879 - DNA, 1248 bp, synthetic construct; identical to SEQ ID NO: 169713
  misc_feature 1..1248: note = Description of Artificial Sequence: Synthetic coding sequence
  source 1..1248: mol_type = other DNA

SEQ ID NO: 170880 - DNA, 2007 bp, synthetic construct
  misc_feature 1..2007: note = Description of Artificial Sequence: Synthetic coding sequence
  source 1..2007: mol_type = other DNA
atgggcggcaagcagagagatgaagatgatgaggcctacggcaagcctgtgaagtatgaccccagcttccggggccccatcaagaacagaagctgcacagatgtgatctgctgcgtgctcttcctgctcttcatcctgggctacatcgtggtgggcatcgtggcctggctgtatggagacccccggcaggtgctgtaccccaggaacagcactggagcctactgcggcatgggagagaacaaggacaagccctacctgctgtacttcaacatcttcagctgcatcctgagcagcaacatcatctctgtggctgaaaatggcctgcagtgccccaccccccagaccgtcatcaccagcctgcagcaggagctgtgccccagcttcctgctgcccagcgccccagccctgggccgctgcttcccctggaccaacgtgaccccaccagccctgcccggcatcaccaatgacaccaccatccagcagggcatcagcggcctgattgacagcctgaatgcccgggacatctctgtgaagatctttgaagattttgcccagagctggtactggatcctggtggccctgggcgtggccctggtgctgagcctgctcttcatcctgctgctgcggctggtggccggccccctggtgctggtgctgatcctgggcgtgctgggcgtgctggcctacggcatctactactgctgggaggagtacagagtgctgcgggacaagggggccagcatcagccagctgggcttcaccaccaacctgagcgcctaccagagcgtgcaggagacctggctggccgccctgattgtgctggccgtgctggaggccatcctgctgctgatgctgatcttcctgcggcagaggatccgcatcgccatcgccctgctgaaggaggccagcaaggctgtgggccagatgatgagcaccatgttctaccccctggtgacctttgtgctgctgctgatctgcatcgcctactgggccatgacagccctgtacctggccaccagcggccagccccagtatgtgctgtgggccagcaacatcagcagccctggctgtgagaaggtgcccatcaacaccagctgcaaccccacagcccacctggtgaacagcagctgccccggcctgatgtgtgtgttccagggctacagcagcaagggcctcatccagaggagcgtcttcaacctgcagatctatggagtgctgggcctcttctggaccctgaactgggtgctggccctgggccagtgtgtgctggccggggcctttgccagcttctactgggccttccacaagccccaggacatccccaccttccccctcatcagcgccttcatccgcaccctgcgctaccacacaggcagcctggccttcggggccctgatcctgaccctggtgcagatcgcccgggtcatcctggagtacatcgaccacaagctgcggggcgtgcagaaccctgtggcccgctgcatcatgtgctgcttcaagtgctgcctgtggtgcctggagaagttcatcaagttcctgaacagaaatgcctacatcatgattgccatctacggcaagaacttctgtgtgtctgccaagaatgccttcatgctgctgatgagaaatattgtgcgggtggtggtgctggacaaggtgacagacctgctgctcttcttcggcaagctgctggtggtgggcggcgtgggcgtgctgtccttcttcttcttcagcggccgcatccctggcctgggcaaggacttcaagagcccccacctgaactactactggctgcccatcatgaccagcatcctgggcgcctacgtgattgccagcggcttcttctctgtgtttggcatgtgtgtggacaccctcttcctgtgcttcctggaggacctggagaggaacaacggcagcctggaccggccctactacatgagcaagagcctgctgaagatcctgggcaagaagaatgaggcccccccagacaacaagaagaggaagaagtag

SEQ ID NO: 170881 - DNA, 2133 bp, synthetic construct; identical to SEQ ID NO: 152256
  misc_feature 1..2133: note = Description of Artificial Sequence: Synthetic coding sequence
  source 1..2133: mol_type = other DNA

SEQ ID NO: 170882 - DNA, 1236 bp, synthetic construct
  misc_feature 1..1236: note = Description of Artificial Sequence: Synthetic coding sequence
  source 1..1236: mol_type = other DNA
tgaagagatgaagatgatgaggcctacggcaagcctgtgaagtatgaccccagcttccggggccccatcaagaacagaagctgcacagatgtgatctgctgcgtgctcttcctgctcttcatcctgggctacatcgtggtgggcatcgtggcctggctgtatggagacccccggcaggtgctgtaccccaggaacagcactggagcctactgcggcatgggagagaacaaggacaagccctacctgctgtacttcaacatcttcagctgcatcctgagcagcaacatcatctctgtggctgaaaatggcctgcagtgccccaccccccaggtgtgtgtgagcagctgcccagaggacccctggacagtgggcaagaatgagttcagccagacagtgggggaggtgttctacaccaagaacagaaacttctgcctgcccggggtgccctggaacatgaccgtcatcaccagcctgcagcaggagctgtgccccagcttcctgctgcccagcgccccagccctgggccgctgcttcccctggaccaacgtgaccccaccagccctgcccggcatcaccaatgacaccaccatccagcagggcatcagcggcctgattgacagcctgaatgcccgggacatctctgtgaagatctttgaagattttgcccagagctggtactggatcctggtggccgtgggccagatgatgagcaccatgttctaccccctggtgacctttgtgctgctgctgatctgcatcgcctactgggccatgacagccctgtacctggccaccagcggccagccccagtatgtgctgtgggccagcaacatcagcagccctggctgtgagaaggtgcccatcaacaccagctgcaaccccacagcccacctggtgaacagcagctgccccggcctgatgtgtgtgttccagggctacagcagcaagggcctcatccagaggagcgtcttcaacctgcagatctatggagtgctgggcctcttctggaccctgaactgggtgctggccctgggccagtgtgtgctggccggggcctttgccagcttctactgggccttccacaagccccaggacatccccaccttccccctcatcagcgccttcatccgcaccctgcgctaccacacaggcagcctggccttcggggccctgatcctgaccctggtgcagatcgcccgggtcatcctggagtacatcgaccacaagctgaggtag

SEQ ID NO: 170883 - DNA, 1236 bp, synthetic construct
  misc_feature 1..1236: note = Description of Artificial Sequence: Synthetic coding sequence
  source 1..1236: mol_type = other DNA
tgaagagatgaagatgatgaggcctacggcaagcctgtgaagtatgaccccagcttccggggccccatcaagaacagaagctgcacagatgtgatctgctgcgtgctcttcctgctcttcatcctgggctacatcgtggtgggcatcgtggcctggctgtatggagacccccggcaggtgctgtaccccaggaacagcactggagcctactgcggcatgggagagaacaaggacaagccctacctgctgtacttcaacatcttcagctgcatcctgagcagcaacatcatctctgtggctgaaaatggcctgcagtgccccaccccccaggtgtgtgtgagcagctgcccagaggacccctggacagtgggcaagaatgagttcagccagacagtgggggaggtgttctacaccaagaacagaaacttctgcctgcccggggtgccctggaacatgaccgtcatcaccagcctgcagcaggagctgtgccccagcttcctgctgcccagcgccccagccctgggccgctgcttcccctggaccaacatcaccccaccagccctgcccggcatcaccaatgacaccaccatccagcagggcatcagcggcctgattgacagcctgaatgcccgggacatctctgtgaagatctttgaagattttgcccagagctggtactggatcctggtggccgtgggccagatgatgagcaccatgttctaccccctggtgacctttgtgctgctgctgatctgcatcgcctactgggccatgacagccctgtacctggccaccagcggccagccccagtatgtgctgtgggccagcaacatcagcagccctggctgtgagaaggtgcccatcaacaccagctgcaaccccacagcccacctggtgaacagcagctgccccggcctgatgtgtgtgttccagggctacagcagcaagggcctcatccagaggagcgtcttcaacctgcagatctatggagtgctgggcctcttctggaccctgaactgggtgctggccctgggccagtgtgtgctggccggggcctttgccagcttctactgggccttccacaagccccaggacatccccaccttccccctcatcagcgccttcatccgcaccctgcgctaccacacaggcagcctggccttcggggccctgatcctgaccctggtgcagatcgcccgggtcatcctggagtacatcgaccacaagctgaggtag

SEQ ID NO: 170884 - DNA, 2133 bp, synthetic construct
  misc_feature 1..2133: note = Description of Artificial Sequence: Synthetic coding sequence
  source 1..2133: mol_type = other DNA
atgggcggcaagcagagagatgaagatgatgaggcctacggcaagcctgtgaagtatgaccccagcttccggggccccatcaagaacagaagctgcacagatgtgatctgctgcgtgctcttcctgctcttcatcctgggctacatcgtggtgggcatcgtggcctggctgtatggagacccccggcaggtgctgtaccccaggaacagcactggagcctactgcggcatgggagagaacaaggacaagccctacctgctgtacttcaacatcttcagctgcatcctgagcagcaacatcatctctgtggctgaaaatggcctgcagtgccccaccccccaggtgtgtgtgagcagctgcccagaggacccctggacagtgggcaagaatgagttcagccagacagtgggggaggtgttctacaccaagaacagaaacttctgcctgcccggggtgccctggaacatgaccgtcatcaccagcctgcagcaggagctgtgccccagcttcctgctgcccagcgccccagccctgggccgctgcttcccctggaccaacatcaccccaccagccctgcccggcatcaccaatgacaccaccatccagcagggcatcagcggcctgattgacagcctgaatgcccgggacatctctgtgaagatctttgaagattttgcccagagctggtactggatcctggtggccctgggcgtggccctggtgctgagcctgctcttcatcctgctgctgcggctggtggccggccccctggtgctggtgctgatcctgggcgtgctgggcgtgctggcctacggcatctactactgctgggaggagtacagagtgctgcgggacaagggggccagcatcagccagctgggcttcaccaccaacctgagcgcctaccagagcgtgcaggagacctggctggccgccctgattgtgctggccgtgctggaggccatcctgctgctggtgctgatcttcctgcggcagaggatccgcatcgccatcgccctgctgaaggaggccagcaaggctgtgggccagatgatgagcaccatgttctaccccctggtgacctttgtgctgctgctgatctgcatcgcctactgggccatgacagccctgtacctggccaccagcggccagccccagtatgtgctgtgggccagcaacatcagcagccctggctgtgagaaggtgcccatcaacaccagctgcaaccccacagcccacctggtgaacagcagctgccccggcctgatgtgtgtgttccagggctacagcagcaagggcctcatccagaggagcgtcttcaacctgcagatctatggagtgctgggcctcttctggaccctgaactgggtgctggccctgggccagtgtgtgctggccggggcctttgccagcttctactgggccttccacaagccccaggacatccccaccttccccctcatcagcgccttcatccgcaccctgcgctaccacacaggcagcctggccttcggggccctgatcctgaccctggtgcagatcgcccgggtcatcctggagtacatcgaccacaagctgcggggcgtgcagaaccctgtggcccgctgcatcatgtgctgcttcaagtgctgcctgtggtgcctggagaagttcatcaagttcctgaacagaaatgcctacatcatgattgccatctacggcaagaacttctgtgtgtctgccaagaatgccttcatgctgctgatgagaaatattgtgcgggtggtggtgctggacaaggtgacagacctgctgctcttcttcggcaagctgctggtggtgggcggcgtgggcgtgctgtccttcttcttcttcagcggccgcatccctggcctgggcaaggacttcaagagcccccacctgaactactactggctgcccatcatgaccagcatcctgggcgcctacgtgattgccagcggcttcttctctgtgtttggcatgtgtgtggacaccctcttcctgtgcttcctggaggacctggagaggaacaacggcagcctggaccggccctactacatgagcaagagcctgctgaagatcctgggcaagaagaatgaggcccccccagacaacaagaagaggaagaagtag

SEQ ID NO: 170885 - DNA, 2133 bp, synthetic construct; identical to SEQ ID NO: 170884
  misc_feature 1..2133: note = Description of Artificial Sequence: Synthetic coding sequence
  source 1..2133: mol_type = other DNA

SEQ ID NO: 170886 - DNA, 2133 bp, synthetic construct; identical to SEQ ID NO: 152256
  misc_feature 1..2133: note = Description of Artificial Sequence: Synthetic coding sequence
  source 1..2133: mol_type = other DNA

SEQ ID NO: 170887 - DNA, 1236 bp, synthetic construct; identical to SEQ ID NO: 170882
  misc_feature 1..1236: note = Description of Artificial Sequence: Synthetic coding sequence
  source 1..1236: mol_type = other DNA

SEQ ID NO: 170888 - DNA, 1236 bp, synthetic construct; identical to SEQ ID NO: 170882
  misc_feature 1..1236: note = Description of Artificial Sequence: Synthetic coding sequence
  source 1..1236: mol_type = other DNA

SEQ ID NO: 170889 - DNA, 1236 bp, synthetic construct; identical to SEQ ID NO: 170883
  misc_feature 1..1236: note = Description of Artificial Sequence: Synthetic coding sequence
  source 1..1236: mol_type = other DNA

SEQ ID NO: 170890 - DNA, 2133 bp, synthetic construct; identical to SEQ ID NO: 170884
  misc_feature 1..2133: note = Description of Artificial Sequence: Synthetic coding sequence
  source 1..2133: mol_type = other DNA

SEQ ID NO: 170891 - DNA, 1236 bp, synthetic construct; identical to SEQ ID NO: 170883
  misc_feature 1..1236: note = Description of Artificial Sequence: Synthetic coding sequence
  source 1..1236: mol_type = other DNA

SEQ ID NO: 170892 - DNA, 2133 bp, synthetic construct; identical to SEQ ID NO: 152256
  misc_feature 1..2133: note = Description of Artificial Sequence: Synthetic coding sequence
  source 1..2133: mol_type = other DNA

SEQ ID NO: 170893 - DNA, 1236 bp, synthetic construct; identical to SEQ ID NO: 170882
  misc_feature 1..1236: note = Description of Artificial Sequence: Synthetic coding sequence
  source 1..1236: mol_type = other DNA

SEQ ID NO: 170894 - DNA, 1905 bp, synthetic construct
  misc_feature 1..1905: note = Description of Artificial Sequence: Synthetic coding sequence
  source 1..1905: mol_type = other DNA
atgggagagaacaaggacaagccctacctgctgtacttcaacatcttcagctgcatcctgagcagcaacatcatctctgtggctgaaaatggcctgcagtgccccaccccccaggtgtgtgtgagcagctgcccagaggacccctggacagtgggcaagaatgagttcagccagacagtgggggaggtgttctacaccaagaacagaaacttctgcctgcccggggtgccctggaacatgaccgtcatcaccagcctgcagcaggagctgtgccccagcttcctgctgcccagcgccccagccctgggccgctgcttcccctggaccaacgtgaccccaccagccctgcccggcatcaccaatgacaccaccatccagcagggcatcagcggcctgattgacagcctgaatgcccgggacatctctgtgaagatctttgaagattttgcccagagctggtactggatcctggtggccctgggcgtggccctggtgctgagcctgctcttcatcctgctgctgcggctggtggccggccccctggtgctggtgctgatcctgggcgtgctgggcgtgctggcctacggcatctactactgctgggaggagtacagagtgctgcgggacaagggggccagcatcagccagctgggcttcaccaccaacctgagcgcctaccagagcgtgcaggagacctggctggccgccctgattgtgctggccgtgctggaggccatcctgctgctgatgctgatcttcctgcggcagaggatccgcatcgccatcgccctgctgaaggaggccagcaaggctgtgggccagatgatgagcaccatgttctaccccctggtgacctttgtgctgctgctgatctgcatcgcctactgggccatgacagccctgtacctggccaccagcggccagccccagtatgtgctgtgggccagcaacatcagcagccctggctgtgagaaggtgcccatcaacaccagctgcaaccccacagcccacctggtgaacagcagctgccccggcctgatgtgtgtgttccagggctacagcagcaagggcctcatccagaggagcgtcttcaacctgcagatctatggagtgctgggcctcttctggaccctgaactgggtgctggccctgggccagtgtgtgctggccggggcctttgccagcttctactgggccttccacaagccccaggacatccccaccttccccctcatcagcgccttcatccgcaccctgcgctaccacacaggcagcctggccttcggggccctgatcctgaccctggtgcagatcgcccgggtcatcctggagtacatcgaccacaagctgcggggcgtgcagaaccctgtggcccgctgcatcatgtgctgcttcaagtgctgcctgtggtgcctggagaagttcatcaagttcctgaacagaaatgcctacatcatgattgccatctacggcaagaacttctgtgtgtctgccaagaatgccttcatgctgctgatgagaaatattgtgcgggtggtggtgctggacaaggtgacagacctgctgctcttcttcggcaagctgctggtggtgggcggcgtgggcgtgctgtccttcttcttcttcagcggccgcatccctggcctgggcaaggacttcaagagcccccacctgaactactactggctgcccatcatgaccagcatcctgggcgcctacgtgattgccagcggcttcttctctgtgtttggcatgtgtgtggacaccctcttcctgtgcttcctggaggacctggagaggaacaacggcagcctggaccggccctactacatgagcaagagcctgctgaagatcctgggcaagaagaatgaggcccccccagacaacaagaagaggaagaagtag

SEQ ID NO: 170895 - DNA, 1905 bp, synthetic construct; identical to SEQ ID NO: 170894
  misc_feature 1..1905: note = Description of Artificial Sequence: Synthetic coding sequence
  source 1..1905: mol_type = other DNA

SEQ ID NO: 170896 - DNA, 1905 bp, synthetic construct
  misc_feature 1..1905: note = Description of Artificial Sequence: Synthetic coding sequence
  source 1..1905: mol_type = other DNA
atgggagagaacaaggacaagccctacctgctgtacttcaacatcttcagctgcatcctgagcagcaacatcatctctgtggctgaaaatggcctgcagtgccccaccccccaggtgtgtgtgagcagctgcccagaggacccctggacagtgggcaagaatgagttcagccagacagtgggggaggtgttctacaccaagaacagaaacttctgcctgcccggggtgccctggaacatgaccgtcatcaccagcctgcagcaggagctgtgccccagcttcctgctgcccagcgccccagccctgggccgctgcttcccctggaccaacatcaccccaccagccctgcccggcatcaccaatgacaccaccatccagcagggcatcagcggcctgattgacagcctgaatgcccgggacatctctgtgaagatctttgaagattttgcccagagctggtactggatcctggtggccctgggcgtggccctggtgctgagcctgctcttcatcctgctgctgcggctggtggccggccccctggtgctggtgctgatcctgggcgtgctgggcgtgctggcctacggcatctactactgctgggaggagtacagagtgctgcgggacaagggggccagcatcagccagctgggcttcaccaccaacctgagcgcctaccagagcgtgcaggagacctggctggccgccctgattgtgctggccgtgctggaggccatcctgctgctggtgctgatcttcctgcggcagaggatccgcatcgccatcgccctgctgaaggaggccagcaaggctgtgggccagatgatgagcaccatgttctaccccctggtgacctttgtgctgctgctgatctgcatcgcctactgggccatgacagccctgtacctggccaccagcggccagccccagtatgtgctgtgggccagcaacatcagcagccctggctgtgagaaggtgcccatcaacaccagctgcaaccccacagcccacctggtgaacagcagctgccccggcctgatgtgtgtgttccagggctacagcagcaagggcctcatccagaggagcgtcttcaacctgcagatctatggagtgctgggcctcttctggaccctgaactgggtgctggccctgggccagtgtgtgctggccggggcctttgccagcttctactgggccttccacaagccccaggacatccccaccttccccctcatcagcgccttcatccgcaccctgcgctaccacacaggcagcctggccttcggggccctgatcctgaccctggtgcagatcgcccgggtcatcctggagtacatcgaccacaagctgcggggcgtgcagaaccctgtggcccgctgcatcatgtgctgcttcaagtgctgcctgtggtgcctggagaagttcatcaagttcctgaacagaaatgcctacatcatgattgccatctacggcaagaacttctgtgtgtctgccaagaatgccttcatgctgctgatgagaaatattgtgcgggtggtggtgctggacaaggtgacagacctgctgctcttcttcggcaagctgctggtggtgggcggcgtgggcgtgctgtccttcttcttcttcagcggccgcatccctggcctgggcaaggacttcaagagcccccacctgaactactactggctgcccatcatgaccagcatcctgggcgcctacgtgattgccagcggcttcttctctgtgtttggcatgtgtgtggacaccctcttcctgtgcttcctggaggacctggagaggaacaacggcagcctggaccggccctactacatgagcaagagcctgctgaagatcctgggcaagaagaatgaggcccccccagacaacaagaagaggaagaagtag

SEQ ID NO: 170897 - DNA, 2007 bp, synthetic construct
  misc_feature 1..2007: note = Description of Artificial Sequence: Synthetic coding sequence
  source 1..2007: mol_type = other DNA
atgggcggcaagcagagagatgaagatgatgaggcctacggcaagcctgtgaagtatgaccccagcttccggggccccatcaagaacagaagctgcacagatgtgatctgctgcgtgctcttcctgctcttcatcctgggctacatcgtggtgggcatcgtggcctggctgtatggagacccccggcaggtgctgtaccccaggaacagcactggagcctactgcggcatgggagagaacaaggacaagccctacctgctgtacttcaacatcttcagctgcatcctgagcagcaacatcatctctgtggctgaaaatggcctgcagtgccccaccccccagaccgtcatcaccagcctgcagcaggagctgtgccccagcttcctgctgcccagcgccccagccctgggccgctgcttcccctggaccaacatcaccccaccagccctgcccggcatcaccaatgacaccaccatccagcagggcatcagcggcctgattgacagcctgaatgcccgggacatctctgtgaagatctttgaagattttgcccagagctggtactggatcctggtggccctgggcgtggccctggtgctgagcctgctcttcatcctgctgctgcggctggtggccggccccctggtgctggtgctgatcctgggcgtgctgggcgtgctggcctacggcatctactactgctgggaggagtacagagtgctgcgggacaagggggccagcatcagccagctgggcttcaccaccaacctgagcgcctaccagagcgtgcaggagacctggctggccgccctgattgtgctggccgtgctggaggccatcctgctgctggtgctgatcttcctgcggcagaggatccgcatcgccatcgccctgctgaaggaggccagcaaggctgtgggccagatgatgagcaccatgttctaccccctggtgacctttgtgctgctgctgatctgcatcgcctactgggccatgacagccctgtacctggccaccagcggccagccccagtatgtgctgtgggccagcaacatcagcagccctggctgtgagaaggtgcccatcaacaccagctgcaaccccacagcccacctggtgaacagcagctgccccggcctgatgtgtgtgttccagggctacagcagcaagggcctcatccagaggagcgtcttcaacctgcagatctatggagtgctgggcctcttctggaccctgaactgggtgctggccctgggccagtgtgtgctggccggggcctttgccagcttctactgggccttccacaagccccaggacatccccaccttccccctcatcagcgccttcatccgcaccctgcgctaccacacaggcagcctggccttcggggccctgatcctgaccctggtgcagatcgcccgggtcatcctggagtacatcgaccacaagctgcggggcgtgcagaaccctgtggcccgctgcatcatgtgctgcttcaagtgctgcctgtggtgcctggagaagttcatcaagttcctgaacagaaatgcctacatcatgattgccatctacggcaagaacttctgtgtgtctgccaagaatgccttcatgctgctgatgagaaatattgtgcgggtggtggtgctggacaaggtgacagacctgctgctcttcttcggcaagctgctggtggtgggcggcgtgggcgtgctgtccttcttcttcttcagcggccgcatccctggcctgggcaaggacttcaagagcccccacctgaactactactggctgcccatcatgaccagcatcctgggcgcctacgtgattgccagcggcttcttctctgtgtttggcatgtgtgtggacaccctcttcctgtgcttcctggaggacctggagaggaacaacggcagcctggaccggccctactacatgagcaagagcctgctgaagatcctgggcaagaagaatgaggcccccccagacaacaagaagaggaagaagtag

SEQ ID NO: 170898 - DNA, 1905 bp, synthetic construct; identical to SEQ ID NO: 170894
  misc_feature 1..1905: note = Description of Artificial Sequence: Synthetic coding sequence
  source 1..1905: mol_type = other DNA

SEQ ID NO: 170899 - DNA, 1905 bp, synthetic construct; identical to SEQ ID NO: 170894
  misc_feature 1..1905: note = Description of Artificial Sequence: Synthetic coding sequence
  source 1..1905: mol_type = other DNA

SEQ ID NO: 170900 - DNA, 2007 bp, synthetic construct; identical to SEQ ID NO: 170880
  misc_feature 1..2007: note = Description of Artificial Sequence: Synthetic coding sequence
  source 1..2007: mol_type = other DNA

SEQ ID NO: 170901 - DNA, 2007 bp, synthetic construct; identical to SEQ ID NO: 170880
  misc_feature 1..2007: note = Description of Artificial Sequence: Synthetic coding sequence
  source 1..2007: mol_type = other DNA

SEQ ID NO: 170902 - DNA, 2007 bp, synthetic construct; identical to SEQ ID NO: 170897
  misc_feature 1..2007: note = Description of Artificial Sequence: Synthetic coding sequence
  source 1..2007: mol_type = other DNA

SEQ ID NO: 170903 - DNA, 1905 bp, synthetic construct; identical to SEQ ID NO: 170896
  misc_feature 1..1905: note = Description of Artificial Sequence: Synthetic coding sequence
  source 1..1905: mol_type = other DNA

SEQ ID NO: 170904 - DNA, 2007 bp, synthetic construct; identical to SEQ ID NO: 170880
  misc_feature 1..2007: note = Description of Artificial Sequence: Synthetic coding sequence
  source 1..2007: mol_type = other DNA

SEQ ID NO: 170905 - DNA, 2007 bp, synthetic construct; identical to SEQ ID NO: 170897
  misc_feature 1..2007: note = Description of Artificial Sequence: Synthetic coding sequence
  source 1..2007: mol_type = other DNA

SEQ ID NO: 170906 - DNA, 1905 bp, synthetic construct; identical to SEQ ID NO: 170896
  misc_feature 1..1905: note = Description of Artificial Sequence: Synthetic coding sequence
  source 1..1905: mol_type = other DNA

SEQ ID NO: 170907 - DNA, 2247 bp, synthetic construct
  misc_feature 1..2247: note = Description of Artificial Sequence: Synthetic coding sequence
  source 1..2247: mol_type = other DNA
atgatcccagctgccagcagcaccccacctggagatgccctcttccccagcgtggccccccaggacttctggaggagccaggtgacaggctacagcggctctgtgaccaggcacctgagccaccgggccaacaacttcaagaggcaccccaagaggaggaagtgcatccggcccagccccccacctccacccaacaccccctgccccctggagctggtggactttggagacctgcacccccagaggagcttccgggagctgctcttcaacggctgcatcctgtttggaattgagttctcctatgccatggagacagcctacgtgacccctgtgctgctgcagatgggcctgcctgaccagctgtacagcctggtgtggttcatcagccccatcctgggcttcctgctgcagcccctgctgggcgcctggagcgaccgctgcaccagcagatttggaagaagaagacccttcatcctggtgctggccatcggggccctgctgggcctgagcctgctgctgaatggccgggacatcggcatcgccctggctgatgtgacaggcaaccacaagtggggcctgctgctgactgtgtgtggggtggtgctgatggacttctctgctgacagcgctgacaaccccagccacgcctacatgatggatgtgtgcagccctgctgaccaggaccggggcctgaacatccacgccctgctggccggcctgggcggcggcttcggctacgtggtgggcggcatccactgggacaagacaggcttcggccgggccctgggcggccagctgcgggtcatctacctgttcaccgctgtgaccctgtctgtgaccaccgtgctgaccctggtgtccatccctgagcggcccctgcggcccccatctgagaagagagctgccatgaagagccccagcctgcccctgccccccagcccccctgtgctgcctgaggagggccctggggacagcctgcccagccacacagccaccaacttcagcagccccatcagcccccccagccccctgacccccaagtatggcagcttcatcagccgggacagcagcctgaccggcatcagcgagtttgccagcagctttggaacagccaacattgattctgtgctgattgactgcttcaccggcggccatgacagctacctggccatccctggctctgtgccccggccccccatctctgtgtccttcccccgggccccagatggcttctaccggcaggaccggggcctgctggagggccgggagggcgccctgaccagcggctgtgatggagacatcctgcgggtgggcagcctggacaccagcaagcccaggagcagcggcatcctgaagaggccccagaccctggccatcccagatgctgctgggggcggcggccctgagaccagcagaagaagaaatgtgaccttcagccagcaggtggccaacatcctgctgaatggagtgaagtatgagagcgagctgaccggcagcagcgagagagctgagcagcccctgtctgtgggccgcctgtgcagcaccatctgcaacatgcccaaggccctgcggaccctgtgtgtgaaccacttcctgggctggctgagctttgagggcatgctgctcttctacacagacttcatgggagaggtggtgttccagggcgaccccaaggccccccacaccagcgaggcctaccagaagtacaacagcggcgtgaccatgggctgctggggcatgtgcatctatgccttctctgctgccttctacagcgccatcctggagaagctggaggagttcctgtctgtgaggaccctgtacttcatcgcctacctggccttcggcctgggcaccggcctggccaccctgagcaggaacctgtatgtggtgctgagcctgtgcatcacctacggcatcctcttcagcaccctgtgcaccctgccctacagcctgctgtgtgactactaccagagcaagaagtttgctggcagcagcgcagatggcacccggcggggcatgggcgtggacatcagcctgctgagctgccagtacttcctggcccagatcctggtgtccctggtgctgggccccctgaccagcgctgtgggcagcgccaacggggtgatgtacttcagcagcctggtgtccttcctgggctgcctgtacagcagcctcttcgtcatctatgagatccccccatctgatgctgctgatgaggagcaccggcccctgctgctgaatgtgtag

SEQ ID NO: 170908 - DNA, 2349 bp, synthetic construct
  misc_feature 1..2349: note = Description of Artificial Sequence: Synthetic coding sequence
  source 1..2349: mol_type = other DNA
atgctgcagcagcccggccccaggcctggccggcagcagcccagcggggacagagatgcctgccgcctgcacccccagggccggcccccagccctgcccaccatgatcccagctgccagcagcaccccacctggagatgccctcttccccagcgtggccccccaggacttctggaggagccaggtgacaggctacagcggctctgtgaccaggcacctgagccaccgggccaacaacttcaagaggcaccccaagaggaggaagtgcatccggcccagccccccacctccacccaacaccccctgccccctggagctggtggactttggagacctgcacccccagaggagcttccgggagctgctcttcaacggctgcatcctgtttggaattgagttctcctatgccatggagacagcctacgtgacccctgtgctgctgcagatgggcctgcctgaccagctgtacagcctggtgtggttcatcagccccatcctgggcttcctgctgcagcccctgctgggcgcctggagcgaccgctgcaccagcagatttggaagaagaagacccttcatcctggtgctggccatcggggccctgctgggcctgagcctgctgctgaatggccgggacatcggcatcgccctggctgatgtgacaggcaaccacaagtggggcctgctgctgactgtgtgtggggtggtgctgatggacttctctgctgacagcgctgacaaccccagccacgcctacatgatggatgtgtgcagccctgctgaccaggaccggggcctgaacatccacgccctgctggccggcctgggcggcggcttcggctacgtggtgggcggcatccactgggacaagacaggcttcggccgggccctgggcggccagctgcgggtcatctacctgttcaccgctgtgaccctgtctgtgaccaccgtgctgaccctggtgtccatccctgagcggcccctgcggcccccatctgagaagagagctgccatgaagagccccagcctgcccctgccccccagcccccctgtgctgcctgaggagggccctggggacagcctgcccagccacacagccaccaacttcagcagccccatcagcccccccagccccctgacccccaagtatggcagcttcatcagccgggacagcagcctgaccggcatcagcgagtttgccagcagctttggaacagccaacattgattctgtgctgattgactgcttcaccggcggccatgacagctacctggccatccctggctctgtgccccggccccccatctctgtgtccttcccccgggccccagatggcttctaccggcaggaccggggcctgctggagggccgggagggcgccctgaccagcggctgtgatggagacatcctgcgggtgggcagcctggacaccagcaagcccaggagcagcggcatcctgaagaggccccagaccctggccatcccagatgctgctgggggcggcggccctgagaccagcagaagaagaaatgtgaccttcagccagcaggtggccaacatcctgctgaatggagtgaagtatgagagcgagctgaccggcagcagcgagagagctgagcagcccctgtctgtgggccgcctgtgcagcaccatctgcaacatgcccaaggccctgcggaccctgtgtgtgaaccacttcctgggctggctgagctttgagggcatgctgctcttctacacagacttcatgggagaggtggtgttccagggcgaccccaaggccccccacaccagcgaggcctaccagaagtacaacagcggcgtgaccatgggctgctggggcatgtgcatctatgccttctctgctgccttctacagcgccatcctggagaagctggaggagttcctgtctgtgaggaccctgtacttcatcgcctacctggccttcggcctgggcaccggcctggccaccctgagcaggaacctgtatgtggtgctgagcctgtgcatcacctacggcatcctcttcagcaccctgtgcaccctgccctacagcctgctgtgtgactactaccagagcaagaagtttgctggcagcagcgcagatggcacccggcggggcatgggcgtggacatcagcctgctgagctgccagtacttcctggcccagatcctggtgtccctggtgctgggccccctgaccagcgctgtgggcagcgccaacggggtgatgtacttcagcagcctggtgtccttcctgggctgcctgtacagcagcctcttcgtcatctatgagatccccccatctgatgctgctgatgaggagcaccggcccctgctgctgaatgtgtag

SEQ ID NO: 170909 - DNA, 2247 bp, synthetic construct; identical to SEQ ID NO: 170907
  misc_feature 1..2247: note = Description of Artificial Sequence: Synthetic coding sequence
  source 1..2247: mol_type = other DNA

SEQ ID NO: 170910 - DNA, 1593 bp, synthetic construct
  misc_feature 1..1593: note = Description of Artificial Sequence: Synthetic coding sequence
  source 1..1593: mol_type = other DNA
atgggcagcaacagcggccaggccggccgccacatctacaagagcctggctgatgatggcccctttgacagcgtggagccccccaagaggcccaccagccgcctcatcatgcacagcatggccatgtttggccgggagttctgctatgctgtggaggccgcctacgtgacccctgtgctgctgtctgtgggcctgcccagcagcctgtacagcatcgtgtggttcctgagccccatcctgggcttcctgctgcagcctgtggtgggcagcgccagtgaccactgccgcagccgctggggcagaagaagaccctacatcctgaccctgggcgtgatgatgctggtgggcatggccctgtacctgaatggagccaccgtggtggccgccctgattgccaaccccaggaggaagctggtgtgggccatctctgtgaccatgattggagtggtgctgtttgattttgctgctgacttcattgatggccccatcaaggcctacctgtttgatgtgtgcagccaccaggacaaggagaagggcctgcactaccacgccctcttcaccggctttggaggagccctgggctacctgctgggcgccatcgactgggcccacctggagctgggccgcctgctgggcacagagttccaggtgatgttcttcttcagcgccctggtgctgaccctgtgcttcaccgtgcacctgtgcagcatcagcgaggcccccctgacagaggtggccaagggcatccccccccagcagaccccccaggacccccccctgagcagtgatggcatgtatgaatatggcagcattgagaaggtgaagaatggctacgtgaaccctgagctggccatgcagggcgccaagaacaagaaccacgccgagcagacccggcgggccatgaccctgaagagcctgctgcgggccctggtgaacatgccaccccactaccgctacctgtgcatcagccacctgattggctggacagccttcctgagcaacatgctgttcttcacagacttcatgggccagatcgtgtacagaggagacccctacagcgcccacaacagcacagagttcctgatctatgagcggggcgtggaggtgggctgctggggcctgtgcatcaacagcgtcttcagcagcctgtacagctacttccagaaggtgctggtgtcctacatcggcctgaagggcctgtacttcaccggctacctgctgtttggcctgggcaccggcttcatcggcctcttccccaacgtgtacagcaccctggtgctgtgcagcctgtttggagtgatgagcagcaccctgtacacagtgcccttcaacctgatcacagagtaccaccgggaggaggagaaggagcggcagcaggcccctggaggagaccctgacaacagcgtgcggggcaagggcatggactgtgccaccctgacctgcatggtgcagctggcccagatcctggtgggcggcggcctgggcttcctggtgaacacagctggcaccgtggtggtggtggtgatcacagccagcgctgtggccctgattggctgctgctttgtggccctgtttgtgcgctacgtggactag

SEQ ID NO: 170911 - DNA, 1416 bp, synthetic construct
  misc_feature 1..1416: note = Description of Artificial Sequence: Synthetic coding sequence
  source 1..1416: mol_type = other DNA
atgggcagcaacagcggccaggccggccgccacatctacaagagcctggctgatgatggcccctttgacagcgtggagccccccaagaggcccaccagccgcctcatcatgcacagcatggccatgtttggccgggagttctgctatgctgtggaggccgcctacgtgacccctgtgctgctgtctgtgggcctgcccagcagcctgtacagcatcgtgtggttcctgagccccatcctgggcttcctgctgcagcctgtggtgggcagcgccagtgaccactgccgcagccgctggggcagaagaagaccctacatcctgaccctgggcgtgatgatgctggtgggcatggccctgtacctgaatggagccaccgtggtggccggctttggaggagccctgggctacctgctgggcgccatcgactgggcccacctggagctgggccgcctgctgggcacagagttccaggtgatgttcttcttcagcgccctggtgctgaccctgtgcttcaccgtgcacctgtgcagcatcagcgaggcccccctgacagaggtggccaagggcatccccccccagcagaccccccaggacccccccctgagcagtgatggcatgtatgaatatggcagcattgagaaggtgaagaatggctacgtgaaccctgagctggccatgcagggcgccaagaacaagaaccacgccgagcagacccggcgggccatgaccctgaagagcctgctgcgggccctggtgaacatgccaccccactaccgctacctgtgcatcagccacctgattggctggacagccttcctgagcaacatgctgttcttcacagacttcatgggccagatcgtgtacagaggagacccctacagcgcccacaacagcacagagttcctgatctatgaaagaggagtggaggtgggctgctggggcctgtgcatcaacagcgtcttcagcagcctgtacagctacttccagaaggtgctggtgtcctacatcggcctgaagggcctgtacttcaccggctacctgctgtttggcctgggcaccggcttcatcggcctcttccccaacgtgtacagcaccctggtgctgtgcagcctgtttggagtgatgagcagcaccctgtacacagtgcccttcaacctgatcacagagtaccaccgggaggaggagaaggagcggcagcaggcccctggaggagaccctgacaacagcgtgcggggcaagggcatggactgtgccaccctgacctgcatggtgcagctggcccagatcctggtgggcggcggcctgggcttcctggtgaacacagctggcaccgtggtggtggtggtgatcacagccagcgctgtggccctgattggctgctgctttgtggccctgtttgtgcgctacgtggactag

SEQ ID NO: 170912 - DNA, 897 bp, synthetic construct
  misc_feature 1..897: note = Description of Artificial Sequence: Synthetic coding sequence
  source 1..897: mol_type = other DNA
atgggcagcaacagcggccaggccggccgccacatctacaagagcctggctgatgatggcccctttgacagcgtggagccccccaagaggcccaccagccgcctcatcatgcacagcatggccatgtttggccgggagttctgctatgctgtggaggccgcctacgtgacccctgtgctgctgtctgtgggcctgcccagcagcctgtacagcatcgtgtggttcctgagccccatcctgggcttcctgctgcagcctgtggtgggcagcgccagtgaccactgccgcagccgctggggcagaagaagaccctacatcctgaccctgggcgtgatgatgctggtgggcatggccctgtacctgaatggagccaccgtggtggccgccctgattgccaaccccaggaggaagctggtgtgggccatctctgtgaccatgattggagtggtgctgtttgattttgctgctgacttcattgatggccccatcaaggcctacctgtttgatgtgtgcagccaccaggacaaggagaagggcctgcactaccacgccctcttcaccggcacccggcgggccatgaccctgaagagcctgctgcgggccctggtgaacatgccaccccactaccgctacctgtgcatcagccacctgattggctggacagccttcctgagcaacatgctgttcttcacagacttcatgggccagatcgtgtacagaggagacccctacagcgcccacaacagcacagagttcctgatctatgagcggggcgtggaggtgggctgctggggcctgtgcatcaacagcgtcttcagcagcctgtacagctgcaagagcttcagcctgctgaggatgagcagcaagagcttctggagcagcaccacctggatctag

SEQ ID NO: 170913 - DNA, 1383 bp, synthetic construct
  misc_feature 1..1383: note = Description of Artificial Sequence: Synthetic coding sequence
  source 1..1383: mol_type = other DNA
atgggcagcaacagcggccaggccggccgccacatctacaagagcctggctgatgatggcccctttgacagcgtggagccccccaagaggcccaccagccgcctcatcatgcacagcatggccatgtttggccgggagttctgctatgctgtggaggccgcctacgtgacccctgtgctgctgtctgtgggcctgcccagcagcctgtacagcatcgtgtggttcctgagccccatcctgggcttcctgctgcagcctgtggtgggcagcgccagtgaccactgccgcagccgctggggcagaagaagaccctacatcctgaccctgggcgtgatgatgctggtgggcatggccctgtacctgaatggagccaccgtggtggccgccctgattgccaaccccaggaggaagctggtgtgggccatctctgtgaccatgattggagtggtgctgtttgattttgctgctgacttcattgatggccccatcaaggcctacctgtttgatgtgtgcagccaccaggacaaggagaagggcctgcactaccacgccctcttcaccggctttggaggagccctgggctacctgctgggcgccatcgactgggcccacctggagctgggccgcctgctgggcacagagttccaggtgatgttcttcttcagcgccctggtgctgaccctgtgcttcaccgtgcacctgtgcagcatcagcgaggcccccctgacagaggtggccaagggcatccccccccagcagaccccccaggacccccccctgagcagtgatggcatgtatgaatatggcagcattgagaaggtgaagaatggctacgtgaaccctgagctggccatgcagggcgccaagaacaagaaccacgccgagcagacccggcgggccatgaccctgaagagcctgctgcgggccctggtgaacatgccaccccactaccgctacctgtgcatcagccacctgattggctggacagccttcctgagcaacatgctgttcttcacagacttcatgggccagatcgtgtacagaggagacccctacagcgcccacaacagcacagagttcctgatctatgagcggggcgtggaggtgggctgctggggcctgtgcatcaacagcgtcttcagcagcctgtacagctacttccagaaggtgctggtgtcctacatcggcctgaagggcctgtacttcaccggctacctgctgtttggcctgggcaccggcttcatcggcctcttccccaacgtgtacagcaccctggtgctgtgcagcctgtttggagtgatgagcagcaccctgtacacagtgcccttcaacctgatcacagagtaccaccgggaggaggagaaggaggtgtgctgccactag

SEQ ID NO: 170914 - DNA, 732 bp, synthetic construct
  misc_feature 1..732: note = Description of Artificial Sequence: Synthetic coding sequence
  source 1..732: mol_type = other DNA
atgggcagcaacagcggccaggccggccgccacatctacaagagcctggctgatgatggcccctttgacagcgtggagccccccaagaggcccaccagccgcctcatcatgcacagcatggccatgtttggccgggagttctgctatgctgtggaggccgcctacgtgacccctgtgctgctgtctgtgggcctgcccagcagcctgtacagcatcgtgtggttcctgagccccatcctgggcttcctgctgcagcctgtggtgggcagcgccagtgaccactgccgcagccgctggggcagaagaagaccctacatcctgaccctgggcgtgatgatgctggtgggcatggccctgtacctgaatggagccaccgtggtggccgccctgattgccaaccccaggaggaagctggtgtgggccatctctgtgaccatgattggagtggtgctgtttgattttgctgctgacttcattgatggccccatcaaggcctacctgtttgatgtgtgcagccaccaggacaaggagaagggcctgcactaccacgccctcttcacagacagccagggcaatgacatcaaggtgacagctgagagcactggagagcacgccagcagcctgcccctgcccctgcaccagcccccccactggatggacagcctgcctgtgcagcacgctgtgctgcaccgcttccacggccctgactgtgtgccccggggcagcctgtag

SEQ ID NO: 170915 - DNA, 741 bp, synthetic construct
  misc_feature 1..741: note = Description of Artificial Sequence: Synthetic coding sequence
  source 1..741: mol_type = other DNA
atggccctgtacctgaatggagccaccgtggtggccggctttggaggagccctgggctacctgctgggcgccatcgactgggcccacctggagctgggccgcctgctgggcacagagttccaggtgatgttcttcttcagcgccctggtgctgaccctgtgcttcaccgtgcacctgtgcagcatcagcgaggcccccctgacagaggtggccaagggcatccccccccagcagaccccccaggacccccccctgagcagtgatggcatgtatgaatatggcagcattgagaaggtgaagaatggctacgtgaaccctgagctggccatgcagggcgccaagaacaagaaccacgccgagcagacccggcgggccatgaccctgaagagcctgctgcgggccctggtgaacatgccaccccactaccgctacctgtgcatcagccacctgattggctggacagccttcctgagcaacatgctgttcttcacagacttcatgggccagatcgtgtacagaggagacccctacagcgcccacaacagcacagagttcctgatctatgaaagaggagtggaggtgggctgctggggcctgtgcatcaacagcgtcttcagcagcctgtacagctacttccagaaggtgctggtgtcctacatcggcctgaagggcctgtacttcaccggctacctgctgtttggcctgggcaccggcttcatcggcctcttccccaacgtgtag

SEQ ID NO: 170916 - DNA, 1662 bp, synthetic construct
  misc_feature 1..1662: note = Description of Artificial Sequence: Synthetic coding sequence
  source 1..1662: mol_type = other DNA
atggtgcagaggctgtgggtgtcccggctgctgcggcacaggaaggcccagctgctgctggtgaacctgctgaccttcggcctggaggtgtgcctggccgccggcatcacctacgtgccccccctgctgctggaggtgggcgtggaggagaagttcatgaccatggtgctgggcatcggccctgtgctgggcctggtgtgtgtgcccctgctgggcagcgccagtgaccactggaggggccgctatggaagaagaagacccttcatctgggccctgagcctgggcatcctgctgagcctcttcctgatcccccgggccggctggctggccggcctgctgtgcccagacccccggcccctggagctggccctgctgatcctgggcgtgggcctgctggacttctgtggccaggtgtgcttcacccccctggaggccctgctgagtgacctcttccgggaccctgaccactgccggcaggcctacagcgtgtatgccttcatgatcagcctgggcggctgcctgggctacctgctgcctgccatcgactgggacaccagcgccctggccccctacctgggcacccaggaggagtgcctgtttggcctgctgaccctcatcttcctgacctgtgtggccgccaccctgctggtggccgaggaggccgccctgggccccacagagcctgctgagggcctgagcgcccccagcctgagcccccactgctgcccctgccgggcccggctggccttcaggaacctgggcgccctgctgccccggctgcaccagctgtgctgcaggatgcccaggaccctgcggcggctgtttgtggccgagctgtgctcctggatggccctgatgaccttcaccctcttctacacagactttgtgggggagggcctgtaccagggcgtgcccagggctgagcctggaacagaggcccggcggcactatgatgagggcgtgaggatgggcagcctgggcctcttcctgcagtgtgccatcagcctggtgttcagcctggtgatggaccggctggtgcagagatttggcaccagggctgtgtacctggcctctgtggccgccttccctgtggccgccggggccacctgcctgagccacagcgtggccgtggtgacagccagcgctgccctgaccggcttcaccttcagcgccctgcagatcctgccctacaccctggccagcctgtaccaccgggagaagcaggtgttcctgcccaagtacagaggagacaccggcggggccagcagcgaggacagcctgatgaccagcttcctgcccggccccaagccaggggcccccttccccaatggacatgtgggcgctgggggcagcggcctgctgcccccacctccagccctgtgtggggccagcgcctgtgatgtgtctgtgcgggtggtggtgggggagcccacagaggcccgggtggtgcccggccggggcatctgcctggacctggccatcctggacagcgccttcctgctgagccaggtggcccccagcctcttcatgggcagcatcgtgcagctgagccagagcgtgacagcctacatggtgtctgctgctggcctgggcctggtggccatctactttgccacccaggtggtgtttgacaagagtgacctggccaagtacagcgcctag

SEQ ID NO: 170917 - DNA, 1293 bp, synthetic construct
  misc_feature 1..1293: note = Description of Artificial Sequence: Synthetic coding sequence
  source 1..1293: mol_type = other DNA
atggagggcagcgccagccccccagagaagccccgggcccggcctgctgctgctgtgctgtgccggggccctgtggagcccctggtgttcctggccaactttgccctggtgctgcagggccccctgaccacccagtacctgtggcaccgcttctctgctgacctgggctacaacggcacccggcagaggggcggctgcagcaacagatctgctgaccccaccatgcaggaggtggagaccctgaccagccactggaccctgtacatgaatgtgggcggcttcctggtgggcctcttcagcagcaccctgctgggcgcctggagcgacagcgtgggcagaagacccctgctggtgctggccagcctgggcctgctgctgcaggccctggtgtctgtgtttgtggtgcagctgcagctgcacgtgggctactttgtgctgggccgcatcctgtgtgccctgctgggggactttggaggcctgctggccgccagctttgcctctgtggctgatgtgagcagcagccgcagcaggaccttcaggatggccctgctggaggccagcattggagtggccggcatgctggccagcctgctgggcggccactggctgcgggcccagggctacgccaaccccttctggctggccctggccctgctgattgccatgaccctgtatgctgccttctgcttcggggagaccctgaaggagcccaagagcaccaggctcttcaccttccgccaccacaggagcatcgtgcagctgtatgtggccccagcccctgagaagagcaggaagcacctggccctgtacagcctggccatctttgtggtgatcaccgtgcactttggagcccaggacatcctgaccctgtatgagctgagcacccccctgtgctgggacagcaagctgattggctacggcagcgctgcccagcacctgccctacctgaccagcctgctggccctgaagctgctgcagtactgcctggctgatgcctgggtggccgagatcggcctggccttcaacatcctgggcatggtggtgtttgcctttgccaccatcacccccctgatgttcaccggggccctcttctctgctgtggcctgtgtgaacagcctggccatgctgacagccagcggcttcaacagcctgtacccagccaccctgaacttcatgaagggcttccccttcctgctgggcgccggcctgctgctgatcccagctgtgctgattggcatgctggagaaggctgacccccacctggagttccagcagttcccccagagcccctag

SEQ ID NO: 170918 - DNA, 1380 bp, synthetic construct
  misc_feature 1..1380: note = Description of Artificial Sequence: Synthetic coding sequence
  source 1..1380: mol_type = other DNA
atggagggcagcgccagccccccagagaagccccgggcccggcctgctgctgctgtgctgtgccggggccctgtggagcccctggtgttcctggccaactttgccctggtgctgcagggccccctgaccacccagtacctgtggcaccgcttctctgctgacctgggctacaacggcacccggcagaggggcggctgcagcaacagatctgctgaccccaccatgcaggaggtggagaccctgaccagccactggaccctgtacatgaatgtgggcggcttcctggtgggcctcttcagcagcaccctgctgggcgcctggagcgacagcgtgggcagaagacccctgctggtgctggccagcctgggcctgctgctgcaggccctggtgtctgtgtttgtggtgcagctgcagctgcacgtgggctactttgtgctgggccgcatcctgtgtgccctgctgggggactttggaggcctgctggccgccagctttgcctctgtggctgatgtgagcagcagccgcagcaggaccttcaggatggccctgctggaggccagcattggagtggccggcatgctggccagcctgctgggcggccactggctgcgggcccagggctacgccaaccccttctggctggccctggccctgctgattgccatgaccctgtatgctgccttctgcttcggggagaccctgaaggagcccaagagcaccaggctcttcaccttccgccaccacaggagcatcgtgcagctgtatgtggccccagcccctgagaagagcaggaagcacctggccctgtacagcctggccatctttgtggtgatcaccgtgcactttggagcccaggacatcctgaccctgtatgagctgagcacccccctgtgctgggacagcaagctgattggctacggcagcgctgcccagcacctgccctacctgaccagcctgctggccctgaagctgctgcagtactgcctggctgatgcctgggtggccgagatcggcctggccttcaacatcctgggcatggtggtgtttgcctttgccaccatcacccccctgatgttcaccggctacggcctgctcttcctgagcctggtgatcacccctgtgatccgggccaagctgagcaagctggtgcgggagacagagcagggcgccctcttctctgctgtggcctgtgtgaacagcctggccatgctgacagccagcggcatcttcaacagcctgtacccagccaccctgaacttcatgaagggcttccccttcctgctgggcgccggcctgctgctgatcccagctgtgctgattggcatgctggagaaggctgacccccacctggagttccagcagttcccccagagcccctag

SEQ ID NO: 170919 - DNA, 1428 bp, synthetic construct
  misc_feature 1..1428: note = Description of Artificial Sequence: Synthetic coding sequence
  source 1..1428: mol_type = other DNA
atgagccctgaggtgacctgcccccggcggggccacctgccccgcttccaccccaggacctgggtggagcctgtggtggccagcagccaggtggccgccagcctgtatgatgctggcctgctgctggtggtgaaggccagctatggcaccggcggcagcagcaaccacagcgccagccccagccccaggggggccctggaggaccagcagcagagggccatcagcaacttctacatcatctacaacctggtggtgggcctgagccccctgctgagcgcctacggcctgggctggctgagtgaccgctaccacaggaagatcagcatctgcatgagcctgctgggcttcctgctgagccggctgggcctgctgctgaaggtgctgctggactggcctgtggaggtgctgtatggagctgctgccctgaatggcctgtttggaggcttcagcgccttctggagcggcgtgatggccctgggcagcctgggcagcagcgagggccgccgctctgtgcggctcatcctgattgacctgatgctgggcctggccggcttctgtggctccatggccagcggccacctgttcaagcagatggccggccacagcggccagggcctcatcctgacagcctgcagcgtgtcctgtgccagctttgccctgctgtacagcctgctggtgctgaaggtgcctgagagcgtggccaagcccagccaggagctgcctgctgtggacacagtgtctggaacagtgggcacctaccgcaccctggaccctgaccagctggaccagcagtatgctgtgggccacccccccagccctgggaaggccaagccccacaagaccaccatcgccctgctgtttgtgggcgccatcatctatgacctggccgtggtgggcaccgtggatgtgatccccctgtttgtgctgcgggagcccctgggctggaaccaggtgcaggtgggctacggcatggccgccggctacaccatcttcatcaccagcttcctgggcgtgctggtgttcagccgctgcttccgggacaccaccatgatcatgattggcatggtgtcctttggcagcggggccctgctgctggcctttgtgaaggagacctacatgttctacatcgcccgggctgtgatgctgtttgccctgatccctgtgaccaccatccgcagcgccatgagcaagctgatcaagggcagcagctatggcaaggtgtttgtgatcctgcagctgagcctggccctgactggagtggtgaccagcaccctgtacaacaagatctaccagctgaccatggacatgtttgtgggcagctgctttgccctgagcagcttcctgtccttcctggccatcatccccatcagcatcgtggcctacaagcaggtgcccctgagcccctatggagacatcatcgagaagtag

SEQ ID NO: 170920 - DNA, 1713 bp, synthetic construct
  misc_feature 1..1713: note = Description of Artificial Sequence: Synthetic coding sequence
  source 1..1713: mol_type = other DNA
atggaggcccctgaggagcccgcccctgtgcggggcggccctgaggccaccctggaggtgcggggcagccgctgcctgcggctgagcgccttccgggaggagctgcgggccctgctggtgctggccggccctgccttcctggtgcagctgatggtgttcctgatctccttcatcagcagcgtcttctgtggccacctgggcaagctggagctggatgctgtgaccctggccatcgctgtgatcaacgtgactggagtgtctgtgggcttcggcctgagcagcgcctgtgacaccctcatcagccagacctacggcagccagaacctgaagcacgtgggcgtcatcctgcagaggtctgccctggtgctgctgctgtgctgcttcccctgctgggccctcttcctgaacacccagcacatcctgctgctcttccggcaggaccctgatgtgtcccggctgacccagacctacgtgaccatcttcatcccagccctgcctgccaccttcctgtacatgctgcaggtgaagtacctgctgaaccagggcatcgtgctgccccagatcgtgactggagtggccgccaacctggtgaatgccctggccaactacctgttcctgcaccagctgcacctgggcgtcatcggcagcgccctggccaacctgatcagccagtacaccctggccctgctgctcttcctgtacatcctgggcaagaagctgcaccaggccacctggggcggctggagcctggagtgcctgcaggactgggccagcttcctgcggctggccatccccagcatgctgatgctgtgcatggagtggtgggcctatgaggtgggcagcttcctgagcggcatcctgggcatggtggagctgggcgcccagagcatcgtgtatgagctggccatcatcgtgtacatggtgcctgctggcttctctgtggccgcctctgtgcgggtgggcaatgccctgggcgctggggacatggagcaggccaggaagagcagcacagtgtccctgctgatcaccgtgctgtttgctgtggccttctctgtgctgctgctgagctgcaaggaccacgtgggctacatcttcaccacagaccgggacatcatcaacctggtggcccaggtggtgcccatctatgctgtgagccacctgtttgaggccctggcctgcaccagcggaggagtgctgcggggcagcggcaaccagaaggtgggcgccatcgtgaacaccatcggctactacgtggtgggcctgcccatcggcatcgccctgatgtttgccaccaccctgggcgtgatgggcctgtggagcggcatcatcatctgcaccgtcttccaggccgtgtgcttcctgggcttcatcatccagctgaactggaagaaggcctgccagcaggcccaggtgcacgccaacctgaaggtgaacaacgtgcccaggagcggcaacagcgccctgccccaggaccccctgcaccctggctgcccagagaacctggagggcatcctgaccaatgatgtgggcaagacaggagagccccagagcgaccagcagatgaggcaggaggagcccctgcctgagcacccccaggatggagccaagctgagcaggaagcagctggtgctgcggcggggcctgctgctgctgggcgtcttcctgatcctgctggtgggcatcctggtgcgcttctacgtgcgcatccagtag

SEQ ID NO: 170921 - DNA, 1761 bp, synthetic construct
  misc_feature 1..1761: note = Description of Artificial Sequence: Synthetic coding sequence
  source 1..1761: mol_type = other DNA
atggaggcccctgaggagcccgcccctgtgcggggcggccctgaggccaccctggaggtgcggggcagccgctgcctgcggctgagcgccttccgggaggagctgcgggccctgctggtgctggccggccctgccttcctggtgcagctgatggtgttcctgatctccttcatcagcagcgtcttctgtggccacctgggcaagctggagctggatgctgtgaccctggccatcgctgtgatcaacgtgactggagtgtctgtgggcttcggcctgagcagcgcctgtgacaccctcatcagccagacctacggcagccagaacctgaagcacgtgggcgtcatcctgcagaggtctgccctggtgctgctgctgtgctgcttcccctgctgggccctcttcctgaacacccagcacatcctgctgctcttccggcaggaccctgatgtgtcccggctgacccagacctacgtgaccatcttcatcccagccctgcctgccaccttcctgtacatgctgcaggtgaagtacctgctgaaccagggcatcgtgctgccccagatcgtgactggagtggccgccaacctggtgaatgccctggccaactacctgttcctgcaccagctgcacctgggcgtcatcggcagcgccctggccaacctgatcagccagtacaccctggccctgctgctcttcctgtacatcctgggcaagaagctgcaccaggccacctggggcggctggagcctggagtgcctgcaggactgggccagcttcctgcggctggccatccccagcatgctgatgctgtgcatggagtggtgggcctatgaggtgggcagcttcctgagcggcatcctgggcatggtggagctgggcgcccagagcatcgtgtatgagctggccatcatcgtgtacatggtgcctgctggcttctctgtggccgcctctgtgcgggtgggcaatgccctgggcgctggggacatggagcaggccaggaagagcagcacagtgtccctgctgatcaccgtgctgtttgctgtggccttctctgtgctgctgctgagctgcaaggaccacgtgggctacatcttcaccacagaccgggacatcatcaacctggtggcccaggtggtgcccatctatgctgtgagccacctgtttgaggccctggcctgcaccagcggaggagtgctgcggggcagcggcaaccagaaggtgggcgccatcgtgaacaccatcggctactacgtggtgggcctgcccatcggcatcgccctgatgtttgccaccaccctgggcgtgatgggcctgtggagcggcatcatcatctgcaccgtcttccaggccgtgtgcttcctgggcttcatcatccagctgaactggaagaaggcctgccagcaggcccaggtgcacgccaacctgaaggtgaacaacgtgcccaggagcggcaacagcgccctgccccaggaccccctgcaccctggctgcccagagaacctggagggcatcctgaccaatgatgtgggcaagacaggagagccccagagcgaccagcagatgaggcaggaggagcccctgcctgagcacccccaggatggagccaagctgagcaggaagcagctggtgctgcggcggggcctgctgctgctgggcgtcttcctgatcctgctggccggcgtgcgctggtgtgaccacagcagcctgcagcccaggaccctgggcctgcaggccatcctgctgtgccagcccccagagtag

SEQ ID NO: 170922 - DNA, 849 bp, synthetic construct
  misc_feature 1..849: note = Description of Artificial Sequence: Synthetic coding sequence
  source 1..849: mol_type = other DNA
atggtggagctgggcgcccagagcatcgtgtatgagctggccatcatcgtgtacatggtgcctgctggcttctctgtggccgcctctgtgcgggtgggcaatgccctgggcgctggggacatggagcaggccaggaagagcagcacagtgtccctgctgatcaccgtgctgtttgctgtggccttctctgtgctgctgctgagctgcaaggaccacgtgggctacatcttcaccacagaccgggacatcatcaacctggtggcccaggtggtgcccatctatgctgtgagccacctgtttgaggccctggcctgcaccagcggaggagtgctgcggggcagcggcaaccagaaggtgggcgccatcgtgaacaccatcggctactacgtggtgggcctgcccatcggcatcgccctgatgtttgccaccaccctgggcgtgatgggcctgtggagcggcatcatcatctgcaccgtcttccaggccgtgtgcttcctgggcttcatcatccagctgaactggaagaaggcctgccagcaggcccaggtgcacgccaacctgaaggtgaacaacgtgcccaggagcggcaacagcgccctgccccaggaccccctgcaccctggctgcccagagaacctggagggcatcctgaccaatgatgtgggcaagacaggagagccccagagcgaccagcagatgaggcaggaggagcccctgcctgagcacccccaggatggagccaagctgagcaggaagcagctggtgctgcggcggggcctgctgctgctgggcgtcttcctgatcctgctggtgggcatcctggtgcgcttctacgtgcgcatccagtag

SEQ ID NO: 170923 - DNA, 1332 bp, synthetic construct
  misc_feature 1..1332: note = Description of Artificial Sequence: Synthetic coding sequence
  source 1..1332: mol_type = other DNA
atggaggcccctgaggagcccgcccctgtgcggggcggccctgaggccaccctggaggtgcggggcagccgctgcctgcggctgagcgccttccgggaggagctgcgggccctgctggtgctggccggccctgccttcctggtgcagctgatggtgttcctgatctccttcatcagcagcgtcttctgtggccacctgggcaagctggagctggatgctgtgaccctggccatcgccacctacggcagccagaacctgaagcacgtgggcgtcatcctgcagaggtctgccctggtgctgctgctgtgctgcttcccctgctgggccctcttcctgaacacccagcacatcctgctgctcttccggcaggaccctgatgtgtcccggctgacccagacctacgtgaccatcttcatcccagccctgcctgccaccttcctgtacatgctgcaggtgaagtacctgctgaaccagggcatcgtgctgccccagatcgtgactggagtggccgccaacctggtgaatgccctggccaactacctgttcctgcaccagctgcacctgggcgtgattggcagcgccctggccaacctgatcagccagtacaccctggccctgctgctcttcctgtacatcctgggcaagaagctgcaccaggccacctggggcggctggagcctggagtgcctgcaggactgggccagcttcctgcggctggccatccccagcatgctgatgctgtgcatggagtggtgggcctatgaggtgggcagcttcctgagcggcatcctgggcatggtggagctgggcgcccagagcatcgtgtatgagctggccatcatcgtgtacatggtgcctgctggcttctctgtggccgcctctgtgcgggtgggcaatgccctgggcgctggggacatggagcaggccaggaagagcagcacagtgtccctgctgatcaccgtgctgtttgctgtggccttctctgtgctgctgctgagctgcaaggaccacgtgggctacatcttcaccacagaccgggacatcatcaacctggtggcccaggtggtgcccatctatgctgtgagccacctgtttgaggccctggcctgcaccagcggcggcgtgctgcggggcagcggcaaccagaaggtgggcgccatcgtgaacaccatcggctactacgtggtgggcctgcccatcggcatcgccctgatgtttgccaccaccctgggcgtgatgggcagcggcacccggcagtttgagagcaagcagagggccagcgagtgggagttctgcagccccagcggcagcgccagcccccgggtgccctag

SEQ ID NO: 170924 - DNA, 738 bp, synthetic construct
  misc_feature 1..738: note = Description of Artificial Sequence: Synthetic coding sequence
  source 1..738: mol_type = other DNA
atgctgatgctgtgcatggagtggtgggcctatgaggtgggcagcttcctgagcggcatcctgggcatggtggagctgggcgcccagagcatcgtgtatgagctggccatcatcgtgtacatggtgcctgctggcttctctgtggccgcctctgtgcgggtgggcaatgccctgggcgctggggacatggagcaggccaggaagagcagcacagtgtccctgctgatcaccgtgctgtttgctgtggccttctctgtgctgctgctgagctgcaaggaccacgtgggctacatcttcaccacagaccgggacatcatcaacctggtggcccaggtggtgcccatctatgctgtgagccacctgtttgaggccctggcctgcaccagcggaggagtgctgcggggcagcggcaaccagaaggtgggcgccatcgtgaacaccatcggctactacgtggtgggcctgcccatcggcatcgccctgatgtttgccaccaccctgggcgtgatgggctgcccagagaacctggagggcatcctgaccaatgatgtgggcaagacaggagagccccagagcgaccagcagatgaggcaggaggagcccctgcctgagcacccccaggatggagccaagctgagcaggaagcagctggtgctgcggcggggcctgctgctgctgggcgtcttcctgatcctgctggtgggcatcctggtgcgcttctacgtgcgcatccagtag

SEQ ID NO: 170925 - DNA, 1761 bp, synthetic construct; identical to SEQ ID NO: 170921
  misc_feature 1..1761: note = Description of Artificial Sequence: Synthetic coding sequence
  source 1..1761: mol_type = other DNA

SEQ ID NO: 170926 - DNA, 735 bp, synthetic construct
  misc_feature 1..735: note = Description of Artificial Sequence: Synthetic coding sequence
  source 1..735: mol_type = other DNA
atggaggcccctgaggagcccgcccctgtgcggggcggccctgaggccaccctggaggtgcggggcagccgctgcctgcggctgagcgccttccgggaggagctgcgggccctgctggtgctggccggccctgccttcctggtgcagctgatggtgttcctgatctccttcatcagcagcgtcttctgtggccacctgggcaagctggagctggatgctgtgaccctggccatcgctgtgatcaacgtgactggagtgtctgtgggcttcggcctgagcagcgcctgtgacaccctcatcagccagacctacggcagccagaacctgaagcacgtgggcgtcatcctgcagaggtctgccctggtgctgctgctgtgctgcttcccctgctgggccctcttcctgaacacccagcacatcctgctgctcttccggcaggaccctgatgtgtcccggctgacccagacctacgtgaccatcttcatcccagccctgcctgccaccttcctgtacatgctgcaggtgaagtacctgctgaaccagaggctgtgcaccgggaagctggacttccctgtgcaccctggcagcacccccctgagcctgcacccccgggagaagacagccagcagctacatgggccgcctggtgccccgggtgcctgctggcctgggcctgctgcccccacctggccacccccagcacgcccatgctgtgcatggagtggtgggcctgtag

SEQ ID NO: 170927 - DNA, 1809 bp, synthetic construct
  misc_feature 1..1809: note = Description of Artificial Sequence: Synthetic coding sequence
  source 1..1809: mol_type = other DNA
atggacagcctgcaggacacagtggccctggaccacggcggctgctgcccagccctgagccggctggtgccccggggctttggaacagagatgtggaccctgtttgccctgagcggccccctcttcctgttccaggtgctgaccttcatgatctacatcgtgtccaccgtcttctgtggccacctgggcaaggtggagctggcctctgtgaccctggccgtggcctttgtgaatgtgtgtggggtgtctgtgggcgtgggcctgagcagcgcctgtgacaccctgatgagccagagctttggcagccccaacaagaagcacgtgggcgtcatcctgcagagaggagccctggtgctgctgctgtgctgcctgccctgctgggccctcttcctgaacacccagcacatcctgctgctcttccggcaggaccctgatgtgtcccggctgacccaggactatgtgatgatcttcatccctggcctgcccgtcatcttcctgtacaacctgctggccaagtacctgcagaaccagggctggctgaagggccaggaggaggagagccccttccagaccccaggcctgagcatcctgcaccccagccacagccacctgagccgggccagcttccacctgttccagaagatcacctggccccaggtgctgagcggcgtggtgggcaactgtgtgaatggagtggccaactatgccctggtgtctgtgctgaacctgggcgtgcggggcagcgcctatgccaacatcatcagccagtttgcccagaccgtcttcctgctgctgtacatcgtgctgaagaagctgcacctggagacctgggccggctggagcagccagtgcctgcaggactggggccccttcttcagcctggccgtgcccagcatgctgatgatctgtgtggagtggtgggcctatgaaattggcagcttcctgatgggcctgctgtctgtggtggacctgagcgcccaggccgtcatctatgaggtggccaccgtgacctacatgatccccctgggcctgagcattggagtgtgtgtgcgggtgggcatggccctgggcgctgctgacacagtgcaggccaagaggtctgctgtgtctggagtgctgagcatcgtgggcatcagcctggtgctgggcaccctcatcagcatcctgaagaaccagctgggccacatcttcaccaatgatgaagatgtgattgccctggtgtcccaggtgctgcctgtgtacagcgtcttccacgtgtttgaggccatctgctgcgtgtatggaggagtgctgcggggcaccgggaagcaggcctttggagctgctgtgaatgccatcacctactacatcatcggcctgcccctgggcatcctgctgacctttgtggtgaggatgaggatcatgggcctgtggctgggcatgctggcctgtgtgttcctggccacagctgcctttgtggcctacacagcccggctggactggaagctggccgctgaggaggccaagaagcacagcggccggcagcagcagcagagagctgagagcacagccacccggcccggccctgagaaggctgtgctgagctctgtggccaccggcagcagccctggcatcaccctgaccacctacagccgctcagaatgtcatgtggacttcttccgcaccccagaggaggcccacgccctgagcgcccccaccagccggctgtctgtgaagcagctggtgatcagaagaggagctgccctgggcgccgccagcgccaccctgatggtgggcctgactgtgcgcatcctggccaccaggcactag

SEQ ID NO: 170928 - DNA, 1743 bp, synthetic construct
  misc_feature 1..1743: note = Description of Artificial Sequence: Synthetic coding sequence
  source 1..1743: mol_type = other DNA
atggacagcctgcaggacacagtggccctggaccacggcggctgctgcccagccctgagccggctggtgccccggggctttggaacagagatgtggaccctgtttgccctgagcggccccctcttcctgttccaggtgctgaccttcatgatctacatcgtgtccaccgtcttctgtggccacctgggcaaggtggagctggcctctgtgaccctggccgtggcctttgtgaatgtgtgtggggtgtctgtgggcgtgggcctgagcagcgcctgtgacaccctgatgagccagagctttggcagccccaacaagaagcacgtgggcgtcatcctgcagagaggagccctggtgctgctgctgtgctgcctgccctgctgggccctcttcctgaacacccagcacatcctgctgctcttccggcaggaccctgatgtgtcccggctgacccaggactatgtgatgatcttcatccctggcctgcccgtcatcttcctgtacaacctgctggccaagtacctgcagaaccagaagatcacctggccccaggtgctgagcggcgtggtgggcaactgtgtgaatggagtggccaactatgccctggtgtctgtgctgaacctgggcgtgcggggcagcgcctatgccaacatcatcagccagtttgcccagaccgtcttcctgctgctgtacatcgtgctgaagaagctgcacctggagacctgggccggctggagcagccagtgcctgcaggactggggccccttcttcagcctggccgtgcccagcatgctgatgatctgtgtggagtggtgggcctatgaaattggcagcttcctgatgggcctgctgtctgtggtggacctgagcgcccaggccgtcatctatgaggtggccaccgtgacctacatgaggcacagccaccggctggcctatgctgcccacgtgacccgcatccccctgggcctgagcattggagtgtgtgtgcgggtgggcatggccctgggcgctgctgacacagtgcaggccaagaggtctgctgtgtctggagtgctgagcatcgtgggcatcagcctggtgctgggcaccctcatcagcatcctgaagaaccagctgggccacatcttcaccaatgatgaagatgtgattgccctggtgtcccaggtgctgcctgtgtacagcgtcttccacgtgtttgaggccatctgctgcgtgtatggaggagtgctgcggggcaccgggaagcaggcctttggagctgctgtgaatgccatcacctactacatcatcggcctgcccctgggcatcctgctgacctttgtggtgaggatgaggatcatgggcctgtggctgggcatgctggcctgtgtgttcctggccacagctgcctttgtggcctacacagcccggctggactggaagctggccgctgaggaggccaagaagcacagcggccggcagcagcagcagagagctgagagcacagccacccggcccggccctgagaaggctgtgctgagctctgtggccaccggcagcagccctggcatcaccctgaccacctacagccgctcagaatgtcatgtggacttcttccgcaccccagaggaggcccacgccctgagcgcccccaccagccggctgtctgtgaagcagctggtgatcagaagaggagctgccctgggcgccgccagcgccaccctgatggtgggcctgactgtgcgcatcctggccaccaggcactag

SEQ ID NO: 170929 - DNA, 1092 bp, synthetic construct
  misc_feature 1..1092: note = Description of Artificial Sequence: Synthetic coding sequence
  source 1..1092: mol_type = other DNA
atggacagcctgcaggacacagtggccctggaccacggcggctgctgcccagccctgagccggctggtgccccggggctttggaacagagatgtggaccctgtttgccctgagcggccccctcttcctgttccaggtgctgaccttcatgatctacatcgtgtccaccgtcttctgtggccacctgggcaaggtggagctggcctctgtgaccctggccgtggcctttgtgaatgtgtgtggggtgtctgtgggcgtgggcctgagcagcgcctgtgacaccctgatgagccagagctttggcagccccaacaagaagcacgtgggcgtcatcctgcagagaggagccctggtgctgctgctgtgctgcctgccctgctgggccctcttcctgaacacccagcacatcctgctgctcttccggcaggaccctgatgtgtcccggctgacccaggactatgtgatgatcttcatccctggcctgcccgtcatcttcctgtacaacctgctggccaagtacctgcagaaccagaagatcacctggccccaggtgctgagcggcgtggtgggcaactgtgtgaatggagtggccaactatgccctggtgtctgtgctgaacctgggcgtgcggggcagcgcctatgccaacatcatcagccagtttgcccagaccgtcttcctgctgctgtacatcgtgctgaagaagctgcacctggagacctgggccggctggagcagccagtgcctgcaggactggggccccttcttcagcctggccgtgcccagcatgctgatgatctgtgtggagtggtgggcctatgaaattggcagcttcctgatgggcctgctgtctgtggtggacctgagcgcccaggccgtcatctatgaggtggccaccgtgacctacatgatccccctgggcctgagcattggagtgtgtgtgcgggtgggcatggccctgggcgctgctgacacagtgcaggccaagaggtctgctgtgtctggagtgctgagcatcgtgggcatcagcctggtgctgggcaccctcatcagcatcctgaagaaccagctgggccacatcttcaccaactag

SEQ ID NO: 170930 - DNA, 891 bp, synthetic construct
  misc_feature 1..891: note = Description of Artificial Sequence: Synthetic coding sequence
  source 1..891: mol_type = other DNA
atgatctacatcgtgtccacagtgttctgtggccacctgggcaaggtggagctggcctctgtgaccctggccgtggcctttgtgaatgtgtgtggggtgtctgtgggcgtgggcctgagcagcgcctgtgacaccctgatgagccagagctttggcagccccaacaagaagcacgtgggcgtcatcctgcagagaggagccctggtgctgctgctgtgctgcctgccctgctgggccctcttcctgaacacccagcacatcctgctgctcttccggcaggaccctgatgtgtcccggctgacccaggactatgtgatgatcttcatccctggcctgcctgtgatcttcctgtacaacctgctggccaagtacctgcagaaccagaagatcacctggccccaggtgctgtctggagtggtgggcaactgtgtgaatggagtggccaactatgccctggtgtctgtgctgaacctgggcgtgcggggcagcgcctatgccaacatcatcagccagtttgcccagacagtgttcctgctgctgtacatcgtgctgaagaagctgcacctggagacctgggccggctggagcagccagtgcctgcaggactggggccccttcttcagcctggccgtgcccagcatgctgatgatctgtgtggagtggtgggcctatgagatcggcagcttcctgatgggcctgctgtctgtggtggacctgagcgcccaggccgtcatctatgaggtggccaccgtgacctacatgatccccctgggcctgagcattggagtgtgtgtgcgggtgggcatggccctgggcgctgctgacacagtgcaggccaagaggtctgctgtgtctggagtgctgagcatcgcccggagtgacccctggtag

SEQ ID NO: 170931 - DNA, 531 bp, synthetic construct
  misc_feature 1..531: note = Description of Artificial Sequence: Synthetic coding sequence
  source 1..531: mol_type = other DNA
atgaaggccagcggcaccctgcgggagtacaaggtggtgggccgctgcctgcccacccccaagtgccacaccccacccctgtacaggatgaggatctttgcccccaaccacgtggtggccaagagccgcttctggtactttgtgtcccagctgaagaagatgaagaagagcagcggggagatcgtgtactgcggccaggtgtttgagaagagccccctgcgggtgaagaactttggcatctggctgcgctatgacagccgcagcggcacccacaacatgtaccgggagtacagagacctgaccacagctggagctgtgacccagtgctacagagacatgggcgcccggcaccgggcccgggcccacagcatccagatcatgaaggtggaggagattgctgccagcaagtgccggcggcctgctgtgaagcagttccatgacagcaagatcaagttccccctgccccaccgggtgctgcggcggcagcacaagccccgcttcaccaccaagaggcccaacaccttcttctag

SEQ ID NO: 170932 - DNA, 1995 bp, synthetic construct
  misc_feature 1..1995: note = Description of Artificial Sequence: Synthetic coding sequence
  source 1..1995: mol_type = other DNA
atggacagcagcacctggagccccaagaccacagctgtgaccaggcctgtggagacccatgagctgatcagaaatgctgctgacatcagcatcatcgtcatctactttgtggtggtgatggctgtgggcctgtgggccatgttcagcaccaacagaggcaccgtgggcggcttcttcctggccggccgctccatggtgtggtggcccatcggggccagcctgtttgccagcaacatcggcagcggccactttgtgggcctggccggcaccggggccgccagcggcatcgccatcggcggctttgagtggaatgccctggtgctggtggtggtgctgggctggctgtttgtgcccatctacatcaaggccggcgtggtgaccatgcctgagtacctgaggaagagatttggaggccagaggatccaggtgtacctgagcctgctgagcctgctgctgtacatcttcaccaagatctctgctgacatcttcagcggggccatcttcatcaacctggccctgggcctgaacctgtacctggccatcttcctgctgctggccatcacagccctgtacaccatcaccggcggcctggccgctgtgatctacacagacaccctgcagaccgtcatcatgctggtgggcagcctcatcctgactggatttgccttccacgaggtgggcggctatgatgccttcatggagaagtacatgaaggccatccccaccatcgtgtctgatggcaacaccaccttccaggagaagtgctacacccccagggctgacagcttccacatcttccgggaccccctgactggagacctgccctggccaggcttcatcttcggcatgagcatcctgaccctgtggtactggtgcacagaccaggtgattgtgcagcgctgcctgagcgccaagaacatgagccacgtgaagggcggctgcatcctgtgtggctacctgaagctgatgcccatgttcatcatggtgatgcctggcatgatcagccgcatcctgtacacagagaagatcgcctgtgtggtgcccagtgaatgtgagaagtactgcggcaccaaggtgggctgcaccaacatcgcctaccccaccctggtggtggagctgatgcccaacggcctgcggggcctgatgctgtctgtgatgctggccagcctgatgagcagcctgaccagcatcttcaacagcgccagcaccctcttcaccatggacatctatgccaaggtgaggaagagggccagcgagaaggagctgatgattgctggccgcctcttcatcctggtgctgattggcatcagcatcgcctgggtgcccatcgtgcagagcgcccagagcggccagctgtttgactacatccagagcatcaccagctacctgggcccccccatcgctgctgtgttcctgctggccatcttctggaagagggtgaatgaacctggggccttctggggcctcatcctgggcctgctgattggcatcagcaggatgatcacagaatttgcctacggcaccggcagctgcatggagcccagcaactgccccaccatcatctgtggggtgcactacctgtactttgccatcatcctgtttgccatctccttcatcaccatcgtggtgatcagcctgctgaccaagcccatcccagatgtgcacctgtaccgcctgtgctggagcctgaggaacagcaaggaggagagaattgacctggatgctgaggaggagaacatccaggagggccccaaggagaccatcgagattgagacccaggtgcctgagaagaagaagggcatcttcagaagagcctatgacctcttctgtggcctggagcagcacggggcccccaagatgacagaggaggaggagaaggccatgaagatgaagatgacagacaccagcgagaagcccctgtggaggacagtgctgaatgtgaatggcatcatcctggtgacagtggccgtgttctgccacgcctactttgcctag

SEQ ID NO: 170933 - DNA, 1614 bp, synthetic construct
  misc_feature 1..1614: note = Description of Artificial Sequence: Synthetic coding sequence
  source 1..1614: mol_type = other DNA
atgcctgagtacctgaggaagagatttggaggccagaggatccaggtgtacctgagcctgctgagcctgctgctgtacatcttcaccaagatctctgctgacatcttcagcggggccatcttcatcaacctggccctgggcctgaacctgtacctggccatcttcctgctgctggccatcacagccctgtacaccatcactggaggcctggccgccgtcatctacacagacaccctgcagaccgtcatcatgctggtgggcagcctcatcctgaccggctttgccttccacgaggtgggcggctatgatgccttcatggagaagtacatgaaggccatccccaccatcgtgtctgatggcaacaccaccttccaggagaagtgctacacccccagggctgacagcttccacatcttccgggaccccctgaccggggacctgccctggccaggcttcatcttcggcatgagcatcctgaccctgtggtactggtgcacagaccaggtgattgtgcagcgctgcctgagcgccaagaacatgagccacgtgaagggcggctgcatcctgtgtggctacctgaagctgatgcccatgttcatcatggtgatgcctggcatgatcagccgcatcctgtacacagagaagatcgcctgtgtggtgcccagtgaatgtgagaagtactgcggcaccaaggtgggctgcaccaacatcgcctaccccaccctggtggtggagctgatgcccaacggcctgcggggcctgatgctgtctgtgatgctggccagcctgatgagcagcctgaccagcatcttcaacagcgccagcaccctcttcaccatggacatctatgccaaggtgaggaagagggccagcgagaaggagctgatgattgctggccgcctcttcatcctggtgctgattggcatcagcatcgcctgggtgcccatcgtgcagagcgcccagagcggccagctgtttgactacatccagagcatcaccagctacctgggcccccccatcgctgctgtgttcctgctggccatcttctggaagagggtgaatgagcccggggccttctggggcctcatcctgggcctgctgattggcatcagcaggatgatcacagaatttgcctatggaacaggcagctgcatggagcccagcaactgccccaccatcatctgtggggtgcactacctgtactttgccatcatcctgtttgccatctccttcatcaccatcgtggtgatcagcctgctgaccaagcccatcccagatgtgcacctgtaccgcctgtgctggagcctgaggaacagcaaggaggagagaattgacctggatgctgaggaggagaacatccaggagggccccaaggagaccattgaaattgagacccaggtgcctgagaagaagaagggcatcttccggcgggcctatgacctcttctgtggcctggagcagcacggggcccccaagatgacagaggaggaggagaaggccatgaagatgaagatgacagacaccagcgagaagcccctgtggaggacagtgctgaatgtgaatggcatcatcctggtgacagtggccgtgttctgccacgcctactttgcctag

SEQ ID NO: 170934 - DNA, 1191 bp, synthetic construct
  misc_feature 1..1191: note = Description of Artificial Sequence: Synthetic coding sequence
  source 1..1191: mol_type = other DNA
atggaggtgaagaactttgctgtgtgggactatgtggtgtttgctgccctcttcttcatcagcagcggcatcggggtcttctttgccatcaaggagaggaagaaggccaccagccgggagttcctggtgggcggccggcagatgagctttggacctgtgggcctgagcctgacagccagcttcatgtctgctgtgacagtgctgggcacccccagcgaggtgtacagatttggagccagcttcctggtgttcttcatcgcctacctgtttgtgatcctgctgaccagcgagctgttcctgcctgtgttctaccgcagcggcatcaccagcacctatgagtacctgcagctgcgcttcaacaagcctgtgcgctatgctgccaccgtcatctacatcgtgcagaccatcctgtacacaggagtggtggtgtatgccccagccctggccctgaaccaggtgacaggctttgacctgtggggctctgtgtttgccactggaattgtgtgcaccttctactgcaccctgggcggcctgaaggctgtggtgtggacagatgccttccagatggtggtgatgattgtgggcttcctgactgtgctgatccagggcagcacccatgctgggggcttccacaacgtgctggagcagagcaccaacggcagccggctgcacatctttgattttgatgtggaccccctgcggcggcacaccttctggaccatcaccgtgggcggcaccttcacctggctgggcatctatggagtgaaccagagcaccatccagcgctgcatcagctgcaagacagagaagcacgccaagctggccctgtacttcaacctgctgggcctgtggatcatcctggtgtgtgctgtgttttctggcctcatcatgtacagccacttcaaggactgtgacccctggaccagcggcatcatcagcgccccagaccagctgatgccctactttgtgatggagatctttgccaccatgcctggcctgcccggcctgtttgtggcctgtgccttcagcggcaccctgagcacagtggccagcagcatcaatgccctggccaccgtgacctttgaggactttgtgaagagctgcttcccccacctgagtgacaagctgagcacctggatcagcaagggcctgtgccgctacagctggtggaccttctacagcatctcctag

SEQ ID NO: 170935 - DNA, 1857 bp, synthetic construct
  misc_feature 1..1857: note = Description of Artificial Sequence: Synthetic coding sequence
  source 1..1857: mol_type = other DNA
atggaggtgaagaactttgctgtgtgggactatgtggtgtttgctgccctcttcttcatcagcagcggcatcggggtcttctttgccatcaaggagaggaagaaggccaccagccgggagttcctggtgggcggccggcagatgagctttggacctgtgggcctgagcctgacagccagcttcatgtctgctgtgacagtgctgggcacccccagcgaggtgtacagatttggagccagcttcctggtgttcttcatcgcctacctgtttgtgatcctgctgaccagcgagctgttcctgcctgtgttctaccgcagcggcatcaccagcacctatgagtacctgcagctgcgcttcaacaagcctgtgcgctatgctgccaccgtcatctacatcgtgcagaccatcctgtacacaggagtggtggtgtatgccccagccctggccctgaaccaggtgacaggctttgacctgtggggctctgtgtttgccactggaattgtgtgcaccttctactgcaccctgggcggcctgaaggctgtggtgtggacagatgccttccagatggtggtgatgattgtgggcttcctgactgtgctgatccagggcagcacccatgctgggggcttccacaacgtgctggagcagagcaccaacggcagccggctgcacatctttgattttgatgtggaccccctgcggcggcacaccttctggaccatcaccgtgggcggcaccttcacctggctgggcatctatggagtgaaccagagcaccatccagcgctgcatcagctgcaagacagagaagcacgccaagctggccctgtacttcaacctgctgggcctgtggatcatcctggtgtgtgctgtgttttctggcctcatcatgtacagccacttcaaggactgtgacccctggaccagcggcatcatcagcgccccagaccagctgatgccctactttgtgatggagatctttgccaccatgcctggcctgcccggcctgtttgtggcctgtgccttcagcggcaccctgagcacagtggccagcagcatcaatgccctggccaccgtgacctttgaggactttgtgaagagctgcttcccccacctgagtgacaagctgagcacctggatcagcaagggcctgtgcctgctgtttggagtgatgtgcacctccatggctgtggccgcctctgtgatgggcggcgtggtgcaggccagcctgagcatccacggcatgtgtggcggccccatgctgggcctcttcagcctgggcatcgtgttcccctttgtgaactggaagggggccctgggcggcctgctgaccggcatcaccctgtccttctgggtggccatcggggccttcatctacccagccccagccagcaagacctggcccctgcccctgagcacagaccagtgcatcaagagcaatgtgacagccaccggcccccctgtgctgagcagcaggcctggcattgctgacacctggtacagcatctcctacctgtactacagcgctgtgggctgcctgggctgcatcgtggccggggtcatcatcagcctcatcaccggccggcagagaggagaggacatccagcccctgctgatccggcctgtgtgcaacctcttctgcttctggagcaagaagtacaagaccctgtgctggtgtggggtgcagcatgattctggaacagagcaggagaacctggagaatggcagcgccaggaagcagggcgctgagagcgtgctgcagaatggcctgcggcgggagagcctggtgcacgtgcccggctatgaccccaaggacaagagctacaacaacatggcctttgagaccacccacttctag

SEQ ID NO: 170936 - DNA, 834 bp, synthetic construct
  misc_feature 1..834: note = Description of Artificial Sequence: Synthetic coding sequence
  source 1..834: mol_type = other DNA
atggtggtgatgattgtgggcttcctgactgtgctgatccagggcagcacccatgctgggggcttccacaacgtgctggagcagagcaccaacggcagccggctgcacatctttgattttgatgtggaccccctgcggcggcacaccttctggaccatcaccgtgggcggcaccttcacctggctgggcatctatggagtgaaccagagcaccatccagcgctgcatcagctgcaagacagagaagcacgccaagctggccctgtacttcaacctgctgggcctgtggatcatcctggtgtgtgctgtgttttctggcctcatcatgtacagccacttcaaggactgtgacccctggaccagcggcatcatcagcgccccagaccagctgatgccctactttgtgatggagatctttgccaccatgcctggcctgcccggcctgtttgtggcctgtgccttcagcggcaccctgagcacagtggccagcagcatcaatgccctggccaccgtgacctttgaggactttgtgaagagctgcttcccccacctgagtgacaagctgagcacctggatcagcaagggcctgtgccgcagcctcatctggagagatgtgtacctgtatggctgcggctgcatctgccacggccgctgctgtgccggcttcccccagcacagccgccacgtgtggaggaccaatgccggcctcatcctgcccggcaacagagtgcccttctgtgagctggagggctgcaccaggaggagcagctactggaaccacctggtgatcctgggcggccactggggcctgcacctgccctgcaccagcctgtag

SEQ ID NO: 170937 - DNA, 2019 bp, synthetic construct
  misc_feature 1..2019: note = Description of Artificial Sequence: Synthetic coding sequence
  source 1..2019: mol_type = other DNA
atggaggagcacacagaagctggcagcgcccctgagatgggcgcccagaaggccctgattgacaacccagctgacatcctggtgattgctgcctacttcctgctggtgattggagtgggcctgtggagcatgtgcaggaccaacagaggaacagtgggcggctacttcctggccggccgctccatggtgtggtggcctgtgggcgccagcctgtttgccagcaacatcggcagcggccactttgtgggcctggccggcactggagctgccagcggcctggccgtggccggctttgagtggaatgccctgtttgtggtgctgctgctgggctggctgtttgcccctgtgtacctgacagctggggtcatcaccatgccccagtacctgaggaagagatttggaggccgccgcatccggctgtacctgtctgtgctgagcctcttcctgtacatcttcaccaagatctctgtggacatgttttctggagctgtgttcatccagcaggccctgggctggaacatctatgcctctgtgattgccctgctgggcatcaccatgatctacacagtgactggaggcctggccgccctgatgtacacagacacagtgcagaccttcgtcatcctgggcggggcctgcatcctgatgggctacgccttccacgaggtgggcggctacagcggcctgtttgacaagtacctgggcgccgccaccagcctgactgtgtctgaggaccctgctgtgggcaacatcagcagcttctgctaccggcccaggccagacagctaccacctgctgcggcaccctgtgactggagacctgccctggccagccctgctgctgggcctgaccatcgtgtctggctggtactggtgcagcgaccaggtgattgtgcagcgctgcctggccggcaagagcctgacccacatcaaggccggctgcatcctgtgtggctacctgaagctgacccccatgttcctgatggtgatgcctggcatgatcagccgcatcctgtacccagatgaggtggcctgtgtggtgcctgaggtgtgccggcgggtgtgtggcacagaggtgggctgcagcaacatcgcctacccccggctggtggtgaagctgatgcccaacggcctgcggggcctgatgctggccgtgatgctggccgccctgatgagcagcctggccagcatcttcaacagcagcagcaccctcttcaccatggacatctacacccggctgcggcccagggctggggaccgggagctgctgctggtgggccgcctgtgggtggtgttcatcgtggtggtgtctgtggcctggctgcctgtggtgcaggccgcccagggcggccagctgtttgactacatccaggccgtgtcctcctacctggcccctcctgtgtctgctgtgtttgtgctggccctgtttgtgccccgggtgaatgagcagggcgccttctggggcctcatcggcggcctgctgatgggcctggcccggctcatccctgagttctcctttggcagcggcagctgtgtgcagcccagcgcctgcccagccttcctgtgtggggtgcactacctgtactttgccatcgtgctcttcttctgcagcggcctgctgaccctgactgtgtccctgtgcacagcccccatccccaggaagcacctgcaccggctggtgttcagcctgcggcacagcaaggaggagcgggaggacctggatgctgatgagcagcagggcagcagcctgcctgtgcagaatggctgcccagagagcgccatggagatgaatgagccccaggccccagcccccagcctcttccggcagtgcctgctgtggttctgtggcatgagccggggcggcgtgggcagccccccacccctgacccaggaggaggccgctgctgctgcccggcggctggaggacatcagcgaggaccccagctgggcccgggtggtgaacctgaatgccctgctgatgatggctgtggccgtgttcctgtggggcttctacgcctag

SEQ ID NO: 170938 - DNA, 1377 bp, synthetic construct
  misc_feature 1..1377: note = Description of Artificial Sequence: Synthetic coding sequence
  source 1..1377: mol_type = other DNA
atggaggagcacacagaagctggcagcgcccctgagatgggcgcccagaaggccctgattgacaacccagctgacatcctggtgattgctgcctacttcctgctggtgattggagtgggcctgtggagcatgtgcaggaccaacagaggaacagtgggcggctacttcctggccggccgctccatggtgtggtggcctgtgggcgccagcctgtttgccagcaacatcggcagcggccactttgtgggcctggccggcactggagctgccagcggcctggccgtggccggctttgagtggaatgccctgtttgtggtgctgctgctgggctggctgtttgcccctgtgtacctgacagctggggtcatcaccatgccccagtacctgaggaagagatttggaggccgccgcatccggctgtacctgtctgtgctgagcctcttcctgtacatcttcaccaagatctctgtggacatgttttctggagctgtgttcatccagcaggccctgggctggaacatctatgcctctgtgattgccctgctgggcatcaccatgatctacacagtgactggaggcctggccgccctgatgtacacagacacagtgcagaccttcgtcatcctgggcggggcctgcatcctgatgggctacgccttccacgaggtgggcggctacagcggcctgtttgacaagtacctgggcgccgccaccagcctgactgtgtctgaggaccctgctgtgggcaacatcagcagcttctgctaccggcccaggccagacagctaccacctgctgcggcaccctgtgactggagacctgccctggccagccctgctgctgggcctgaccatcgtgtctggctggtactggtgcagcgaccaggtgattgtgcagcgctgcctggccggcaagagcctgacccacatcaaggccggctgcatcctgtgtggctacctgaagctgacccccatgttcctgatggtgatgcctggcatgatcagccgcatcctgtacccagatgaggtggcctgtgtggtgcctgaggtgtgccggcgggtgtgtggcacagaggtgggctgcagcaacatcgcctacccccggctggtggtgaagctgatgcccaacggccgcctgctgggcacccaccggggccctgcagatggccctggcaccccagacagccgggtgctgctgcggctgggccagctgtgtgccgccctgggcgtgcccagcttccccctgcggcgggccctgcccctgctgcggcactgtgctgtgctgctgctgtggccaccccacccccacggcctgcctgtgcaccgggcccacccccagaaggcccctcctcctcctggcctgcagagccctgcctag

SEQ ID NO: 170939 - DNA, 2157 bp, synthetic construct
  misc_feature 1..2157: note = Description of Artificial Sequence: Synthetic coding sequence
  source 1..2157: mol_type = other DNA
atgagagctgtgctggacacagctgacatcgccatcgtggccctgtacttcatcctggtgatgtgcatcggcttctttgccatgtggaagagcaacagaagcacagtgtctggctacttcctggccggccgctccatgacctgggtgaccatcggggccagcctgtttgtgagcaacatcggcagcgagcacttcatcggcctggccggcagcggggccgccagcggctttgctgtgggcgcctgggagttcaatgccctgctgctgctgcagctgctgggctgggtgttcatccccatctacatccgcagcggcgtgtacaccatgcctgagtacctgagcaagagatttggaggccaccgcatccaggtgtactttgctgccctgagcctcatcctgtacatcttcaccaagctgtctgtggacctgtacagcggggccctcttcatccaggagagcctgggctggaacctgtatgtgtctgtcatcctgctgattggcatgacagccctgctgactgtgactggaggcctggtggccgtcatctacacagacaccctgcaggccctgctgatgatcatcggggccctgaccctgatgatcatcagcatcatggagattggaggctttgaggaggtgaagaggcgctacatgctggccagcccagatgtgaccagcatcctgctgacctacaacctgagcaacaccaacagctgcaatgtgagccccaagaaggaggccctgaagatgctgaggaaccccacagatgaagatgtgccctggccaggcttcatcctgggccagaccccagcctctgtgtggtactggtgtgccgaccaggtgattgtgcagagggtgctggccgccaagaacatcgcccacgccaagggcagcaccctgatggccggcttcctgaagctgctgcccatgttcatcatcgtggtgcccggcatgatcagccgcatcctcttcacagatgacatcgcctgcatcaaccctgagcactgcatgctggtgtgtggcagccgggccggctgcagcaacatcgcctacccccggctggtgatgaagctggtgcctgtgggcctgcggggcctgatgatggctgtgatgattgctgccctgatgtctgacctggacagcatcttcaacagcgccagcaccatcttcaccctggatgtgtacaagctgatcaggaagagcgccagcagccgggagctgatgattgtgggccgcatctttgtggccttcatggtggtgatcagcatcgcctgggtgcccatcatcgtggagatgcagggcggccagatgtacctgtacatccaggaggtggccgactacctgaccccacctgtggccgccctcttcctgctggccatcttctggaagcgctgcaatgagcagggcgccttctacggcggcatggccggctttgtgctgggcgctgtgcggctcatcctggcctttgcctaccgggccccagaatgtgaccagcctgacaacagacctggcttcatcaaggacatccactacatgtatgtggccaccggcctcttctgggtgacaggcctcatcaccgtcatcgtgtccctgctgaccccaccacccaccaaggagcagatccgcaccaccaccttctggagcaagaagaacctggtggtgaaggagaactgcagccccaaggaggagccctaccagatgcaggagaagagcatcctgcgctgcagtgaaaataatgagaccatcaaccacatcatccccaacgggaagtctgaggacagcatcaagggcctgcagccagaagatgtgaacctgctggtgacctgccgggaggagggcaaccctgtggccagcctgggccacagcgaggccgagacccctgtggatgcctacagcaatggccaggccgccctgatgggagagaaggagaggaagaaggagacagatgatggcggccgctactggaagttcatcgactggttctgtggcttcaagagcaagagcctgagcaagaggagcctgcgggacctgatggaggaggaggccgtgtgcctgcagatgctggaggagacccggcaggtgaaggtgatcctgaacatcggcctgtttgctgtgtgcagcctgggcatcttcatgtttgtgtacttcagcctgtag

SEQ ID NO: 170940 - DNA, 504 bp, synthetic construct
  misc_feature 1..504: note = Description of Artificial Sequence: Synthetic coding sequence
  source 1..504: mol_type = other DNA
atggaggccggcggcttcctggacagcctcatctacggggcctgtgtggtgttcaccctgggcatgttttctgctggcctgagtgacctgcggcacatgaggatgaccaggtctgtggacaacgtgcagttcctgcccttcctgaccacagaggtgaacaacctgggctggctgtcctatggagccctgaagggagatggcatcctgattgtggtgaacacagtgggcgccgccctgcagaccctgtacatcctggcctacctgcactactgccccaggaaggccaaggtgatccagaccaagagcacccagtgcctgagctaccccctgaccatcgccaccctgctgaccagcgcctcctggtgcctgtatggcttccggctgcgggacccctacatcatggtgagcaacttccctggcatcgtgaccagcttcatccgcttctggctgttctggaagtacccccaggagcaggacaggaactactggctgctgcagacctag

SEQ ID NO: 170941 - DNA, 501 bp, synthetic construct
  misc_feature 1..501: note = Description of Artificial Sequence: Synthetic coding sequence
  source 1..501: mol_type = other DNA
atgaggggcctgcacccctggcacgtgctgcggcggcccctgggcccccaggcccacgccaatgaccctgaatgtggccagaggcctgtgcctgccctgagccaccacggcagccagagggtggtgctgctgcagacagccaccctgctgggcgtgctgctgctgggctacggctacttctggctgctggtgcccaaccctgaggcccggctgcagcagctgggcctcttctgcagcgtcttcaccatctccatgtacctgagccccctggccgacctggccaaggtgatccagaccaagagcacccagtgcctgagctaccccctgaccatcgccaccctgctgaccagcgcctcctggtgcctgtatggcttccggctgcgggacccctacatcatggtgagcaacttccctggcatcgtgaccagcttcatccgcttctggctgttctggaagtacccccaggagcaggacaggaactactggctgctgcagacctag

SEQ ID NO: 170942 - DNA, 666 bp, synthetic construct
  misc_feature 1..666: note = Description of Artificial Sequence: Synthetic coding sequence
  source 1..666: mol_type = other DNA
atggaggccggcggcttcctggacagcctcatctacggggcctgtgtggtgttcaccctgggcatgttttctgctggcctgagtgacctgcggcacatgaggatgaccaggtctgtggacaacgtgcagttcctgcccttcctgaccacagaggtgaacaacctgggctggctgtcctatggagccctgaagggagatggcatcctgattgtggtgaacacagtgggcgccgccctgcagaccctgtacatcctggcctacctgcactactgccccaggaagagggtggtgctgctgcagacagccaccctgctgggcgtgctgctgctgggctacggctacttctggctgctggtgcccaaccctgaggcccggctgcagcagctgggcctcttctgcagcgtcttcaccatctccatgtacctgagccccctggccgacctggccaaggtgatccagaccaagagcacccagtgcctgagctaccccctgaccatcgccaccctgctgaccagcgcctcctggtgcctgtatggcttccggctgcgggacccctacatcatggtgagcaacttccctggcatcgtgaccagcttcatccgcttctggctgttctggaagtacccccaggagcaggacaggaactactggctgctgcagacctag

SEQ ID NO: 170943 - DNA, 471 bp, synthetic construct
  misc_feature 1..471: note = Description of Artificial Sequence: Synthetic coding sequence
  source 1..471: mol_type = other DNA
atggaggagctgggcccccaggcccacgccaatgaccctgaatgtggccagaggcctgtgcctgccctgagccaccacggcagccagagggtggtgctgctgcagacagccaccctgctgggcgtgctgctgctgggctacggctacttctggctgctggtgcccaaccctgaggcccggctgcagcagctgggcctcttctgcagcgtcttcaccatctccatgtacctgagccccctggccgacctggccaaggtgatccagaccaagagcacccagtgcctgagctaccccctgaccatcgccaccctgctgaccagcgcctcctggtgcctgtatggcttccggctgcgggacccctacatcatggtgagcaacttccctggcatcgtgaccagcttcatccgcttctggctgttctggaagtacccccaggagcaggacaggaactactggctgctgcagacctag

SEQ ID NO: 170944 - DNA, 1929 bp, synthetic construct
  misc_feature 1..1929: note = Description of Artificial Sequence: Synthetic coding sequence
  source 1..1929: mol_type = other DNA
atggacaagctgaagtgccccagcttcttcaagtgccgggagaaggagaaggtgtctgccagcagcgagaacttccacgtgggagaaaatgatgagaaccaggaccggggcaactggagcaagaagagtgactacctgctgtccatgattggctatgctgtgggcctgggcaatgtgtggaggttcccctacctgacctacagcaatggaggaggagccttcctgatcccctatgccatcatgctggccctggccggcctgcccctcttcttcctggagtgcagcctgggccagtttgccagcctgggccctgtgtctgtgtggaggatcctgcccctcttccagggcgtgggcatcaccatggtgctgatcagcatctttgtgaccatctactacaacgtcatcatcgcctacagcctgtactacatgtttgccagcttccagagcgagctgccctggaagaactgcagctcctggagcgacaagaactgcagccgcagccccatcgtgacccactgcaatgtgtccacagtgaacaagggcatccaggagatcatccagatgaacaagtcctgggtggacatcaacaacttcacctgcatcaatggcagcgagatctaccagcccggccagctgcccagcgagcagtactggaacaaggtggccctgcagaggagcagcggcatgaatgagaccggggtgattgtgtggtacctggccctgtgcctgctgctggcctggctgattgtgggcgccgccctcttcaagggcatcaagagcagcggcaaggtggtgtacttcaccgccctcttcccctacgtggtgctgctgatcctgctggtgcggggggccaccctggagggcgccagcaagggcatctcctactacatcggggcccagagcaacttcaccaagctgaaggaggccgaggtgtggaaggatgctgccacccagatcttctacagcctgtctgtggcctggggcggcctggtggccctgagcagctacaacaagttcaagaacaactgcttcagtgatgccatcgtggtgtgcctgaccaactgcctgacctctgtgtttgctggctttgccatcttcagcatcctgggccacatggcccacatcagcggcaaggaggtgtcccaggtggtgaagagcggctttgacctggccttcatcgcctacccagaggccctggcccagctgcccggcggccccttctggagcatcctcttcttcttcatgctgctgaccctgggcctggacagccagtttgccagcattgagaccatcaccaccaccatccaggacctcttccccaaggtgatgaagaagatgagggtgcccatcaccctgggctgctgcctggtgctcttcctgctgggcctggtgtgtgtgacccaggccggcatctactgggtgcacctgattgaccacttctgtgccggctggggcatcctgattgctgccatcctggagctggtgggcatcatctggatctatggaggcaaccgcttcatcgaggacacagagatgatgattggagccaagcgctggatcttctggctgtggtggagggcctgctggtttgtgatcacccccatcctgctgattgccatcttcatctggagcctggtgcagttccaccggcccaactatggagccatcccctacccagactggggcgtggccctgggctggtgcatgattgtgttctgcatcatctggatccccatcatggccatcatcaagatcatccaggccaagggcaacatcttccagaggctcatcagctgctgcaggcctgccagcaactggggcccctacctggagcagcacagaggagagcgctacaaggacatggtggaccccaagaaggaggccgaccacgagatccccaccgtgtctggcagcaggaagccagagtag

SEQ ID NO: 170945 - DNA, 1539 bp, synthetic construct
  misc_feature 1..1539: note = Description of Artificial Sequence: Synthetic coding sequence
  source 1..1539: mol_type = other DNA
atgggcgtgcagtggtggagccacacccagggcgaggtggccgtgggcctgggcctgggggacagctacctgaccccctgcccctgccctggggtgggctatgctgtgatcctgattgccctgtatgtgggcttctactacaacgtcatcatcgcctggagcctgtactacctgttcagcagcttcaccctgaacctgccctggacagactgtggccacacctggaacagccccaactgcacagaccccaagctgctgaatggatctgtgctgggcaaccacaccaagtacagcaagtacaagttcaccccagctgctgagttctatgagcggggcgtgctgcacctgcacgagagcagcggcatccatgacatcggcctgccccagtggcagctgctgctgtgcctgatggtggtggtgattgtgctgtacttcagcctgtggaagggcgtgaagaccagcggcaaggtggtgtggatcacagccaccctgccctactttgtgctgtttgtgctgctggtgcatggagtgaccctgcccggggccagcaatggcatcaatgcctacctgcacatcgacttctaccgcctgaaggaggccaccgtgtggattgatgctgccacccagatcttcttcagcctgggcgccggcttcggcgtgctgattgcctttgccagctacaacaagtttgacaacaactgctacagagatgccctgctgaccagcagcatcaactgcatcaccagctttgtgtctggctttgccatcttcagcatcctgggctacatggcccacgagcacaaggtgaacattgaagatgtggccacagagggcgccggcctggtgttcatcctgtacccagaggccatcagcaccctgagcggcagcaccttctgggccgtggtgttctttgtgatgctgctggccctgggcctggacagctccatgggcggcatggaggccgtcatcaccggcctggctgatgacttccaggtgctgaagaggcacaggaagctgttcaccttcggcgtgaccttcagcaccttcctgctggccctcttctgcatcaccaagggcggcatctacgtgctgaccctgctggacacctttgctgctggcaccagcatcctgtttgctgtgctgatggaggccatcggcgtgtcctggttctatggagtggaccgcttcagcaatgacatccagcagatgatgggcttccggcccggcctgtactggaggctgtgctggaagtttgtgtccccagccttcctgctgtttgtggtggtggtgtccatcatcaacttcaagcccctgacctatgatgactacatcttccccccctgggccaactgggtgggctggggcatcgccctgagctccatggtgctggtgcccatctacgtgatctacaagttcctgagcacccagggcagcctgtgggagcggctggcctacggcatcaccccagaaaatgagcaccacctggtggcccagagggacatccggcagttccagctgcagcactggctggccatctag

SEQ ID NO: 170946 - DNA, 1845 bp, synthetic construct
  misc_feature 1..1845: note = Description of Artificial Sequence: Synthetic coding sequence
  source 1..1845: mol_type = other DNA
atggatggcaaggtggccgtgcaggagtgtggccccccagctgtgtcctgggtgcctgaggagggggagaagctggaccaggaggatgaggaccaggtgaaggaccggggccagtggaccaacaagatggagtttgtgctgtctgtggccggggagatcatcggcctgggcaatgtgtggaggttcccctacctgtgctacaagaatggaggaggagccttcttcatcccctacttcatcttcttctttgtgtgtggcatccctgtgttcttcctggaggtggccctgggccagtacaccagccagggctctgtgacagcctggaggaagatctgccccctcttccagggcatcggcctggcctctgtggtgattgagagctacctgaatgtgtactacatcatcatcctggcctgggccctcttctacctgttcagcagcttcaccagcgagctgccctggaccacctgcaacaacttctggaacacagagcactgcacagacttcctgaaccacagcggggccggcaccgtgaccccatttgagaacttcaccagccctgtgatggagttctgggagcggcgggtgctgggcatcaccagcggcatccatgacctgggcagcctgcgctgggagctggccctgtgcctgctgctggcctgggtgatctgctacttctgcatctggaagggcgtgaagagcacaggcaaggtggtgtacttcaccgccaccttcccctacctgatgctggtgatcctgctgatccggggcgtgaccctgcccggggcctaccagggcatcatctactacctgaagccagacctcttccggctgaaggacccccaggtgtggatggatgctggcacccagatcttcttctcctttgccatctgccagggctgcctgacagccctgggcagctacaacaagtaccacaacaactgctacaaggactgcatcgccctgtgcttcctgaacagcgccaccagctttgtggccggctttgtggtgttcagcatcctgggcttcatgagccaggagcagggcgtgcccatcagcgaggtggccgagagcggccctggcctggccttcatcgccttccccaaggctgtgaccatgatgcccctgagccagctgtggagctgcctcttcttcatcatgctgatcttcctgggcctggacagccagtttgtgtgtgtggagtgcctggtgacagccagcattgacatgttcccccggcagctgaggaagagcggccggcgggagctgctgatcctgaccatcgctgtgatgtgctacctgattggcctcttcctggtgacagaaggaggcatgtacatcttccagctgtttgactactatgccagcagcggcatctgcctgctcttcctgagcctgtttgaggtggtgtgcatctcctgggtgtatggagctgaccgcttctatgacaacatcgaggacatgattggctaccggccctggcccctggtgaagatctcctggctgttcctgaccccaggcctgtgcctggccaccttcctgttcagcctgagcaagtacacccccctgaagtacaacaacgtgtatgtgtacccaccctggggctacagcatcggctggttcctggccctgagctccatggtgtgtgtgcccctgtttgtggtgatcaccctgctgaagacccggggccccttcaggaagaggctgcggcagctgatcaccccagacagcagcctgccccagcccaagcagcacccctgcctggatggcagcgctggcaggaactttggccccagccccacccgggagggcctgattgctggggagaaggagacccacctgtag

SEQ ID NO: 170947 - DNA, 1845 bp, synthetic construct; identical to SEQ ID NO: 170946
  misc_feature 1..1845: note = Description of Artificial Sequence: Synthetic coding sequence
  source 1..1845: mol_type = other DNA

SEQ ID NO: 170948 - DNA, 1845 bp, synthetic construct; identical to SEQ ID NO: 170946
  misc_feature 1..1845: note = Description of Artificial Sequence: Synthetic coding sequence
  source 1..1845: mol_type = other DNA

SEQ ID NO: 170949 - DNA, 1845 bp, synthetic construct; identical to SEQ ID NO: 170946
  misc_feature 1..1845: note = Description of Artificial Sequence: Synthetic coding sequence
  source 1..1845: mol_type = other DNA

SEQ ID NO: 170950 - DNA, 1845 bp, synthetic construct; identical to SEQ ID NO: 170946
  misc_feature 1..1845: note = Description of Artificial Sequence: Synthetic coding sequence
  source 1..1845: mol_type = other DNA

SEQ ID NO: 170951 - DNA, 441 bp, synthetic construct
  misc_feature 1..441: note = Description of Artificial Sequence: Synthetic coding sequence
  source 1..441: mol_type = other DNA
atggatggcaaggtggccgtgcaggagtgtggccccccagctgtgtcctgggtgcctgaggagggggagaagctggaccaggaggatgaggaccaggtgaaggaccggggccagtggaccaacaagatggagtttgtgctgtctgtggccggggagatcatcggcctgggcaatgtgtggaggttcccctacctgtgctacaagaatggaggaggagccttcttcatcccctacttcatcttcttctttgtgtgtggcatccctgtgttcttcctggaggtggccctgggccagtacaccagccagggctctgtgacagcctggaggaagatctgccccctcttccagggcatcggcctggcctctgtggtgattgagagctacctgaatgtgtactacatcatcatcctggcctgggccctcttctacctgttctcctag

SEQ ID NO: 170952 - DNA, 1908 bp, synthetic construct
  misc_feature 1..1908: note = Description of Artificial Sequence: Synthetic coding sequence
  source 1..1908: mol_type = other DNA
atggccaagaagtctgcagaaaatggcatctacagcgtgtctggagatgagaagaagggccccctgattgcccctggcccagatggagccccagccaagggagatggccctgtgggcctgggcaccccaggcggccgcctggccgtgcccccccgggagacctggacccggcagatggacttcatcatgagctgtgtgggctttgctgtgggcctgggcaatgtgtggaggttcccctacctgtgctacaagaatggaggcggcgtcttcctgatcccctacgtgctgattgccctggtgggcggcatccccatcttcttcctggagatcagcctgggccagttcatgaaggccggcagcatcaacgtgtggaacatctgccccctcttcaagggcctgggctacgcctccatggtgattgtgttctactgcaacacctactacatcatggtgctggcctggggcttctactacctggtgaagagcttcaccaccaccctgccctgggccacctgtggccacacctggaacaccccagactgtgtggagatcttcagacatgaggactgtgccaatgccagcctggccaacctgacctgtgaccagctggccgaccggcgcagccctgtgattgagttctgggagaacaaggtgctgcggctgagcggcggcctggaggtgcctggggccctgaactgggaggtgaccctgtgcctgctggcctgctgggtgctggtgtacttctgtgtgtggaagggcgtgaagagcacaggcaagatcgtgtacttcaccgccaccttcccctacgtggtgctggtggtgctgctggtgcggggcgtgctgctgcccggggccctggatggcatcatctactacctgaagccagactggagcaagctgggcagcccccaggtgtggattgatgctggcacccagatcttcttctcctatgccatcggcctgggcgccctgacagccctgggcagctacaaccgcttcaacaacaactgctacaaggatgccatcatcctggccctgatcaacagcggcaccagcttctttgctggctttgtggtgttcagcatcctgggcttcatggctgctgagcagggcgtgcacatcagcaaggtggccgagagcggccctggcctggccttcatcgcctaccccagggctgtgaccctgatgcctgtggcccccctgtgggccgccctcttcttcttcatgctgctgctgctgggcctggacagccagtttgtgggcgtggagggcttcatcaccggcctgctggacctgctgcctgccagctactacttccgcttccagcgggagatctctgtggccctgtgctgtgccctgtgctttgtgattgacctgtccatggtgacagatggcggcatgtatgtgttccagctgtttgactactacagcgccagcggcaccaccctgctgtggcaggccttctgggagtgtgtggtggtggcctgggtgtatggagctgaccgcttcatggatgacatcgcctgcatgattggctaccggccctgcccctggatgaagtggtgctggagcttcttcacccccctggtgtgcatgggcatcttcatcttcaacgtggtgtactatgagcccctggtgtacaacaacacctacgtgtacccctggtggggcgaggccatgggctgggcctttgccctgagctccatgctgtgtgtgcccctgcacctgctgggctgcctgctgcgggccaagggcaccatggccgagcgctggcagcacctgacccagcccatctggggcctgcaccacctggagtaccgggcccaggatgctgatgtgcggggcctgaccaccctgacccctgtgtctgagagcagcaaggtggtggtggtggagagcgtgatgtag

SEQ ID NO: 170953 - DNA, 2190 bp, synthetic construct
  misc_feature 1..2190: note = Description of Artificial Sequence: Synthetic coding sequence
  source 1..2190: mol_type = other DNA
atgctgcccaccctgcagatccagggccctgctgcctttgcccctggggaccggggccctggccgccactgccccttccctgtgcccatcacccccactggagccctgctgcctgtgtctgacagctgtgacagcctggtggacctggtgtggcccagcgtgacctacctggccctgggcacccagagccgggtgtggccccaccccctgggcgcccctggccaggccggggagagccctgagcagaggcggcagtgcctggagctgtgggacatggccagcagcctgggggacaaggtgcccagggctgcctgtgggaagaggggccagacagtgtggcagctgcacctggcctgcctgtgcctggcccagttccacagccccccagcccagcccccacccctgagcagaagaggaggcggccctgaccctgaccccatcagccgcagcctgcccggcccccccaccccagccctgcccacccacagctacagcagccacagcccccgggccccccggctgctgagccccctgcggcgggccccccggggcagccctgccccccacagacatgccagcctgcagaccaatgaggccccccgggagctgccccactgcacctggccaggcctgcccggccgcagcctggcccccagcttcctgtggagggagccctggctgggcggccagtggggccccctgaacatcccagccaggaagggggacagaagacgctgggagtggggctgtgagggcggcggggccacagccagcgctgagcagcccggcccccagatcgtgtacttcaccgccaccttcccctacgtggtgctggtggtgctgctggtgcggggcgtgctgctgcccggggccctggatggcatcatctactacctgaagccagactggagcaagctgggcagcccccaggtgtggattgatgctggcacccagatcttcttctcctatgccatcggcctgggcgccctgacagccctgggcagctacaaccgcttcaacaacaactgctacaaggatgccatcatcctggccctgatcaacagcggcaccagcttctttgctggctttgtggtgttcagcatcctgggcttcatggctgctgagcagggcgtgcacatcagcaaggtggccgagagcggccctggcctggccttcatcgcctaccccagggctgtgaccctgatgcctgtggcccccctgtgggccgccctcttcttcttcatgctgctgctgctgggcctggacagccaggtgtgcatgggcctgtgggaccgggagcccggcggcggccggcgggagggctgccggcagggcaagggctggaggcgctgtggggcccggcctgagctgccctggccccagtttgtgggcgtggagggcttcatcaccggcctgctggacctgctgcctgccagctactacttccgcttccagcgggagatctctgtggccctgtgctgtgccctgtgcttcgtcatcgacctgtccatggtgacagatgtgtctggagtgggcggcctgcctgtgaccagcggcggccgcctgcccagcagcctgaccggcctgtgcccccagggcggcatgtatgtgttccagctgtttgactactacagcgccagcggcaccaccctgctgtggcaggccttctgggagtgtgtggtggtggcctgggtgtatggccgctcctggctgcgggccggcctgggagatggcggcggggagggccgcagccctgcctggccagccagccccagaggagctgaccgcttcatggatgacatcgcctgcatgattggctaccggccctgcccctggatgaagtggtgctggagcttcttcacccccctggtgtgcatgggcatcttcatcttcaacgtggtgtactatgagcccctggtgtacaacaacacctacgtgtacccctggtggggcgaggccatgggctgggcctttgccctgagctccatgctgtgtgtgcccctgcacctgctgggctgcctgctgcgggccaagggcaccatggccgagcgctggcagcacctgacccagcccatctggggcctgcaccacctggagtaccgggcccaggatgctgatgtgcggggcctgaccaccctgacccctgtgtctgagagcagcaaggtggtggtggtggagagcgtgatgtag

SEQ ID NO: 170954 - DNA, 471 bp, synthetic construct
  misc_feature 1..471: note = Description of Artificial Sequence: Synthetic coding sequence
  source 1..471: mol_type = other DNA
ctgctgcacagccccacctggagctggagctgctgctggtgtgtggagtgctgctgcctggccccctggatggccagcttcaccatcagcagcctgaccggccagagctggggccccctgagccctggccagctgcagcccctgcagcagcagctgctgcagtgggaccagctgctgtgctggctgcggggcctgctgcaccctggcctgcacggctgcagagctggccgggcccacctgcagggcggccgggtgcgggagatctctgtggccctgtgctgtgccctgtgcttcgtcatcgacctgtccatggtgacagatggcggcatgtatgtgttccagctgtttgactactacagcgccagcggcaccaccctgctgtggcaggccttctgggagtgtgtggtggtggcctgggtgtatggagctgaccgcttcatggatgacatcgcctgcatgattggctactag

SEQ ID NO: 170955 - DNA, 339 bp, synthetic construct
  misc_feature 1..339: note = Description of Artificial Sequence: Synthetic coding sequence
  source 1..339: mol_type = other DNA
tgattcagacatgaggactgtgccaatgccagcctggccaacctgacctgtgaccagctggccgacagaagaagccctgtgattgagttctgggagaacaaggtgctgcggctgagcggcggcctggaggtgcctggggccctgaactgggaggtgaccctgtgcctgctggcctgctgggtgctggtgtacttctgtgtgtggaagggcgtgaagagcacaggcaaggtgcccctggaggcctgcagcggggagggcggcagcgccctgggcgccggctgcctgtgccaggcccacctgtggcagcgggaggtgacccggcagagcctggccctgtag

SEQ ID NO: 170956 - DNA, 1563 bp, synthetic construct
  misc_feature 1..1563: note = Description of Artificial Sequence: Synthetic coding sequence
  source 1..1563: mol_type = other DNA
atgaaggccggcagcatcaacgtgtggaacatctgccccctcttcaagggcctgggctacgcctccatggtgattgtgttctactgcaacacctactacatcatggtgctggcctggggcttctactacctggtgaagagcttcaccaccaccctgccctgggccacctgtggccacacctggaacaccccagactgtgtggagatcttcagacatgaggactgtgccaatgccagcctggccaacctgacctgtgaccagctggccgacagaagaagccctgtgattgagttctgggagaacaaggtgctgcggctgagcggcggcctggaggtgcctggggccctgaactgggaggtgaccctgtgcctgctggcctgctgggtgctggtgtacttctgtgtgtggaagggcgtgaagagcacaggcaagatcgtgtacttcaccgccaccttcccctacgtggtgctggtggtgctgctggtgcggggcgtgctgctgcccggggccctggatggcatcatctactacctgaagccagactggagcaagctgggcagcccccaggtgtggattgatgctggcacccagatcttcttctcctatgccatcggcctgggcgccctgacagccctgggcagctacaaccgcttcaacaacaactgctacaaggatgccatcatcctggccctgatcaacagcggcaccagcttctttgctggctttgtggtgttcagcatcctgggcttcatggctgctgagcagggcgtgcacatcagcaaggtggccgagagcggccctggcctggccttcatcgcctaccccagggctgtgaccctgatgcctgtggcccccctgtgggccgccctcttcttcttcatgctgctgctgctgggcctggacagccagtttgtgggcgtggagggcttcatcaccggcctgctggacctgctgcctgccagctactacttccgcttccagcgggagatctctgtggccctgtgctgtgccctgtgcttcgtcatcgacctgtccatggtgacagatggcggcatgtatgtgttccagctgtttgactactacagcgccagcggcaccaccctgctgtggcaggccttctgggagtgtgtggtggtggcctgggtgtatggagctgaccgcttcatggatgacatcgcctgcatgattggctaccggccctgcccctggatgaagtggtgctggagcttcttcacccccctggtgtgcatgggcatcttcatcttcaacgtggtgtactatgagcccctggtgtacaacaacacctacgtgtacccctggtggggcgaggccatgggctgggcctttgccctgagctccatgctgtgtgtgcccctgcacctgctgggctgcctgctgcgggccaagggcaccatggccgagcgctggcagcacctgacccagcccatctggggcctgcaccacctggagtaccgggcccaggatgctgatgtgcggggcctgaccaccctgacccctgtgtctgagagcagcaaggtggtggtggtggagagcgtgatgtag

SEQ ID NO: 170957 - DNA, 525 bp, synthetic construct
  misc_feature 1..525: note = Description of Artificial Sequence: Synthetic coding sequence
  source 1..525: mol_type = other DNA
tgaattgatgctggcacccagatcttcttctcctatgccatcggcctgggcgccctgacagccctgggcagctacaaccgcttcaacaacaactgctacaacggcaccagcttctttgctggctttgtggtgttcagcatcctgggcttcatggctgctgagcagggcgtgcacatcagcaaggtggccgagagcggccctggcctggccttcatcgcctaccccagggctgtgaccctgatgcctgtggcccccctgtgggccgccctcttcttcttcatgctgctgctgctgggcctggacagccagtttgtgggcgtggagggcttcatcaccggcctgctggacctgctgcctgccagctactacttccgcttccagcgggagatctctgtggccctgtgctgtgccctgtgcttcgtcatcgacctgtccatggtgacagatggcggcatgtatgtgttccagctgtttgactactacagcgccagcggcaccaccctgctgtggcaggccttctggtag

SEQ ID NO: 170958 - DNA, 270 bp, synthetic construct
  misc_feature 1..270: note = Description of Artificial Sequence: Synthetic coding sequence
  source 1..270: mol_type = other DNA
ggccgccaccaccctggcagccaccagcagtgggaccagctgctgtgctggctgcggggcctgctgcaccctggcctgcacggctgcagagctggccgggcccacctgcagggcggccgggtgcgggccggccctggcctgcaccggctgcctgctggctgccacgcagatgccagcggccccaccctgggctgccctgtgctgctgcatgctgtggccgcctggagccggcagcccggggtggagggcttcatcaccggcctgctgtag

SEQ ID NO: 170959 - DNA, 1863 bp, synthetic construct
  misc_feature 1..1863: note = Description of Artificial Sequence: Synthetic coding sequence
  source 1..1863: mol_type = other DNA
atgagcaagagcaaatgttctgtgggcctgatgagctctgtggtggccccagccaaggagcccaatgctgtgggccccaaggaggtggagctgatcctggtgaaggagcagaatggagtgcagctgaccagcagcaccctgaccaacccccggcagagccctgtggaggcccaggaccgggagacctggggcaagaagattgacttcctgctgagcgtcatcggctttgctgtggacctggccaacgtgtggaggttcccctacctgtgctacaagaatggaggaggagccttcctggtgccctacctgctcttcatggtgattgctggcatgcccctcttctacatggagctggccctgggccagttcaaccgggagggcgctgctggggtgtggaagatctgccccatcctgaagggcgtgggcttcaccgtcatcctgatcagcctgtatgtgggcttcttctacaacgtcatcatcgcctgggccctgcactacctgttcagcagcttcaccacagagctgccctggatccactgcaacaacagctggaacagccccaactgcagtgatgcccaccctggggacagcagcggggacagcagcggcctgaatgacaccttcggcaccaccccagctgctgagtactttgagcggggcgtgctgcacctgcaccagagccacggcattgatgacctgggccccccacgctggcagctgacagcctgcctggtgctggtgattgtgctgctgtacttcagcctgtggaagggcgtgaagaccagcggcaaggtggtgtggatcacagccaccatgccctacgtggtgctgacagccctgctgctgcggggcgtgaccctgcccggggccattgatggcatccgggcctacctgtctgtggacttctaccgcctgtgtgaggcctctgtgtggattgatgctgccacccaggtgtgcttcagcctgggcgtgggcttcggcgtgctgattgccttcagcagctacaacaagttcaccaacaactgctacagagatgccatcgtgaccaccagcatcaacagcctgaccagcttcagcagcggctttgtggtgttctccttcctgggctacatggcccagaagcacagcgtgcccatcggagatgtggccaaggatggccctggcctcatcttcatcatctacccagaggccatcgccaccctgcccctgagcagcgcctgggccgtggtgttcttcatcatgctgctgaccctgggcatcgacagcgccatgggcggcatggagagcgtcatcaccggcctgattgatgagttccagctgctgcaccgccaccgggagctgttcaccctcttcatcgtgctggccaccttcctgctgagcctcttctgtgtgaccaacggcggcatctacgtgttcaccctgctggaccactttgctgctggcaccagcatcctgtttggagtgctgattgaggccatcggcgtggcctggttctatggagtgggccagttcagtgatgacatccagcagatgacaggccagaggcccagcctgtactggaggctgtgctggaagctggtgagcccctgcttcctgctgtttgtggtggtggtgtccatcgtgaccttccggcccccccactacggggcctacatcttcccagactgggccaatgccctgggctgggtgattgccaccagctccatggccatggtgcccatctatgctgcctacaagttctgcagcctgcccggcagcttccgggagaagctggcctatgccatcgcccctgagaaggaccgggagctggtggacagaggagaggtgcggcagttcaccctgcggcactggctgaaggtgtag

SEQ ID NO: 170960 - DNA, 1863 bp, synthetic construct; identical to SEQ ID NO: 170959
  misc_feature 1..1863: note = Description of Artificial Sequence: Synthetic coding sequence
  source 1..1863: mol_type = other DNA

SEQ ID NO: 170961 - DNA, 1800 bp, synthetic construct
  misc_feature 1..1800: note = Description of Artificial Sequence: Synthetic coding sequence
  source 1..1800: mol_type = other DNA
atggccaccaacggcagcaaggtggctgatggccagatcagcacagaggtgtctgaggcccctgtggccaatgacaagcccaagaccctggtggtgaaggtgcagaagaaggctgctgacctgcctgaccgggacacctggaagggccgctttgacttcctgatgagctgtgtgggctacgccatcggcctgggcaatgtgtggaggttcccctacctgtgtgggaagaatggaggaggagccttcctgatcccctacttcctgaccctcatctttgctggggtgcccctcttcctgctggagtgcagcctgggccagtacaccagcatcggcggcctgggcgtgtggaagctggcccccatgtttaaaggagtgggcctggccgctgctgtgctgtccttctggctgaacatctactacatcgtcatcatctcctgggccatctactacctgtacaacagcttcaccaccaccctgccctggaagcagtgtgacaacccctggaacacagaccgctgcttcagcaactacagcatggtgaacaccaccaacatgaccagcgctgtggtggagttctgggagaggaacatgcaccagatgacagatggcctggacaagccaggccagatccgctggcccctggccatcaccctggccatcgcctggatcctggtgtacttctgcatctggaagggcgtgggctggacaggcaaggtggtgtacttcagcgccacctacccctacatcatgctgatcatcctcttcttccggggcgtgaccctgcccggggccaaggagggcatcctcttctacatcacccccaacttcaggaagctgagtgacagcgaggtgtggctggatgctgccacccagatcttcttctcctatggcctgggcctgggcagcctcatcgccctgggcagctacaacagcttccacaacaacgtgtacagagacagcatcatcgtgtgctgcatcaacagctgcacctccatgtttgctggcttcgtcatcttcagcatcgtgggcttcatggcccacgtgaccaagaggagcattgctgatgtggccgccagcggccctggcctggccttcctggcctacccagaggccgtgacccagctgcccatcagccccctgtgggccatcctcttcttctccatgctgctgatgctgggcatcgacagccagttctgcaccgtggagggcttcatcacagccctggtggatgagtacccccggctgctgaggaacagaagagagctgttcatcgctgctgtgtgcatcatctcctacctgattggcctgagcaacatcacccagggcggcatctacgtgttcaagctgtttgactactacagcgccagcggcatgagcctgctcttcctggtgttctttgaatgtgtgtccatctcctggttctatggagtgaaccgcttctatgacaacatccaggagatggtgggcagccggccctgcatctggtggaagctgtgctggagcttcttcacccccatcatcgtggccggggtcttcatcttctctgctgtgcagatgacccccctgaccatgggcaactacgtgttccccaagtggggccagggcgtgggctggctgatggccctgagctccatggtgctgatccctggctacatggcctacatgttcctgaccctgaagggcagcctgaagcagaggatccaggtgatggtgcagcccagtgaagatattgtgcggccagaaaatggacctgagcagccccaggccggcagcagcaccagcaaggaggcctacatctag

SEQ ID NO: 170962 - DNA, 120 bp, synthetic construct
  misc_feature 1..120: note = Description of Artificial Sequence: Synthetic coding sequence
  source 1..120: mol_type = other DNA
atggccaccaacggcagcaaggtggctgatggccagatcagcacagaggtgtctgaggcccctgtggccaatgacaagcccaagaccctggtggtgaaggtgcagaagaaggccgcctag

SEQ ID NO: 170963 - DNA, 1266 bp, synthetic construct
  misc_feature 1..1266: note = Description of Artificial Sequence: Synthetic coding sequence
  source 1..1266: mol_type = other DNA
atggtgaacaccaccaacatgaccagcgctgtggtggagttctgggagaggaacatgcaccagatgacagatggcctggacaagccaggccagatccgctggcccctggccatcaccctggccatcgcctggatcctggtgtacttctgcatctggaagggcgtgggctggacaggcaaggtggtgtacttcagcgccacctacccctacatcatgctgatcatcctcttcttccggggcgtgaccctgcccggggccaaggagggcatcctcttctacatcacccccaacttcaggaagctgagtgacagcgaggtgtggctggatgctgccacccagatcttcttctcctatggcctgggcctgggcagcctcatcgccctgggcagctacaacagcttccacaacaacgtgtacagagacagcatcatcgtgtgctgcatcaacagctgcacctccatgtttgctggcttcgtcatcttcagcatcgtgggcttcatggcccacgtgaccaagaggagcattgctgatgtggccgccagcggccctggcctggccttcctggcctacccagaggccgtgacccagctgcccatcagccccctgtgggccatcctcttcttctccatgctgctgatgctgggcatcgacagccagttctgcaccgtggagggcttcatcacagccctggtggatgagtacccccggctgctgaggaacagaagagagctgttcatcgctgctgtgtgcatcatctcctacctgattggcctgagcaacatcacccagggcggcatctacgtgttcaagctgtttgactactacagcgccagcggcatgagcctgctcttcctggtgttctttgaatgtgtgtccatctcctggttctatggagtgaaccgcttctatgacaacatccaggagatggtgggcagccggccctgcatctggtggaagctgtgctggagcttcttcacccccatcatcgtggccggggtcttcatcttctctgctgtgcagatgacccccctgaccatgggcaactacgtgttccccaagtggggccagggcgtgggctggctgatggccctgagctccatggtgctgatccctggctacatggcctacatgttcctgaccctgaagggcagcctgaagcagaggatccaggtgatggtgcagcccagtgaagatattgtgcggccagaaaatggacctgagcagccccaggccggcagcagcaccagcaaggaggcctacatctag

SEQ ID NO: 170964 - DNA, 1899 bp, synthetic construct
  misc_feature 1..1899: note = Description of Artificial Sequence: Synthetic coding sequence
  source 1..1899: mol_type = other DNA
atgacagctgagaaggccctgcccctgggcaatggcaaggctgctgaggaggcccgggagagcgaggcccctgggggcggctgcagcagcggcggggccgccccagcccggcacccccgggtgaagagggacaaggctgtgcatgagcggggccactggaacaacaaggtggagtttgtgctgtctgtggccggggagatcatcggcctgggcaatgtgtggaggttcccctacctgtgctacaagaatggaggaggagccttcctgatcccctacgtggtgttcttcatctgctgcggcatccctgtgttcttcctggagacagccctgggccagttcaccagcgagggcggcatcacctgctggaggaaggtgtgccccctgtttgagggcatcggctacgccacccaggtgattgaggcccacctgaatgtgtactacatcatcatcctggcctgggccatcttctacctgagcaactgcttcaccacagagctgccctgggccacctgtggccacgagtggaacacagagaactgtgtggagttccagaagctgaatgtgagcaactacagccacgtgtccctgcagaatgccaccagccctgtgatggagttctgggagcaccgggtgctggccatcagtgatggcatcgagcacatcggcaacctgcgctgggagctggccctgtgcctgctggccgcctggaccatctgctacttctgcatctggaagggcaccaagagcacaggcaaggtggtgtatgtgacagccaccttcccctacatcatgctgctgatcctgctgatccggggcgtgaccctgcccggggccagcgagggcatcaagttctacctgtacccagacctgagccggctgagtgacccccaggtgtgggtggatgctggcacccagatcttcttctcctatgccatctgcctgggctgcctgacagccctgggcagctacaacaactacaacaacaactgctacagagactgcatcatgctgtgctgcctgaacagcggcaccagctttgtggccggctttgccatcttctctgtgctgggcttcatggcctatgagcagggcgtgcccatcgccgaggtggccgagagcggccctggcctggccttcatcgcctaccccaaggctgtgaccatgatgcccctgagccccctgtgggccaccctcttcttcatgatgctgatcttcctgggcctggacagccagtttgtgtgtgtggagagcctggtgacagctgtggtggacatgtaccccaaggtgttcagaagaggctacagaagagagctgctgatcctggccctgagcgtcatctcctacttcctgggcctggtgatgctgacagagggcggcatgtacatcttccagctgtttgacagctatgctgccagcggcatgtgcctgctgtttgtggccatctttgagtgcatctgcatcggctgggtgtatggcagcaaccgcttctatgacaacatcgaggacatgattggctaccggccccccagcctcatcaagtggtgctggatgatcatgaccccaggcatctgtgccggcatcttcatcttcttcctgatcaagtacaagcccctgaagtacaacaacatctacacctacccagcctggggctatggaattggctggctgatggccctgagctccatgctgtgcatccccctgtggatctgcatcaccgtgtggaagacagagggcaccctgcctgagaagctgcagaagctgaccacccccagcacagacctgaagatgaggggcaagctgggcgtgagccccaggatggtgacagtgaatgactgtgatgccaagctgaagagtgatggcaccatcgccgccatcacagagaaggagacccacttctag

SEQ ID NO: 170965 - DNA, 627 bp, synthetic construct
  misc_feature 1..627: note = Description of Artificial Sequence: Synthetic coding sequence
  source 1..627: mol_type = other DNA
atgacagctgagaaggccctgcccctgggcaatggcaaggctgctgaggaggcccgggagagcgaggcccctgggggcggctgcagcagcggcggggccgccccagcccggcacccccgggtgaagagggacaaggctgtgcatgagcggggccactggaacaacaaggtggagtttgtgctgtctgtggccggggagatcatcggcctgggcaatgtgtggaggttcccctacctgtgctacaagaatggaggaggagccttcctgatcccctacgtggtgttcttcatctgctgcggcatccctgtgttcttcctggagacagccctgggccagttcaccagcgagggcggcatcacctgctggaggaaggtgtgccccctgtttgagggcatcggctacgccacccaggtgattgaggcccacctgaatgtgtactacatcatcatcctggcctgggccatcttctacctgagcaactgcttcaccacagagctgccctgggccacctgtggccacgagtggaacacagagaactgtgtggagttccagaagctgaatgtgagcaactacagccacgtgtccctgcagaatgccaccagccctgtgatggagttctgggagtag

SEQ ID NO: 170966 - DNA, 2394 bp, synthetic construct
  misc_feature 1..2394: note = Description of Artificial Sequence: Synthetic coding sequence
  source 1..2394: mol_type = other DNA
atggactgcagcgcccccaaggagatgaacaagctgcctgccaacagccctgaggccgctgctgcccagggccacccagatggcccctgtgcccccaggaccagccctgagcaggagctgcctgctgctgctgcccctcctccaccccgggtgcccaggtctgccagcactggagcccagaccttccagagcgcagatgcccgggcctgtgaggccgagaggcctggggtgggcagctgcaagctgagcagcccccgggcccaggccgccagcgctgccctgcgggacctgcgggaggcccagggcgcccaggccagccccccacctggcagcagcggccctggaaatgccctgcactgcaagatccccttcctgcggggcccagaaggagatgccaacgtgtctgtgggcaagggcaccctggagaggaacaacacccctgtggtgggctgggtgaacatgagccagagcacagtggtgctggccacagatggcatcacctctgtgctgcccggctctgtggccaccgtggccacccaggaggatgagcagggagatgagaacaaggcccggggcaactggagcagcaagctggacttcatcctgtccatggtgggctatgctgtgggcctgggcaatgtgtggaggttcccctacctggccttccagaatggaggaggagccttcctgatcccctacctgatgatgctggccctggccggcctgcccatcttcttcctggaggtgtccctgggccagtttgccagccagggccctgtgtctgtgtggaaggccatcccagccctgcagggctgcggcatcgccatgctgatcatctctgtgctgattgccatctactacaacgtcatcatctgctacaccctcttctacctgtttgccagctttgtgtctgtgctgccctggggcagctgcaacaacccctggaacaccccagagtgcaaggacaagaccaagctgctgctggacagctgtgtgatcagtgaccaccccaagatccagatcaagaacagcaccttctgcatgacagcctacccaaatgtgaccatggtgaacttcaccagccaggccaacaagacctttgtgtctggcagcgaggagtacttcaagtactttgtgctgaagatctctgctggcatcgagtacccaggagagatccgctggcccctggccctgtgcctcttcctggcctgggtgattgtgtatgccagcctggccaagggcatcaagaccagcggcaaggtggtgtacttcaccgccaccttcccctacgtggtgctggtgatcctgctgatccggggcgtgaccctgcccggggccggggccggcatctggtacttcatcacccccaagtgggagaagctgacagatgccaccgtgtggaaggatgctgccacccagatcttcttcagcctgtctgctgcctggggcggcctcatcaccctgagcagctacaacaagttccacaacaactgctacagagacaccctcatcgtgacctgcaccaacagcgccaccagcatctttgctggcttcgtcatcttcagcgtcatcggcttcatggccaatgaaaggaaggtgaacattgaaaatgtggccgaccagggccctggcatcgcctttgtggtgtacccagaggccctgacccggctgcccctgagccccttctgggccatcatcttcttcctgatgctgctgaccctgggcctggacaccatgtttgccaccatcgagaccatcgtgaccagcatcagtgatgagttccccaagtacctgcggacccacaagcctgtgttcaccctgggctgctgcatctgcttcttcatcatgggcttccccatgatcacccagggcggcatctacatgttccagctggtggacacctacgccgccagctatgccctggtgatcatcgccatctttgagctggtgggcatctcctatgtgtatggcctgcagcgcttctgtgaagatattgagatgatgattggcttccagcccaacatcttctggaaggtgtgctgggcctttgtgacccccaccatcctgaccttcatcctgtgcttctccttctaccagtgggagcccatgacctacggcagctaccgctaccccaactggagcatggtgctgggctggctgatgctggcctgcagcgtcatctggatccccatcatgtttgtgatcaagatgcacctggcccctggccgcttcatcgagcggctgaagctggtgtgcagcccccagcctgactggggccccttcctggcccagcacagaggagagcgctacaagaacatgattgaccccctgggcaccagcagcctgggcctgaagctgcctgtgaaggacctggagctgggcacccagtgctag

SEQ ID NO: 170967 - DNA, 1959 bp, synthetic construct
  misc_feature 1..1959: note = Description of Artificial Sequence: Synthetic coding sequence
  source 1..1959: mol_type = other DNA
atgtctggaggagacacccgggccgccatcgcccggcccaggatggctgctgcccacggccctgtggcccccagcagccctgagcagaatggagctgtgcccagcgaggccaccaagagggaccagaacctgaagaggggcaactggggcaaccagattgaatttgtgctgacctctgtgggctatgctgtgggcctgggcaatgtgtggaggttcccctacctgtgctacagaaatggaggaggagccttcatgttcccctacttcatcatgctgatcttctgtggcatccccctcttcttcatggagctgagctttggccagtttgccagccagggctgcctgggcgtgtggaggatcagccccatgtttaaaggagtgggctacggcatgatggtggtgtccacctacatcggcatctactacaacgtggtgatctgcatcgccttctactacttcttcagctccatgacccacgtgctgccctgggcctactgcaacaacccctggaacacccatgactgtgccggcgtgctggatgccagcaacctgaccaacggcagcaggcctgctgccctgcccagcaacctgagccacctgctgaaccacagcctgcagaggaccagccccagcgaggagtactggaggctgtatgtgctgaagctgagtgatgacatcggcaactttggagaggtgcggctgcccctgctgggctgcctgggcgtgtcctggctggtggtgttcctgtgcctgatccggggcgtgaagagcagcggcaaggtggtgtacttcaccgccaccttcccctacgtggtgctgaccatcctgtttgtgcggggcgtgaccctggagggcgcctttgatggcatcatgtactacctgaccccccagtgggacaagatcctggaggccaaggtgtggggagatgctgccagccagatcttctacagcctgggctgtgcctggggcggcctcatcaccatggccagctacaacaagttccacaacaactgctacagagacagcgtcatcatcagcatcaccaactgtgccacctctgtgtatgccggcttcgtcatcttcagcatcctgggcttcatggccaaccacctgggcgtggatgtgtcccgggtggccgaccacggccctggcctggcctttgtggcctacccagaggccctgaccctgctgcccatcagccccctgtggagcctgctcttcttcttcatgctgatcctgctgggcctgggcacccagttctgcctgctggagaccctggtgacagccatcgtggatgaggtgggcaatgagtggatcctgcagaagaagacctacgtgaccctgggcgtggccgtggccggcttcctgctgggcatccccctgaccagccaggccggcatctactggctgctgctgatggacaactatgctgccagcttcagcctggtggtgatcagctgcatcatgtgtgtggccatcatgtacatctacggccacaggaactacttccaggacatccagatgatgctgggcttccccccacccctcttcttccagatctgctggaggtttgtgtccccagccatcatcttcttcatcctggtgttcaccgtcatccagtaccagcccatcacctacaaccactaccagtacccaggctgggccgtggccatcggcttcctgatggccctgagctctgtgctgtgcatccccctgtatgccatgttccggctgtgcaggacagatggagacaccctgctgcagaggctgaagaatgccaccaagcccagccgggactggggccctgccctgctggagcacaggacaggccgctatgcccccaccatcgcccccagcccagaagatggctttgaggtgcagcccctgcacccagacaaggcccagatccccatcgtgggcagcaatggcagcagccggctgcaggacagccgcatctag

SEQ ID NO: 170968 - DNA, 2121 bp, synthetic construct
  misc_feature 1..2121: note = Description of Artificial Sequence: Synthetic coding sequence
  source 1..2121: mol_type = other DNA
atgtctggaggagacacccgggccgccatcgcccggcccaggatggctgctgcccacggccctgtggcccccagcagccctgagcaggtgaccctgctgcctgtgcagaggagcttcttcctgccccccttcagcggggccacccccagcaccagcctggccgagagcgtgctgaaggtgtggcacggggcctacaacagcggcctgctgccccagctgatggcccagcacagcctggccatggcccagaatggagctgtgcccagcgaggccaccaagagggaccagaacctgaagaggggcaactggggcaaccagattgaatttgtgctgacctctgtgggctatgctgtgggcctgggcaatgtgtggaggttcccctacctgtgctacagaaatggaggaggagccttcatgttcccctacttcatcatgctgatcttctgtggcatccccctcttcttcatggagctgagctttggccagtttgccagccagggctgcctgggcgtgtggaggatcagccccatgtttaaaggagtgggctacggcatgatggtggtgtccacctacatcggcatctactacaacgtggtgatctgcatcgccttctactacttcttcagctccatgacccacgtgctgccctgggcctactgcaacaacccctggaacacccatgactgtgccggcgtgctggatgccagcaacctgaccaacggcagcaggcctgctgccctgcccagcaacctgagccacctgctgaaccacagcctgcagaggaccagccccagcgaggagtactggaggctgtatgtgctgaagctgagtgatgacatcggcaactttggagaggtgcggctgcccctgctgggctgcctgggcgtgtcctggctggtggtgttcctgtgcctgatccggggcgtgaagagcagcggcaaggtggtgtacttcaccgccaccttcccctacgtggtgctgaccatcctgtttgtgcggggcgtgaccctggagggcgcctttgatggcatcatgtactacctgaccccccagtgggacaagatcctggaggccaaggtgtggggagatgctgccagccagatcttctacagcctgggctgtgcctggggcggcctcatcaccatggccagctacaacaagttccacaacaactgctacagagacagcgtcatcatcagcatcaccaactgtgccacctctgtgtatgccggcttcgtcatcttcagcatcctgggcttcatggccaaccacctgggcgtggatgtgtcccgggtggccgaccacggccctggcctggcctttgtggcctacccagaggccctgaccctgctgcccatcagccccctgtggagcctgctcttcttcttcatgctgatcctgctgggcctgggcacccagttctgcctgctggagaccctggtgacagccatcgtggatgaggtgggcaatgagtggatcctgcagaagaagacctacgtgaccctgggcgtggccgtggccggcttcctgctgggcatccccctgaccagccaggccggcatctactggctgctgctgatggacaactatgctgccagcttcagcctggtggtgatcagctgcatcatgtgtgtggccatcatgtacatctacggccacaggaactacttccaggacatccagatgatgctgggcttccccccacccctcttcttccagatctgctggaggtttgtgtccccagccatcatcttcttcatcctggtgttcaccgtcatccagtaccagcccatcacctacaaccactaccagtacccaggctgggccgtggccatcggcttcctgatggccctgagctctgtgctgtgcatccccctgtatgccatgttccggctgtgcaggacagatggagacaccctgctgcagaggctgaagaatgccaccaagcccagccgggactggggccctgccctgctggagcacaggacaggccgctatgcccccaccatcgcccccagcccagaagatggctttgaggtgcagcccctgcacccagacaaggcccagatccccatcgtgggcagcaatggcagcagccggctgcaggacagccgcatctag

SEQ ID NO: 170969 - DNA, 1725 bp, synthetic construct
  misc_feature 1..1725: note = Description of Artificial Sequence: Synthetic coding sequence
  source 1..1725: mol_type = other DNA
atgttcccctacttcatcatgctgatcttctgtggcatccccctcttcttcatggagctgagctttggccagtttgccagccagggctgcctgggcgtgtggaggatcagccccatgtttaaaggagtgggctacggcatgatggtggtgtccacctacatcggcatctactacaacgtggtgatctgcatcgccttctactacttcttcagctccatgacccacgtgctgccctgggcctactgcaacaacccctggaacacccatgactgtgccggcgtgctggatgccagcaacctgaccaacggcagcaggcctgctgccctgcccagcaacctgagccacctgctgaaccacagcctgcagaggaccagccccagcgaggagtactggaggctgtatgtgctgaagctgagtgatgacatcggcaactttggagaggtgcggctgcccctgctgggctgcctgggcgtgtcctggctggtggtgttcctgtgcctgatccggggcgtgaagagcagcggcaaggtggtgtacttcaccgccaccttcccctacgtggtgctgaccatcctgtttgtgcggggcgtgaccctggagggcgcctttgatggcatcatgtactacctgaccccccagtgggacaagatcctggaggccaaggtgtggggagatgctgccagccagatcttctacagcctgggctgtgcctggggcggcctcatcaccatggccagctacaacaagttccacaacaactgctacagagacagcgtcatcatcagcatcaccaactgtgccacctctgtgtatgccggcttcgtcatcttcagcatcctgggcttcatggccaaccacctgggcgtggatgtgtcccgggtggccgaccacggccctggcctggcctttgtggcctacccagaggccctgaccctgctgcccatcagccccctgtggagcctgctcttcttcttcatgctgatcctgctgggcctgggcacccagttctgcctgctggagaccctggtgacagccatcgtggatgaggtgggcaatgagtggatcctgcagaagaagacctacgtgaccctgggcgtggccgtggccggcttcctgctgggcatccccctgaccagccaggccggcatctactggctgctgctgatggacaactatgctgccagcttcagcctggtggtgatcagctgcatcatgtgtgtggccatcatgtacatctacggccacaggaactacttccaggacatccagatgatgctgggcttccccccacccctcttcttccagatctgctggaggtttgtgtccccagccatcatcttcctgcaggcccaggtgcaccggcggctgccccagaaccccctgcactttgccagcctgcctgagagaaatgtgctgctgcaccagctgccccagagaggaggagtgcctgagcatgacccccccaccccacccagccctgcccggacctacggcccccaggtgcgggtgcgggaggtgccccgggcccggcggcagaggagccccaacccagcccccctgtgggccccacccagccccaagccccacccctgcagcgctgctggccccctgggctgggactgccccttcaggaactgccagagcctggccctgagcagcgcccggctgctggccgacagtgatgctgggggccctgagacccggcagtgggagcccggcccctag

SEQ ID NO: 170970 - DNA, 1902 bp, synthetic construct
  misc_feature 1..1902: note = Description of Artificial Sequence: Synthetic coding sequence
  source 1..1902: mol_type = other DNA
atggtgggcaagggggccaagggcatgctgaatggagctgtgcccagcgaggccaccaagagggaccagaacctgaagaggggcaactggggcaaccagatcgagtttgtgctgacctctgtgggctatgctgtgggcctgggcaatgtgtggaggttcccctacctgtgctacagaaatggaggaggagccttcatgttcccctacttcatcatgctgatcttctgtggcatccccctcttcttcatggagctgagctttggccagtttgccagccagggctgcctgggcgtgtggaggatcagccccatgttcaagggcgtgggctacggcatgatggtggtgtccacctacatcggcatctactacaacgtggtgatctgcatcgccttctactacttcttcagctccatgacccacgtgctgccctgggcctactgcaacaacccctggaacacccatgactgtgccggcgtgctggatgccagcaacctgaccaacggcagcaggcctgctgccctgcccagcaacctgagccacctgctgaaccacagcctgcagaggaccagccccagcgaggagtactggaggctgtatgtgctgaagctgagtgatgacatcggcaactttggagaggtgcggctgcccctgctgggctgcctgggcgtgtcctggctggtggtgttcctgtgcctgatccggggcgtgaagagcagcggcaaggtggtgtacttcaccgccaccttcccctacgtggtgctgaccatcctgtttgtgcggggcgtgaccctggagggcgcctttgatggcatcatgtactacctgaccccccagtgggacaagatcctggaggccaaggtgtggggagatgctgccagccagatcttctacagcctgggctgtgcctggggcggcctcatcaccatggccagctacaacaagttccacaacaactgctacagagattctgtcatcatcagcatcaccaactgtgccacctctgtgtatgccggctttgtgatcttcagcatcctgggcttcatggccaaccacctgggcgtggatgtgtcccgggtggccgaccacggccctggcctggcctttgtggcctacccagaggccctgaccctgctgcccatcagccccctgtggagcctgctcttcttcttcatgctgatcctgctgggcctgggcacccagttctgcctgctggagaccctggtgacagccatcgtggatgaggtgggcaatgagtggatcctgcagaagaagacctacgtgaccctgggcgtggccgtggccggcttcctgctgggcatccccctgaccagccaggccggcatctactggctgctgctgatggacaactatgctgccagcttcagcctggtggtgatcagctgcatcatgtgtgtggccatcatgtacatctacggccacaggaactacttccaggacatccagatgatgctgggcttccccccacccctcttcttccagatctgctggaggtttgtgtccccagccatcatcttcttcatcctggtgttcaccgtcatccagtaccagcccatcacctacaaccactaccagtacccaggctgggccgtggccatcggcttcctgatggccctgagctctgtgctgtgcatccccctgtatgccatgttccggctgtgcaggacagatggagacaccctgctgcagaggctgaagaatgccaccaagcccagccgggactggggccctgccctgctggagcacaggacaggccgctatgcccccaccatcgcccccagcccagaagatggctttgaggtgcagcccctgcacccagacaaggcccagatccccatcgtgggcagcaatggcagcagccggctgcaggacagccgcatctag

SEQ ID NO: 170971 - DNA, 1569 bp, synthetic construct
  misc_feature 1..1569: note = Description of Artificial Sequence: Synthetic coding sequence
  source 1..1569: mol_type = other DNA
atgatggtggtgtccacctacatcggcatctactacaacgtggtgatctgcatcgccttctactacttcttcagctccatgacccacgtgctgccctgggcctactgcaacaacccctggaacacccatgactgtgccggcgtgctggatgccagcaacctgaccaacggcagcaggcctgctgccctgcccagcaacctgagccacctgctgaaccacagcctgcagaggaccagccccagcgaggagtactggaggctgtatgtgctgaagctgagtgatgacatcggcaactttggagaggtgcggctgcccctgctgggctgcctgggcgtgtcctggctggtggtgttcctgtgcctgatccggggcgtgaagagcagcggcaaggtggtgtacttcaccgccaccttcccctacgtggtgctgaccatcctgtttgtgcggggcgtgaccctggagggcgcctttgatggcatcatgtactacctgaccccccagtgggacaagatcctggaggccaaggtgtggggagatgctgccagccagatcttctacagcctgggctgtgcctggggcggcctcatcaccatggccagctacaacaagttccacaacaactgctacagagacagcgtcatcatcagcatcaccaactgtgccacctctgtgtatgccggcttcgtcatcttcagcatcctgggcttcatggccaaccacctgggcgtggatgtgtcccgggtggccgaccacggccctggcctggcctttgtggcctacccagaggccctgaccctgctgcccatcagccccctgtggagcctgctcttcttcttcatgctgatcctgctgggcctgggcacccagttctgcctgctggagaccctggtgacagccatcgtggatgaggtgggcaatgagtggatcctgcagaagaagacctacgtgaccctgggcgtggccgtggccggcttcctgctgggcatccccctgaccagccaggccggcatctactggctgctgctgatggacaactatgctgccagcttcagcctggtggtgatcagctgcatcatgtgtgtggccatcatgtacatctacggccacaggaactacttccaggacatccagatgatgctgggcttccccccacccctcttcttccagatctgctggaggtttgtgtccccagccatcatcttcttcatcctggtgttcaccgtcatccagtaccagcccatcacctacaaccactaccagtacccaggctgggccgtggccatcggcttcctgatggccctgagctctgtgctgtgcatccccctgtatgccatgttccggctgtgcaggacagatggagacaccctgctgcagaggctgaagaatgccaccaagcccagccgggactggggccctgccctgctggagcacaggacaggccgctatgcccccaccatcgcccccagcccagaagatggctttgaggtgcagcccctgcacccagacaaggcccagatccccatcgtgggcagcaatggcagcagccggctgcaggacagccgcatctag

SEQ ID NO: 170972 - DNA, 405 bp, synthetic construct
  misc_feature 1..405: note = Description of Artificial Sequence: Synthetic coding sequence
  source 1..405: mol_type = other DNA
atgtctggaggagacacccgggccgccatcgcccggcccaggatggctgctgcccacggccctgtggcccccagcagccctgagcagaatggagctgtgcccagcgaggccaccaagagggaccagaacctgaagaggggcaactggggcaaccagattgaatttgtgctgacctctgtgggctatgctgtgggcctgggcaatgtgtggaggttcccctacctgtgctacagaaatggaggaggagccttcatgttcccctacttcatcatgctgatcttctgtggcatccccctcttcttcatggagctgagctttggccagtttgccagccagggctgcctgggcgtgtggaggatcagccccatgtttaaaggagtgggctacggcatgatggtggtgtag

SEQ ID NO: 170973 - DNA, 1161 bp, synthetic construct
  misc_feature 1..1161: note = Description of Artificial Sequence: Synthetic coding sequence
  source 1..1161: mol_type = other DNA
atgttcccctacttcatcatgctgatcttctgtggcatccccctcttcttcatggagctgagctttggccagtttgccagccagggctgcctgggcgtgtggaggatcagccccatgtttaaaggagtgggctacggcatgatggtggtgtccacctacatcggcatctactacaacgtggtgatctgcatcgccttctactacttcttcagctccatgacccacgtgctgccctgggcctactgcaacaacccctggaacacccatgactgtgccggcgtgctggatgccagcaacctgaccaacggcagcaggcctgctgccctgcccagcaacctgagccacctgctgaaccacagcctgcagaggaccagccccagcgaggagtactggaggctgtatgtgctgaagctgagtgatgacatcggcaactttggagaggtgcggctgcccctgctgggctgcctgggcgtgtcctggctggtggtgttcctgtgcctgatccggggcgtgaagagcagcggcaaggtggtgtacttcaccgccaccttcccctacgtggtgctgaccatcctgtttgtgcggggcgtgaccctggagggcgcctttgatggcatcatgtactacctgaccccccagtgggacaagatcctggaggccaaggtgtggggagatgctgccagccagatcttctacagcctgggctgtgcctggggcggcctcatcaccatggccagctacaacaagttccacaacaactgctacagagacagcgtcatcatcagcatcaccaactgtgccacctctgtgtatgccggcttcgtcatcttcagcatcctgggcttcatggccaaccacctgggcgtggatgtgtcccgggtggccgaccacggccctggcctggcctttgtggcctacccagaggccctgaccctgctgcccatcagccccctgtggagcctgctcttcttcttcatgctgatcctgctgggcctgggcacccagttctgcctgctggagaccctggtgacagccatcgtggatgaggtgggcaatgagtggatcctgcagaagaagacctacgtgaccctgggcgtggccgtggccggcttcctgctgggcatccccctgaccagccaggccagcatcggctgctgctag

SEQ ID NO: 170974 - DNA, 1050 bp, synthetic construct
  misc_feature 1..1050: note = Description of Artificial Sequence: Synthetic coding sequence
  source 1..1050: mol_type = other DNA
atgggagacatgggagacccccccaagaagaagaggctcatcagcctgtgtgtgggctgcggcaaccagatccatgaccagtacatcctgcgggtgtccccagacctggagtggcacgccgcctgcctgaagtgtgccgagtgcaaccagtacctggatgagagctgcacctgctttgtgagagatggcaagacctactgcaagagggactacatccggctgtatggcatcaagtgtgccaagtgcagcatcggcttcagcaagaatgactttgtgatgagggcccggagcaaggtgtaccacatcgagtgcttccgctgtgtggcctgcagccggcagctgatccctggagatgaatttgccctgcgggaggatggcctcttctgcagagctgaccatgatgtggtggagcgggccagcctgggcgctggggaccccctgagccccctgcacccagcccggcccctgcagatggctgctgagcccatcagcgcccggcagcctgccctgcggccccacgtgcacaagcagcctgagaagaccaccagggtgaggacagtgctgaatgagaagcagctgcacaccctgcggacctgctatgctgccaaccccaggccagatgccctgatgaaggagcagctggtggagatgacaggcctgagccccagggtcatccgggtgtggttccagaacaagcgctgcaaggacaagaagaggagcatcatgatgaagcagctgcagcagcagcagcccaatgacaagaccaacatccagggcatgacaggcacccccatggtggccgccagccctgagagacatgatggcggcctgcaggccaaccctgtggaggtgcagagctaccagcccccctggaaggtgctgagtgactttgccctgcagagcgacatcgaccagcctgccttccagcagctggtgaacttcagcgagggcggccctggcagcaacagcacaggcagcgaggtggcctccatgagcagccagctgcctgacacccccaacagcatggtggccagccccatcgaggcctag

SEQ ID NO: 170975 - DNA, 2283 bp, synthetic construct
  misc_feature 1..2283: note = Description of Artificial Sequence: Synthetic coding sequence
  source 1..2283: mol_type = other DNA
atgctgagtgatgaccacgtgaatgagatcatcatccaggtggagaatgtgtcctctggagtgcagagccaccccagcagcaaccagatcttccaggagaaggtgctgctggacagcagcatcaacatggtgctgagcatcagtgacattgatgtgattgacagccagacagtgtccaagagaaatgaccagaagggcaaccaggtgctgcgcttcagcaccagcctgaatgaatccatgagccagaccctgcacagcctggagtgcatgggcatcgacaccccaggcagcagccatgaaacagtgcagggccagaagctgattgccagcctcatccccatgaccagccgggaccgcatcaaggccatccggaaccagcccaggaccatggaggagaagaggaacctgaggaagatcgtggacaaggagaagagcaagcagacccaccgcatcctgcagctgaactgctgcatccagtgcctgaacagcatcagccgggcctacagaagaagcaagaacagcctgtctgagatcctgaacagcatcagcctgtggcagaagaccctgaagatcatcggcggcaagtttggcacctctgtgctgagctacttcaacttcctgcgctggctgctgaagttcaacatcttctccttcatcctgaacttctccttcatcatcatcccccagttcaccgtggccaagaagaacaccctgcagttcaccggcctggagttcttcaccggggtgggctacttccgggacacagtgatgtactacggcttctacaccaacagcaccatccagcacggcaacagcggggccagctacaacatgcagctggcctacatcttcaccatcggggcctgcctgaccacctgcttcttcagcctgctcttctccatggccaagtacttcaggaacaacttcatcaacccccacatctacagcggcggcatcaccaagctgatcttctgctgggacttcaccgtgacccatgagaaggctgtgaagctgaagcagaagaacctgagcacagagatccgggagaacctgtctgagctgcggcaggagaacagcaagctgaccttcaaccagctgctgacccgcttcagcgcctacatggtggcctgggtggtgtccactggagtggccatcgcctgctgtgccgctgtgtactacctggccgagtacaacctggagttcctgaagacccacagcaaccctggagctgtgctgctgctgccctttgtggtgtcctgcatcaacctggccgtgccctgcatctacagcatgttccggctggtggagagatatgagatgcccaggcatgaggtgtatgtgctgctgatccggaacatcttcctgaagatcagcatcatcggcatcctgtgctactactggctgaacacagtggccctgagcggggaggagtgctgggagaccctgattggccaggacatctaccgcctgctgctgatggactttgtgttcagcctggtgaacagcttcctgggggagttcctgcggcgcatcatcggcatgcagctgatcaccagcctgggcctgcaggagtttgatattgccagaaatgtgctggagctgatctatgcccagaccctggtgtggattggcatcttcttctgccccctgctgcccttcatccagatgatcatgctgttcatcatgttctacagcaagaacatcagcctgatgatgaacttccagccccccagcaaggcctggagggccagccagatgatgaccttcttcatcttcctgctcttcttccccagcttcaccggggtgctgtgcaccctggccatcaccatctggaggctgaagcccagcgctgactgtggccccttccggggcctgcccctcttcatccacagcatctacagctggattgacaccctgagcaccaggcctggctacctgtgggtggtgtggatctacagaaacctgattggctctgtgcacttcttcttcatcctgaccctcatcgtgctgatcatcacctacctgtactggcagatcacagagggcaggaagatcatgatccggctgctgcacgagcagatcatcaatgaaggcaaggacaagatgttcctgattgagaagctgatcaagctgcaggacatggagaagaaggccaaccccagcagcctggtgctggagcggcgggaggtggagcagcagggcttcctgcacctgggggagcatgatggcagcctggacctgcggagccgccgctctgtgcaggagggcaacccccgggcctag

SEQ ID NO: 170976 - DNA, 1854 bp, synthetic construct
  misc_feature 1..1854: note = Description of Artificial Sequence: Synthetic coding sequence
  source 1..1854: mol_type = other DNA
atgctgctggccaggatgaacccccaggtgcagccagaaaataatggagctgacaccggccctgagcagcccctgcgggccaggaagacagctgagctgctggtggtgaaggagagaaatggagtgcagtgcctgctggcccccagagatggagatgcccagccccgggagacctggggcaagaagattgacttcctgctgtctgtggtgggctttgctgtggacctggccaacgtgtggaggttcccctacctgtgctacaagaatggaggaggagccttcctgatcccctacaccctcttcctgatcatcgccggcatgcccctcttctacatggagctggccctgggccagtacaaccgggagggcgccgccaccgtgtggaagatctgccccttcttcaagggcgtgggctacgccgtcatcctgattgccctgtatgtgggcttctactacaacgtcatcatcgcctggagcctgtactacctgttcagcagcttcaccctgaacctgccctggacagactgtggccacacctggaacagccccaactgcacagaccccaagctgctgaatggatctgtgctgggcaaccacaccaagtacagcaagtacaagttcaccccagctgctgagttctatgaaagaggagtgctgcacctgcacgagagcagcggcatccatgacatcggcctgccccagtggcagctgctgctgtgcctgatggtggtggtgattgtgctgtacttcagcctgtggaagggcgtgaagaccagcggcaaggtggtgtggatcacagccaccctgccctactttgtgctgtttgtgctgctggtgcacggcgtgaccctgcccggggccagcaatggcatcaatgcctacctgcacatcgacttctaccgcctgaaggaggccaccgtgtggattgatgctgccacccagatcttcttcagcctgggcgccggctttggagtgctgattgcctttgccagctacaacaagtttgacaacaactgctacagagatgccctgctgaccagcagcatcaactgcatcaccagctttgtgtctggctttgccatcttcagcatcctgggctacatggcccacgagcacaaggtgaacattgaagatgtggccacagaaggagctggcctggtgttcatcctgtacccagaggccatcagcaccctgagcggcagcaccttctgggccgtggtgttctttgtgatgctgctggccctgggcctggacagctccatgggcggcatggaggccgtcatcaccggcctggctgatgacttccaggtgctgaagaggcacaggaagctgttcacctttggagtgaccttcagcaccttcctgctggccctcttctgcatcaccaagggcggcatctacgtgctgaccctgctggacacctttgctgctggcaccagcatcctgtttgctgtgctgatggaggccatcggcgtgtcctggttctacggcgtggaccgcttcagcaatgacatccagcagatgatgggcttccggcccggcctgtactggaggctgtgctggaagtttgtgtccccagccttcctgctgtttgtggtggtggtgtccatcatcaacttcaagcccctgacctatgatgactacatcttccccccctgggccaactgggtgggctggggcatcgccctgagctccatggtgctggtgcccatctacgtgatctacaagttcctgagcacccagggcagcctgtgggagcggctggcctacggcatcaccccagaaaatgagcaccacctggtggcccagagggacatccggcagttccagctgcagcactggctggccatctag

SEQ ID NO: 170977 - DNA, 1854 bp, synthetic construct; identical to SEQ ID NO: 170976
  misc_feature 1..1854: note = Description of Artificial Sequence: Synthetic coding sequence
  source 1..1854: mol_type = other DNA

SEQ ID NO: 170978 - DNA, 996 bp, synthetic construct
  misc_feature 1..996: note = Description of Artificial Sequence: Synthetic coding sequence
  source 1..996: mol_type = other DNA
atggtggtggtgattgtgctgtacttcagcctgtggaagggcgtgaagaccagcggcaaggtgtggattgatgctgccacccagatcttcttcagcctgggcgccggctttggagtgctgattgcctttgccagctacaacaagtttgacaacaactgctacagagatgccctgctgaccagcagcatcaactgcatcaccagctttgtgtctggctttgccatcttcagcatcctgggctacatggcccacgagcacaaggtgaacattgaagatgtggccacagaaggagctggcctggtgttcatcctgtacccagaggccatcagcaccctgagcggcagcaccttctgggccgtggtgttctttgtgatgctgctggccctgggcctggacagctccatgggcggcatggaggccgtcatcaccggcctggctgatgacttccaggtgctgaagaggcacaggaagctgttcacctttggagtgaccttcagcaccttcctgctggccctcttctgcatcaccaagggcggcatctacgtgctgaccctgctggacacctttgctgctggcaccagcatcctgtttgctgtgctgatggaggccatcggcgtgtcctggttctacggcgtggaccgcttcagcaatgacatccagcagatgatgggcttccggcccggcctgtactggaggctgtgctggaagtttgtgtccccagccttcctgctgtttgtggtggtggtgtccatcatcaacttcaagcccctgacctatgatgactacatcttccccccctgggccaactgggtgggctggggcatcgccctgagctccatggtgctggtgcccatctacgtgatctacaagttcctgagcacccagggcagcctgtgggagcggctggcctacggcatcaccccagaaaatgagcaccacctggtggcccagagggacatccggcagttccagctgcagcactggctggccatctag

SEQ ID NO: 170979 - DNA, 1893 bp, synthetic construct
  misc_feature 1..1893: note = Description of Artificial Sequence: Synthetic coding sequence
  source 1..1893: mol_type = other DNA
atggagaccacccccctgaacagccagaagcagctgagcgcctgtgaagatggagaggactgccaggagaatggagtgctgcagaaggtggtgcccacccctggggacaaggtggagagcggccagatcagcaatggctacagcgctgtgcccagccctggagctggagatgacaccaggcacagcatcccagccaccaccaccaccctggtggccgagctgcaccagggcgagcgggagacctggggcaagaaggtggacttcctgctgtctgtgattggctatgctgtggacctgggcaatgtgtggaggttcccctacatctgctaccagaatggaggaggagccttcctgctgccctacaccatcatggccatctttggaggcatccccctcttctacatggagctggccctgggccagtaccacagaaatggctgcatcagcatctggaggaagatctgccccatcttcaagggcatcggctacgccatctgcatcatcgccttctacatcgccagctactacaacaccatcatggcctgggccctgtactacctgatcagcagcttcacagaccagctgccctggaccagctgcaagaacagctggaacacaggcaactgcaccaactacttcagcgaggacaacatcacctggaccctgcacagcaccagccctgctgaggagttctacaccaggcatgtgctgcagatccacaggagcaagggcctgcaggacctgggcggcatctcctggcagctggccctgtgcatcatgctgatcttcaccgtcatctacttcagcatctggaagggcgtgaagaccagcggcaaggtggtgtgggtgacagccaccttcccctacatcatcctgtctgtgctgctggtgcggggggccaccctgcccggggcctggaggggcgtgctcttctacctgaagcccaactggcagaagctgctggagactggagtgtggattgatgctgctgcccagatcttcttcagcctgggccctggctttggagtgctgctggcctttgccagctacaacaagttcaacaacaactgctaccaggatgccctggtgacctctgtggtgaactgcatgaccagctttgtgtctggctttgtgatcttcaccgtgctgggctacatggccgagatgagaaatgaagatgtgtctgaggtggccaaggatgctggccccagcctgctcttcatcacctatgcagaggccatcgccaacatgcctgccagcaccttctttgccatcatcttcttcctgatgctgatcaccctgggcctggacagcacctttgctggcctggagggcgtcatcacagctgtgctggatgagttcccccacgtgtgggccaagagaagagaaagatttgtgctggccgtggtgatcacctgcttcttcggcagcctggtgaccctgacctttggaggagcctacgtggtgaagctgctggaggagtatgccactggacctgctgtgctgactgtggccctgattgaagctgtggccgtgtcctggttctacggcatcacccagttctgcagagatgtgaaggagatgctgggcttcagccctggctggttctggaggatctgctgggtggccatcagccccctcttcctgctcttcatcatctgcagcttcctgatgagccccccccagctgcggctcttccagtacaactacccctactggagcatcatcctgggctactgcatcggcaccagcagcttcatctgcatccccacctacatcgcctaccgcctcatcatcaccccaggcaccttcaaggagcgcatcatcaagagcatcaccccagagacccccacagagatcccctgtggggacatccggctgaatgctgtgtag

SEQ ID NO: 170980 - DNA, 2019 bp, synthetic construct
  misc_feature 1..2019: note = Description of Artificial Sequence: Synthetic coding sequence
  source 1..2019: mol_type = other DNA
atgagccagagcagaagagtgaacccagatgaccgggagctgggcggggacccccagatccaggccccccgggaccagctgggcagcctggctgatggccaccagtgccacctgctgaccagcaggatggagaccacccccctgaacagccagaagcagctgagcgcctgtgaagatggagaggactgccaggagaatggagtgctgcagaaggtggtgcccacccctggggacaaggtggagagcggccagatcagcaatggctacagcgctgtgcccagccctggagctggagatgacaccaggcacagcatcccagccaccaccaccaccctggtggccgagctgcaccagggcgagcgggagacctggggcaagaaggtggacttcctgctgtctgtgattggctatgctgtggacctgggcaatgtgtggaggttcccctacatctgctaccagaatggaggaggagccttcctgctgccctacaccatcatggccatctttggaggcatccccctcttctacatggagctggccctgggccagtaccacagaaatggctgcatcagcatctggaggaagatctgccccatcttcaagggcatcggctacgccatctgcatcatcgccttctacatcgccagctactacaacaccatcatggcctgggccctgtactacctgatcagcagcttcacagaccagctgccctggaccagctgcaagaacagctggaacacaggcaactgcaccaactacttcagcgaggacaacatcacctggaccctgcacagcaccagccctgctgaggagttctacaccaggcatgtgctgcagatccacaggagcaagggcctgcaggacctgggcggcatctcctggcagctggccctgtgcatcatgctgatcttcaccgtcatctacttcagcatctggaagggcgtgaagaccagcggcaaggtggtgtgggtgacagccaccttcccctacatcatcctgtctgtgctgctggtgcggggggccaccctgcccggggcctggaggggcgtgctcttctacctgaagcccaactggcagaagctgctggagactggagtgtggattgatgctgctgcccagatcttcttcagcctgggccctggctttggagtgctgctggcctttgccagctacaacaagttcaacaacaactgctaccaggatgccctggtgacctctgtggtgaactgcatgaccagctttgtgtctggctttgtgatcttcaccgtgctgggctacatggccgagatgagaaatgaagatgtgtctgaggtggccaaggatgctggccccagcctgctcttcatcacctatgcagaggccatcgccaacatgcctgccagcaccttctttgccatcatcttcttcctgatgctgatcaccctgggcctggacagcacctttgctggcctggagggcgtcatcacagctgtgctggatgagttcccccacgtgtgggccaagagaagagaaagatttgtgctggccgtggtgatcacctgcttcttcggcagcctggtgaccctgacctttggaggagcctacgtggtgaagctgctggaggagtatgccactggacctgctgtgctgactgtggccctgattgaagctgtggccgtgtcctggttctacggcatcacccagttctgcagagatgtgaaggagatgctgggcttcagccctggctggttctggaggatctgctgggtggccatcagccccctcttcctgctcttcatcatctgcagcttcctgatgagccccccccagctgcggctcttccagtacaactacccctactggagcatcatcctgggctactgcatcggcaccagcagcttcatctgcatccccacctacatcgcctaccgcctcatcatcaccccaggcaccttcaaggagcgcatcatcaagagcatcaccccagagacccccacagagatcccctgtggggacatccggctgaatgctgtgtag

SEQ ID NO: 170981 - DNA, 1893 bp, synthetic construct; identical to SEQ ID NO: 170979
  misc_feature 1..1893: note = Description of Artificial Sequence: Synthetic coding sequence
  source 1..1893: mol_type = other DNA

SEQ ID NO: 170982 - DNA, 1863 bp, synthetic construct
  misc_feature 1..1863: note = Description of Artificial Sequence: Synthetic coding sequence
  source 1..1863: mol_type = other DNA
atggccaccaaggagaagctgcagtgcctgaaggacttccacaaggacatcctgaagcccagccctgggaagagccctggcaccaggccagaagatgaggccgagggcaagccaccccagcgggagaagtggagcagcaagattgactttgtgctgtctgtggccggcggctttgtgggcctgggcaatgtgtggaggttcccctacctgtgctacaagaatggaggaggagccttcctgatcccctacttcatcttcctgtttggcagcggcctgcctgtgttcttcctggagatcatcatcggccagtacaccagcgagggcggcatcacctgctgggagaagatctgccccctcttctctggaattggctacgcctctgtggtgattgtgtccctgctgaatgtgtactacatcgtcatcctggcctgggccacctactacctgttccagagcttccagaaggagctgccctgggcccactgcaaccacagctggaacaccccccactgcatggaggacaccatgaggaagaacaagtctgtgtggatcaccatcagcagcaccaacttcaccagccctgtgattgagttctgggagagaaatgtgctgagcctgagccctggcatcgaccaccctggcagcctgaagtgggacctggccctgtgcctgctgctggtgtggctggtgtgcttcttctgcatctggaagggcgtgcgcagcacaggcaaggtggtgtacttcaccgccaccttcccctttgccatgctgctggtgctgctggtgcggggcctgaccctgcccggggccggggccggcatcaagttctacctgtacccagacatcacccggctggaggacccccaggtgtggattgatgctggcacccagatcttcttctcctatgccatctgcctgggcgccatgaccagcctgggcagctacaacaagtacaagtacaacagctacagagactgcatgctgctgggctgcctgaacagcggcaccagctttgtgtctggctttgccatcttcagcatcctgggcttcatggcccaggagcagggcgtggacattgctgatgtggccgagagcggccctggcctggccttcatcgcctaccccaaggctgtgaccatgatgcccctgcccaccttctggagcatcctcttcttcatcatgctgctgctgctgggcctggacagccagtttgtggaggtggagggccagatcaccagcctggtggacctgtaccccagcttcctgaggaagggctacagaagagagatcttcatcgcctttgtgtgcagcatctcctacctgctgggcctgaccatggtgacagagggcggcatgtatgtgttccagctgtttgactactatgctgccagcggcgtgtgcctgctgtgggtggccttctttgaatgttttgtgattgcctggatctatggaggagacaacctgtatgatggcatcgaggacatgattggctaccggcccggcccctggatgaagtacagctgggccgtcatcacccctgtgctgtgtgtgggctgcttcatcttcagcctggtgaagtatgtgcccctgacctacaacaagacctacgtgtaccccaactgggccatcggcctgggctggagcctggccctgagctccatgctgtgtgtgcccctggtgattgtcatccggctgtgccagacagagggccccttcctggtgcgggtgaagtacctgctgaccccccgggagcccaaccgctgggccgtggagcgggagggcgccaccccctacaacagcaggacagtgatgaatggagccctggtgaagcccacccacatcatcgtggagaccatgatgtag

SEQ ID NO: 170983 - DNA, 603 bp, synthetic construct
  misc_feature 1..603: note = Description of Artificial Sequence: Synthetic coding sequence
  source 1..603: mol_type = other DNA
atggccaccaaggagaagctgcagtgcctgaaggacttccacaaggacatcctgaagcccagccctgggaagagccctggcaccaggccagaagatgaggccgagggcaagccaccccagcgggagaagtggagcagcaagattgactttgtgctgtctgtggccggcggctttgtgggcctgggcaatgtgtggaggttcccctacctgtgctacaagaatggaggaggagccttcctgatcccctacttcatcttcctgtttggcagcggcctgcctgtgttcttcctggagatcatcatcggccagtacaccagcgagggcggcatcacctgctgggagaagatctgccccctcttctctggaattggctacgcctctgtggtgattgtgtccctgctgaatgtgtactacatcgtcatcctggcctgggccacctactacctgttccagagcttccagaaggagctgccctgggcccactgcaaccacagctggaacaccccccactgcatggaggacaccatgaggaagaacaagtctgtgtggatcaccatcagcagcaccaacttcaccagccctgtgattgagttctgggagtag

SEQ ID NO: 170984 - DNA, 1080 bp, synthetic construct
  misc_feature 1..1080: note = Description of Artificial Sequence: Synthetic coding sequence
  source 1..1080: mol_type = other DNA
atggccaccaaggagaagctgcagtgcctgaaggacttccacaaggacatcctgaagcccagccctgggaagagccctggcaccaggccagaagatgaggccgagggcaagccaccccagcgggagaagtggagcagcaagattgactttgtgctgtctgtggccggcggctttgtgggcctgggcaatgtgtggaggttcccctacctgtgctacaagaatggaggaggagccttcctgatcccctacttcatcttcctgtttggcagcggcctgcctgtgttcttcctggagatcatcatcggccagtacaccagcgagggcggcatcacctgctgggagaagatctgccccctcttctctggaattggctacgcctctgtggtgattgtgtccctgctgaatgtgtactacatcgtcatcctggcctgggccacctactacctgttccagagcttccagaaggagctgccctgggcccactgcaaccacagctggaacaccccccactgcatggaggacaccatgaggaagaacaagtctgtgtggatcaccatcagcagcaccaacttcaccagccctgtgattgagttctgggagagaaatgtgctgagcctgagccctggcatcgaccaccctggcagcctgaagtgggacctggccctgtgcctgctgctggtgtggctggtgtgcttcttctgcatctggaagggcgtgcgcagcacaggcaaggtggtgtacttcaccgccaccttcccctttgccatgctgctggtgctgctggtgcggggcctgaccctgcccggggccggggccggcatcaagttctacctgtacccagacatcacccggctggaggacccccaggtgtggattgatgctggcacccagatcttcttctcctatgccatctgcctgggcgccatgaccagcctgggcagctacaacaagtacaagtacaacagctaccgctcctggccaggcctgcactgcctgcccaagagctgtgacaatgatgctgctgcccacatcctggtgcacagcttcttctactatgccagcctggcctggacaggatag

SEQ ID NO: 170985 - DNA, 330 bp, synthetic construct
  misc_feature 1..330: note = Description of Artificial Sequence: Synthetic coding sequence
  source 1..330: mol_type = other DNA
atggccaccaaggagaagctgcagtgcctgaaggacttccacaaggacatcctgaagcccagccctgggaagagccctggcaccaggccagaagatgaggccgagggcaagccaccccagcgggagaagtggagcagcaagattgactttgtgctgtctgtggccggcggctttgtgggcctgggcaatgtgtggaggttcccctacctgtgctacaagaatggaggaggagccttcctgatcccctacttcatcttcctgtttggcagcggcctgcctgtgttcttcctggagatcatcatcggccagtacaccagcgagggcggctag

SEQ ID NO: 170986 - DNA, 1863 bp, synthetic construct; identical to SEQ ID NO: 170982
  misc_feature 1..1863: note = Description of Artificial Sequence: Synthetic coding sequence
  source 1..1863: mol_type = other DNA

SEQ ID NO: 170987 - DNA, 1080 bp, synthetic construct; identical to SEQ ID NO: 170984
  misc_feature 1..1080: note = Description of Artificial Sequence: Synthetic coding sequence
  source 1..1080: mol_type = other DNA

SEQ ID NO: 170988 - DNA, 1905 bp, synthetic construct
  misc_feature 1..1905: note = Description of Artificial Sequence: Synthetic coding sequence
  source 1..1905: mol_type = other DNA
atggtgcggctggtgctgcccaaccctggcctggatgcccgcatccccagcctggccgagctggagaccatcgagcaggaggaggccagcagccggcccaagtgggacaacaaggcccagtacatgctgacctgcctgggcttctgtgtgggcctgggcaatgtgtggaggttcccctacctgtgccagagccatggaggaggagccttcatgatccccttcctgatcctgctggtgctggagggcatccccctgctgtacctggagtttgccatcggccagaggctgcggcggggcagcctgggcgtgtggagcagcatccacccagccctgaagggcctgggcctggcctccatgctgaccagcttcatggtgggcctgtactacaacaccatcatctcctggatcatgtggtacctgttcaacagcttccaggagcccctgccctggagcgactgccccctgaatgaaaaccagacaggctacgtggatgaatgtgcccggagcagccctgtggactacttctggtaccgggagaccctgaacatcagcaccagcatcagtgacagcggcagcatccagtggtggatgctgctgtgcctggcctgtgcctggagcgtgctgtacatgtgcaccatccggggcatcgagaccaccgggaaggctgtgtacatcaccagcaccctgccctacgtggtgctgaccatcttcctgatccggggcctgaccctgaagggggccaccaatggaattgtgttcctgttcacccccaacgtgacagagctggcccagcctgacacctggctggatgctggggcccaggtgttcttctccttcagcctggcctttggaggcctcatctccttcagcagctacaacagcgtgcacaacaactgtgagaaggacagcgtgattgtgtccatcatcaatggcttcacctctgtgtatgtggccatcgtggtgtacagcgtgattggcttccgggccacccagagatatgatgactgcttcagcaccaacatcctgaccctcatcaatggatttgacctgcctgagggcaatgtgacccaggagaactttgtggacatgcagcagcgctgcaatgccagtgaccctgctgcctatgcccagctggtgttccagacctgtgacatcaatgccttcctgtctgaggccgtggagggcaccggcctggccttcatcgtgttcacagaggccatcaccaagatgcccctgagccccctgtggagcgtgctcttcttcatcatgctgttctgcctgggcctgagctccatgtttggaaacatggagggcgtggtggtgcccctgcaggacctgcgggtcatcccccccaagtggcccaaggaggtgctgaccggcctcatctgcctgggcaccttcctgattggcttcatcttcaccctgaacagcggccagtactggctgagcctgctggacagctatgccggcagcatccccctgctgatcatcgccttctgtgagatgttttctgtggtgtatgtgtatggagtggaccgcttcaacaaggacatcgagttcatgattggccacaagcccaacatcttctggcaggtgacctggagggtggtgagccccctgctgatgctgatcatcttcctgttcttctttgtggtggaggtgtcccaggagctgacctacagcatctgggaccccggctatgaggagttccccaagagccagaagatctcctaccccaactgggtgtatgtggtggtggtgattgtggccggcgtgcccagcctgaccatccctggctacgccatctacaagctgatccggaaccactgccagaagccaggggaccaccagggcctggtgtccaccctgagcacagcctccatgaatggagacctgaagtactag

SEQ ID NO: 170989 - DNA, 1668 bp, synthetic construct
  misc_feature 1..1668: note = Description of Artificial Sequence: Synthetic coding sequence
  source 1..1668: mol_type = other DNA
atggagaaggcccggcccctgtgggccaacagcctgcagtttgtgtttgcctgcatctcctatgctgtgggcctgggcaatgtgtggaggttcccctacctgtgccagatgtatggaggcggcagcttcctggtgccctacatcatcatgctgattgtggagggcatgcccctgctgtacctggagctggccgtgggccagaggatgaggcagggcagcatcggggcctggaggaccatcagcccctacctgtctggagtgggcgtggcctctgtggtggtgtccttcttcctgtccatgtactacaacgtcatcaatgcctgggccttctggtacctgttccacagcttccaggaccccctgccctggagcgtgtgccccctgaatggaaaccacacaggctatgatgaggagtgtgagaaggccagcagcacccagtacttctggtacaggaagaccctgaacatcagccccagcctgcaggagaatggaggagtgcagtgggagcccgccctgtgcctgctgctggcctggctggtggtgtacctgtgcatcctgcggggcacagagagcacaggcaagattgagcagctggccaaccccaaggcctggatcaatgctgccacccagatcttcttcagcctgggcctgggcttcggcagcctgattgcctttgccagctacaatgagcccagcaacaactgccagaagcacgccatcatcgtgtccctcatcaacagcttcaccagcatctttgccagcatcgtgaccttcagcatctacggcttcaaggccaccttcaactatgagaactgcctgaagaaggtgtccctgctgctgaccaacacctttgacctggaggatggcttcctgacagccagcaacctggagcaggtgaagggctacctggccagcgcctaccccagcaagtacagcgagatgttcccccagatcaagaactgcagcctggagagcgagctggacacagctgtgcagggcaccggcctggccttcatcgtgtacacagaggccatcaagaacatggaggtgtcccagctgtggagcgtgctgtacttcttcatgctgctgatgctgggcatcggctccatgctgggcaacacagctgccatcctgacccccctgacagacagcaagatcatcagcagccacctgcccaaggaggccatcagcggcctggtgtgcctggtgaactgtgccatcggcatggtgttcaccatggaggccggcaactactggtttgacatcttcaatgactatgctgccaccctgagcctgctgctgattgtgctggtggagaccatcgctgtgtgctacgtgtatggcctgcggagatttgaaagtgacctgaaggccatgacaggccgggctgtgtcctggtactggaaggtgatgtgggccggcgtgagccccctgctgattgtgtccctgtttgtgttctacctgagtgactacatcctgaccggcaccctgaagtaccaggcctgggatgccagccagggccagctggtgaccaaggactacccagcctatgccctggccgtcatcggcctgctggtggccagcagcaccatgtgcatccccctggccgccctgggcacctttgtgcagaggcggctgaagagaggagatgctgaccctgtggcctag

SEQ ID NO: 170990 - DNA, 1779 bp, synthetic construct
  misc_feature 1..1779: note = Description of Artificial Sequence: Synthetic coding sequence
  source 1..1779: mol_type = other DNA
atggagaaggcccggcccctgtgggccaacagcctgcagtttgtgtttgcctgcatctcctatgctgtgggcctgggcaatgtgtggaggttcccctacctgtgccagatgtatggaggcggcagcttcctggtgccctacatcatcatgctgattgtggagggcatgcccctgctgtacctggagctggccgtgggccagaggatgaggcagggcagcatcggggcctggaggaccatcagcccctacctgtctggagtgggcgtggcctctgtggtggtgtccttcttcctgtccatgtactacaacgtcatcaatgcctgggccttctggtacctgttccacagcttccaggaccccctgccctggagcgtgtgccccctgaatggaaaccacacaggctatgatgaggagtgtgagaaggccagcagcacccagtacttctggtacaggaagaccctgaacatcagccccagcctgcaggagaatggaggagtgcagtgggagcccgccctgtgcctgctgctggcctggctggtggtgtacctgtgcatcctgcggggcacagagagcacaggcaaggtggtgtacttcaccgccagcctgccctactgtgtgctgatcatctacctgatccggggcctgaccctgcacggggccaccaacggcctgatgtacatgttcacccccaagattgagcagctggccaaccccaaggcctggatcaatgctgccacccagatcttcttcagcctgggcctgggcttcggcagcctcatcgcctttgccagctacaatgagcccagcaacaactgccagaagcacgccatcatcgtgtccctcatcaacagcttcaccagcatctttgccagcatcgtgaccttcagcatctacggcttcaaggccaccttcaactatgagaactgcctgaagaaggtgtccctgctgctgaccaacacctttgacctggaggatggcttcctgacagccagcaacctggagcaggtgaagggctacctggccagcgcctaccccagcaagtacagcgagatgttcccccagatcaagaactgcagcctggagagcgagctggacacagctgtgcagggcaccggcctggccttcatcgtgtacacagaggccatcaagaacatggaggtgtcccagctgtggagcgtgctgtacttcttcatgctgctgatgctgggcatcggctccatgctgggcaacacagctgccatcctgacccccctgacagacagcaagatcatcagcagccacctgcccaaggaggccatcagcggcctggtgtgcctggtgaactgtgccatcggcatggtgttcaccatggaggccggcaactactggtttgacatcttcaatgactatgctgccaccctgagcctgctgctgattgtgctggtggagaccatcgctgtgtgctacgtgtatggcctgcggagatttgaaagtgacctgaaggccatgacaggccgggctgtgtcctggtactggaaggtgatgtgggccggcgtgagccccctgctgattgtgtccctgtttgtgttctacctgagtgactacatcctgaccggcaccctgaagtaccaggcctgggatgccagccagggccagctggtgaccaaggactacccagcctatgccctggccgtgattggcctgctggtggccagcagcaccatgtgcatccccctggccgccctgggcacctttgtgcagaggcggctgaagagaggagatgctgaccctgtggcctag

SEQ ID NO: 170991 - DNA, 1644 bp, synthetic construct
  misc_feature 1..1644: note = Description of Artificial Sequence: Synthetic coding sequence
  source 1..1644: mol_type = other DNA
atggagaaggcccggcccctgtgggccaacagcctgcagtttgtgtttgcctgcatctcctatgctgtgggcctgggcaatgtgtggaggttcccctacctgtgccagatgtatggaggcggcagcttcctggtgccctacatcatcatgctgattgtggagggcatgcccctgctgtacctggagctggccgtgggccagaggatgaggcagggcagcatcggggcctggaggaccatcagcccctacctgtctggagtgggcgtggcctctgtggtggtgtccttcttcctgtccatgtactacaacgtcatcaatgcctgggccttctggtacctgttccacagcttccaggaccccctgccctggagcgtgtgccccctgaatggaaaccacacaggctatgatgaggagtgtgagaaggccagcagcacccagtacttctggtacaggaagaccctgaacatcagccccagcctgcaggagaatggaggagtgcagtgggagcccgccctgtgcctgctgctggcctggctggtggtgtacctgtgcatcctgcggggcacagagagcacaggcaaggtggtgtacttcaccgccagcctgccctactgtgtgctgatcatctacctgatccggggcctgaccctgcacggggccaccaacggcctgatgtacatgttcacccccaagattgagcagctggccaaccccaaggcctggatcaatgctgccacccagatcttcttcagcctgggcctgggcttcggcagcctcatcgcctttgccagctacaatgagcccagcaacaactgccagaagcacgccatcatcgtgtccctcatcaacagcttcaccagcatctttgccagcatcgtgaccttcagcatctacggcttcaaggccaccttcaactatgagaactgcctgaagaaggtgtccctgctgctgaccaacacctttgacctggaggatggcttcctgacagccagcaacctggagcaggtgaagggctacctggccagcgcctaccccagcaagtacagcgagatgttcccccagatcaagaactgcagcctggagagcgagctggacacagctgtgcagggcaccggcctggccttcatcgtgtacacagaggccatcaagaacatggaggtgtcccagctgtggagcgtgctgtacttcttcatgctgctgatgctgggcatcggctccatgctgggcaacacagctgccatcctgacccccctgacagacagcaagatcatcagcagccacctgcccaaggaggccatcagcggcctggtgtgcctggtgaactgtgccatcggcatggtgttcaccatggaggccggcaactactggtttgacatcttcaatgactatgctgccaccctgagcctgctgctgattgtgctggtggagaccatcgctgtgtgctacgtgtatggcctgcggagatttgaaagtgacctgaaggccatgacaggccgggctgtgtcctggtactggaaggtgatgtgggccggcgtgagccccctgctgattgtgtccctgtttgtgttctacctgagtgactacatcctgaccggcaccctgaagtaccaggcctgggatgccagccaggatgacaagctgtag

SEQ ID NO: 170992 - DNA, 1194 bp, synthetic construct
  misc_feature 1..1194: note = Description of Artificial Sequence: Synthetic coding sequence
  source 1..1194: mol_type = other DNA
atggcccacgcccctgagccagaccctgctgcctgtgacctgggagatgagcggcccaagtgggacaacaaggcccagtacctgctgagctgcaccggctttgctgtgggcctgggcaacatctggaggttcccctacctgtgccagacctatggaggaggagccttcctgatcccctacgtgattgccctggtgtttgagggcatccccatcttccacgtggagctggccatcggccagaggctgaggaagggctctgtgggcgtgtggacagccatcagcccctacctgagcggcgtgggcctgggctgtgtgaccctgtccttcctgatcagcctgtactacaacaccatcgtggcctgggtgctgtggtacctgctgaacagcttccagcaccccctgccctggagcagctgccccccagacctgaacagaacaggctttgtggaggagtgccagggcagcagcgctgtgtcctacttctggtaccggcagaccctgaacatcacagctgacatcaatgacagcggcagcatccagtggtggctgctgatctgcctggccgcctcctgggccgtggtgtacatgtgtgtgatccggggcatcgagaccaccgggaaggtgatctacttcaccgccctcttcccctacctggtgctgaccatcttcctgatccggggcctgaccctgcccggggccaccaagggcctcatctacctgttcacccccaacaacccccgggtgtggctggatgctgccacccagatcttcttcagcctgagcctggccttcggcggccacatcgcctttgccagctacaacagccccagaaatgactgccagaaggatgctgtggtgattgccctggtgaacaggatgaccagcctgtatgccagcattgctgtgttttctgtgctgggcgccagcggccctggcctggcctttgtggtgttcacagaaacagacctgcacatgcctggggcccctgtgtgggccatgctgttcttcggcatgctgttcaccctgggcctgagcaccatgtttggcaccgtggaggccgtcatcacccccctgctggacagcggcaactactggctggagatctttgacaactttgctgccagccccaacctgctgatgctggccttcctggaggtggtgggcgtggtgtatgtgtatggcatgaagaggtag

SEQ ID NO: 170993 - DNA, 1887 bp, synthetic construct
  misc_feature 1..1887: note = Description of Artificial Sequence: Synthetic coding sequence
  source 1..1887: mol_type = other DNA
atggcccacgcccctgagccagaccctgctgcctgtgacctgggagatgagcggcccaagtgggacaacaaggcccagtacctgctgagctgcaccggctttgctgtgggcctgggcaacatctggaggttcccctacctgtgccagacctatggaggaggagccttcctgatcccctacgtgattgccctggtgtttgagggcatccccatcttccacgtggagctggccatcggccagaggctgaggaagggctctgtgggcgtgtggacagccatcagcccctacctgagcggcgtgggcctgggctgtgtgaccctgtccttcctgatcagcctgtactacaacaccatcgtggcctgggtgctgtggtacctgctgaacagcttccagcaccccctgccctggagcagctgccccccagacctgaacagaacaggctttgtggaggagtgccagggcagcagcgctgtgtcctacttctggtaccggcagaccctgaacatcacagctgacatcaatgacagcggcagcatccagtggtggctgctgatctgcctggccgcctcctgggccgtggtgtacatgtgtgtgatccggggcatcgagaccaccgggaaggtgatctacttcaccgccctcttcccctacctggtgctgaccatcttcctgatccggggcctgaccctgcccggggccaccaagggcctcatctacctgttcacccccaacatgcacatcctgcagaacccccgggtgtggctggatgctgccacccagatcttcttcagcctgagcctggcctttggaggccacatcgcctttgccagctacaacagccccagaaatgactgccagaaggatgctgtggtgattgccctggtgaacaggatgaccagcctgtatgccagcattgctgtgttttctgtgctgggcttcaaggccaccaatgactatgagcactgcctggacaggaacatcctgagcctcatcaatgactttgacttccctgagcagagcatcagcagagatgactacccagctgtgctgatgcacctgaatgccacctggcccaagagggtggcccagctgcccctgaaggcctgcctgctggaggacttcctggacaagagcgccagcggccctggcctggcctttgtggtgttcacagaaacagacctgcacatgcctggggcccctgtgtgggccatgctgttcttcggcatgctgttcaccctgggcctgagcaccatgtttggaacagtggaggccgtcatcacccccctgctggatgtgggcgtgctgccccgctgggtgcccaaggaggccctgaccggcctggtgtgcctggtgtgcttcctgagcgccacctgcttcaccctgcagagcggcaactactggctggagatctttgacaactttgctgccagccccaacctgctgatgctggccttcctggaggtggtgggcgtggtgtatgtgtatggcatgaagcgcttctgtgatgacatcgcctggatgacaggccggcggcccagcccctactggaggctgacctggagggtggtgagccccctgctgctgaccatctttgtggcctacatcatcctgctcttctggaagcccctgcgctacaaggcctggaaccccaagtatgagctgttccccagccggcaggagaagctgtacccaggctgggcccgggccgcctgtgtgctgctgagcctgctgcctgtgctgtgggtgcctgtggccgccctggcccagctgctgaccaggagaagaaggacctggagggacagagatgcccggccagacacagacatgaggccagacacagacaccaggccagacacagacatgaggccagacacagacatgaggtag

SEQ ID NO: 170994 - DNA, 1548 bp, synthetic construct
  misc_feature 1..1548: note = Description of Artificial Sequence: Synthetic coding sequence
  source 1..1548: mol_type = other DNA
atggaggcccgggagcccggccggcccacccccacctaccacctggtgcccaacaccagccagagccaggtggaggaggatgtgagcagccccccccagaggagcagcgagaccatgcagctgaagaaggagatcagcctgctgaatggagtgtccctggtggtgggcaacatgattggcagcggcatctttgtgagccccaagggcgtgctggtgcacacagccagctatggcatgagcctcatcgtgtgggccatcggcggcctcttctctgtggtgggcgccctgtgctacgccgagctgggcaccaccatcaccaagagcggggccagctatgcctacatcctggaggcctttggaggcttcatcgccttcatccggctgtgggtgtccctgctggtggtggagcccaccggccaggccatcatcgccatcacctttgccaactacatcatccagcccagcttccccagctgtgaccccccctacctggcctgccgcctgctggccgccgcctgcatctgcctgctgacctttgtgaactgtgcctacgtgaagtggggcaccagggtgcaggacaccttcacctacgccaaggtggtggccctgattgccatcatcgtgatgggcctggtgaagctgtgccagggccacagcgagcacttccaggatgcctttgagggcagctcctgggacatgggcaacctgagcctggccctgtacagcgccctcttctcctacagcggctgggacaccctgaactttgtgacagaggagatcaagaaccctgagaggaacctgcccctggccatcggcatctccatgcccatcgtgaccctcatctacatcctgaccaacgtggcctactacacagtgctgaacatcagtgatgtgctgagcagtgatgctgtggccgtgacctttgctgaccagaccttcggcatgttctcctggaccatccccatcgctgtggccctgagctgctttggaggcctgaatgccagcatctttgccagcagccgcctcttctttgtgggcagccgggagggccacctgcctgacctgctgtccatgatccacatcgagcgcttcacccccatcccagccctgctcttcaactgcaccatggccctgatctacctgattgtggaggatgtgttccagctgatcaactacttctccttctcctactggttctttgtgggcctgtctgtggtgggccagctgtacctgcgctggaaggagcccaagaggccccggcccctgaagctgtctgtgttcttccccatcgtgttctgcatctgcagcgtcttcctggtgattgtgcccctcttcacagacaccatcaacagcctgattggaattggaattgccctgagcggcgtgcccttctacttcatgggcgtgtacctgcctgagagcagaagacccctcttcatcagaaatgtgctggccgccatcacccggggcacccagcagctgtgcttctgtgtgctgacagagctggatgtggccgaggagaagaaggatgagaggaagacagactag

SEQ ID NO: 170995 - DNA, 1524 bp, synthetic construct
  misc_feature 1..1524: note = Description of Artificial Sequence: Synthetic coding sequence
  source 1..1524: mol_type = other DNA
atggccggggccggccccaagaggcgggccctggccgccccagctgctgaggagaaggaggaggcccgggagaagatgctggccgccaagtctgcagatggcagcgccccagctggggagggggagggcgtgaccctgcagaggaacatcaccctgctgaatggagtggccatcatcgtgggcaccatcatcggcagcggcatctttgtgacccccactggagtgctgaaggaggccggcagccctggcctggccctggtggtgtgggccgcctgtggggtcttcagcatcgtgggcgccctgtgctacgccgagctgggcaccaccatcagcaagtctggaggagactatgcctacatgctggaggtgtatggcagcctgcctgccttcctgaagctgtggattgagctgctgatcatccggcccagcagccagtacatcgtggccctggtgtttgccacctacctgctgaagcccctcttccccacctgccctgtgcctgaggaggccgccaagctggtggcctgcctgtgtgtgctgctgctgacagctgtgaactgctacagcgtgaaggccgccaccagggtgcaggatgcctttgctgctgccaagctgctggccctggccctgatcatcctgctgggctttgtgcagattggaaaaggagatgtgagcaacctggaccccaacttctcctttgagggcaccaagctggatgtgggcaacatcgtgctggccctgtacagcggcctgtttgcctacggcggctggaactacctgaactttgtgacagaggagatgatcaacccctacagaaacctgcccctggccatcatcatcagcctgcccatcgtgaccctggtgtatgtgctgaccaacctggcctacttcaccaccctgagcacagagcagatgctgagcagcgaggccgtggccgtggactttggaaactaccacctgggcgtgatgtcctggatcatccctgtgtttgtgggcctgagctgcttcggctctgtgaatggcagcctcttcaccagcagccgcctcttctttgtgggcagccgggagggccacctgcccagcatcctgtccatgatccacccccagctgctgacccctgtgcccagcctggtgttcacctgtgtgatgaccctgctgtatgccttcagcaaggacatcttcagcgtcatcaacttcttctccttcttcaactggctgtgtgtggccctggccatcatcggcatgatctggctgcggcacaggaagccagagctggagcggcccatcaaggtgaacctggccctgcccgtcttcttcatcctggcctgcctcttcctgattgctgtgtccttctggaagacccctgtggagtgtggcatcggcttcaccatcatcctgagcggcctgcctgtgtacttcttcggcgtgtggtggaagaacaagcccaagtggctgctgcagggcatcttcagcaccaccgtgctgtgccagaagctgatgcaggtggtgccccaggagacctag

SEQ ID NO: 170996 - DNA, 846 bp, synthetic construct
  misc_feature 1..846: note = Description of Artificial Sequence: Synthetic coding sequence
  source 1..846: mol_type = other DNA
atgagccacggcacctactatgaatgtgagccccggggcggccagcagcccctggagttcagcggcggccgggccggccctggagagctgggggacatgtgtgagcacgaggccagcattgacctgagcgcctacatcgagagcggggaggagcagctgctgagtgacctgtttgctgtgaagccagcccctgaggcccggggcctgaagggccctggcaccccagccttcccccactacctgcccccagacccccggccctttgcctacccaccccacacctttggaccagacaggaaggccctgggccctggcatctacagcagccctggcagctatgaccccagggctgtggccgtgaaggaggagccccggggccctgagggcagccgggccgccagccggggcagctacaaccccctgcagtaccaggtggcccactgcggccagacagccatgcacctgccccccaccctggccgcccctggccagcccctgcgggtgctgaaggcccccctggccacagctgccccaccctgcagccccctgctgaaggcccccagccctgctggccccctgcacaagggcaagaaggctgtgaacaaggacagcctggagtaccgcctgcggcgggagaggaacaacattgctgtgaggaagagccgggacaaggccaagaggcgcatcctggagacccagcagaaggtgctggagtacatggccgagaatgaaaggctgcggagccgggtggagcagctgacccaggagctggacaccctgaggaacctcttccggcagatccctgaggccgccaacctgatcaagggcgtgggcggctgcagctag

SEQ ID NO: 170997 - DNA, 1608 bp, synthetic construct
  misc_feature 1..1608: note = Description of Artificial Sequence: Synthetic coding sequence
  source 1..1608: mol_type = other DNA
atggaggagggcgcccggcacaggaacaacacagagaagaagcaccctgggggcggggagagtgatgccagccctgaggccggcagcggcggcggcggcgtggccctgaagaaggagatcggcctggtgtctgcctgtggcatcatcgtgggcaacatcatcggcagcggcatctttgtgagccccaagggcgtgctggagaatgccggctctgtgggcctggccctgattgtgtggatcgtgacaggcttcatcaccgtggtgggcgccctgtgctacgccgagctgggcgtgaccatccccaagtctggaggagactacagctatgtgaaggacatctttggaggcctggccggcttcctgcggctgtggattgctgtgctggtgatctaccccaccaaccaggccgtcatcgccctgaccttcagcaactacgtgctgcagcccctcttccccacctgcttccccccagagagcggcctgcggctgctggccgccatctgcctgctgctgctgacctgggtgaactgcagctctgtgcgctgggccaccagggtgcaggacatcttcaccgctgggaagctgctggccctggccctgatcatcatcatgggcatcgtgcagatctgcaagggggagtacttctggctggagcccaagaatgcctttgagaacttccaggagccagacatcggcctggtggccctggccttcctgcagggcagctttgcctatggaggctggaacttcctgaactacgtgacagaggagctggtggacccctacaagaacctgccccgggccatcttcatcagcatccccctggtgacctttgtgtatgtgtttgccaacgtggcctacgtgacagccatgagcccccaggagctgctggccagcaatgctgtggccgtgaccttcggggagaagctgctgggcgtgatggcctggatcatgcccatctctgtggccctgagcacctttggaggagtgaatggcagcctcttcaccagcagccgcctcttctttgctggggcccgggagggccacctgcccagcgtgctggccatgatccacgtgaagcgctgcacccccatcccagccctgctcttcacctgcatcagcaccctgctgatgctggtgaccagtgacatgtacaccctcatcaactacgtgggcttcatcaactacctgttctatggagtgacagtggccggccagatcgtgctgcgctggaagaagccagacatcccccggcccatcaagatcaacctgctcttccccatcatctacctgctcttctgggccttcctgctggtgttcagcctgtggagcgagcctgtggtgtgtggcatcggcctggccatcatgctgactggagtgcctgtgtacttcctgggcgtgtactggcagcacaagcccaagtgcttcagtgacttcatcgagctgctgaccctggtgtcccagaagatgtgtgtggtggtgtacccagaggtggagcggggcagcggcacagaggaggccaatgaagacatggaggagcagcagcagcccatgtaccagcccacccccaccaaggacaaggatgtggccggccagccccagccctag

SEQ ID NO: 170998 - DNA, 633 bp, synthetic construct
  misc_feature 1..633: note = Description of Artificial Sequence: Synthetic coding sequence
  source 1..633: mol_type = other DNA
atgggcatcgtgcagatctgcaagggggagtacttctggctggagcccaagaatgcctttgagaacttccaggagccagacatcggcctggtggccctggccttcctgcagggcagctttgcctacggcggctggaacttcctgaactacgtgacagaggagctggtggacccctacaagaacctgccccgggccatcttcatcagcatccccctggtgacctttgtgtatgtgtttgccaacgtggcctacgtgacagccatgagcccccaggagctgctggccagcaatgctgtggccgtgacctttggagagaagctgctgggcgtgatggcctggatcatgcccatctctgtggccctgagcaccttcggcggcgtgaatggcagcctgcacctgctgtctgctgtgctgcgctggagcccccggggcccccccagccagtgtgtgggccatgacccccgggaggccctgcaccccaaccccagccctgccctgcacatgcacctgcacccagcagatgctggccaccagagacatgtgcacacccaccagctgtgtggcctgcaccagctgcccctgctgtggggccacggctgctggacagacagccccagcctggaggaggcctag

SEQ ID NO: 170999 - DNA, 693 bp, synthetic construct
  misc_feature 1..693: note = Description of Artificial Sequence: Synthetic coding sequence
  source 1..693: mol_type = other DNA
tgatgcctgcaggagcacagccagcccagccagctgctgtgcaccctgctgctgtgctggtgtgtgctgggccgggagcggcccttcaggaaggcccagagcaccagcagccccctggagggcgtgccccgcttcctgaagaggctgctgctgacctgggtgaactgcagctctgtgcgctgggccaccagggtgcaggacatcttcaccgctgggaagctgctggccctggccctgatcatcatcatgggcatcgtgcagatctgcaagggggagtacttctggctggagcccaagaatgcctttgagaacttccaggagccagacatcggcctggtggccctggccttcctgcagggcagctttgcctacggcggctggaacttcctgaactacgtgacagaggagctggtggacccctacaagctgttctttgctggggcccgggagggccacctgcccagcgtgctggccatgattcatgtgaagcgctgcacccccatcccagccctgctcttcacctgcatcagcaccctgctgatgctggtgaccagtgacatgtacaccctcatcaactacgtgggcttcatcaactacctgttctacggcgtgacagtggccggccagatcgtgctgcgctggaagaagccagacatcccccggcccatcaagcccctgccctaccagggctag

SEQ ID NO: 171000 - DNA, 936 bp, synthetic construct
  misc_feature 1..936: note = Description of Artificial Sequence: Synthetic coding sequence
  source 1..936: mol_type = other DNA
atgggccagctgttccagtgtgctgtgggccaccctggcagccgccacctgcacagctgggaggcccctggcctgggccctgactaccaccacggggactgcacagacatgcagaggaacctgccccgggccatcttcatcagcatccccctggtgacctttgtgtatgtgtttgccaacgtggcctacgtgacagccatgagcccccaggagctgctggccagcaatgctgtggccgtgaccttcggggagaagctgctgggcgtgatggcctggatcatgcccatctctgtggccctgagcacctttggaggagtgaatggcagcctcttcaccagcagccgcctcttctttgctggggcccgggagggccacctgcccagcgtgctggccatgatccacgtgaagcgctgcacccccatcccagccctgctcttcacctgcatcagcaccctgctgatgctggtgaccagtgacatgtacaccctcatcaactacgtgggcttcatcaactacctgttctatggagtgacagtggccggccagatcgtgctgcgctggaagaagccagacatcccccggcccatcaagatcaacctgctcttccccatcatctacctgctcttctgggccttcctgctggtgttcagcctgtggagcgagcctgtggtgtgtggcatcggcctggccatcatgctgactggagtgcctgtgtacttcctgggcgtgtactggcagcacaagcccaagtgcttcagtgacttcatcgagctgctgaccctggtgtcccagaagatgtgtgtggtggtgtacccagaggtggagcggggcagcggcacagaggaggccaatgaagacatggaggagcagcagcagcccatgtaccagcccacccccaccaaggacaaggatgtggccggccagccccagccctag

SEQ ID NO: 171001 - DNA, 999 bp, synthetic construct
  misc_feature 1..999: note = Description of Artificial Sequence: Synthetic coding sequence
  source 1..999: mol_type = other DNA
atgggcatcgtgcagatctgcaagggggagtacttctggctggagcccaagaatgcctttgagaacttccaggagccagacatcggcctggtggccctggccttcctgcagggcagctttgcctacggcggctggaacttcctgaactacgtgacagaggagctggtggacccctacaagaacctgccccgggccatcttcatcagcatccccctggtgacctttgtgtatgtgtttgccaacgtggcctacgtgacagccatgagcccccaggagctgctggccagcaatgctgtggccgtgacctttggagagaagctgctgggcgtgatggcctggatcatgcccatctctgtggccctgagcaccttcggcggcgtgaatggcagcctcttcaccagcagccgcctcttctttgctggggcccgggagggccacctgcccagcgtgctggccatgattcatgtgaagcgctgcacccccatcccagccctgctcttcacctgcatcagcaccctgctgatgctggtgaccagtgacatgtacaccctcatcaactacgtgggcttcatcaactacctgttctacggcgtgacagtggccggccagatcgtgctgcgctggaagaagccagacatcccccggcccatcaagatcaacctgctcttccccatcatctacctgctcttctgggccttcctgctggtgttcagcctgtggagcgagcctgtggtgtgtggcatcggcctggccatcatgctgactggagtgcctgtgtacttcctgggcgtgtactggcagcacaagcccaagtgcttcagtgacttcatcgagctgctgaccctggtgtcccagaagatgtgtgtggtggtgtacccagaggtggagcggggcagcggcacagaggaggccaatgaagacatggaggagcagcagcagcccatgtaccagcccacccccaccaaggacaaggatgtggccggccagccccagccctag

SEQ ID NO: 171002 - DNA, 285 bp, synthetic construct
  misc_feature 1..285: note = Description of Artificial Sequence: Synthetic coding sequence
  source 1..285: mol_type = other DNA
atggaggagggcgcccggcacaggaacaacacagagaagaagcaccctgggggcggggagagtgatgccagccctgaggccggcagcggcggcggcggcgtggccctgaagaaggagatcggcctggtgtctgcctgtggcatcatcgtgggcaacatcatcggcagcggcatctttgtgagccccaagggcgtgctggagaatgccggctctgtgggcctggccctgattgtgtggatcgtgacaggcttcatcaccgtggtgggcgccctgtgctacgcctag

SEQ ID NO: 171003 - DNA, 237 bp, synthetic construct
  misc_feature 1..237: note = Description of Artificial Sequence: Synthetic coding sequence
  source 1..237: mol_type = other DNA
atggaggagggcgcccggcacaggaacaacacagagaagaagcaccctgggggcggggagagtgatgccagccctgaggccggcagcggcggcggcggcgtggccctgaagaaggagatcggcctggtgtctgcctgtggcatcatcgtgggcaacatcatcggcagcggcatctttgtgagccccaagggcgtgctggagaatgccggctctgtgggcctggccctgattgtgtag

SEQ ID NO: 171004 - DNA, 1293 bp, synthetic construct
  misc_feature 1..1293: note = Description of Artificial Sequence: Synthetic coding sequence
  source 1..1293: mol_type = other DNA
atgggccagtatggccaggagctgtcctggaagtgcctggtgaaggctgtgtgcctgcaggagcacagccagcccagccagctgctgtgcaccctgctgctgtgctggtgtgtgctgggccgggagcggcccttcaggaaggcccagagcaccagcagccccctggagggcgtgccccgcttcctgaagaggctgctgctgacctgggtgaactgcagctctgtgcgctgggccaccagggtgcaggacatcttcaccgctgggaagctgctggccctggccctgatcatcatcatgggcatcgtgcagatctgcaagggggagtacttctggctggagcccaagaatgcctttgagaacttccaggagccagacatcggcctggtggccctggccttcctgcagggcagctttgcctacggcggctggaacttcctgaactacgtgacagaggagctggtggacccctacaagaacctgccccgggccatcttcatcagcatccccctggtgacctttgtgtatgtgtttgccaacgtggcctacgtgacagccatgagcccccaggagctgctggccagcaatgctgtggccgtgacctttggagagaagctgctgggcgtgatggcctggatcatgcccatctctgtggccctgagcaccttcggcggcgtgaatggcagcctcttcaccagcagccgcctcttctttgctggggcccgggagggccacctgcccagcgtgctggccatgattcatgtgaagcgctgcacccccatcccagccctgctcttcacctgcatcagcaccctgctgatgctggtgaccagtgacatgtacaccctcatcaactacgtgggcttcatcaactacctgttctacggcgtgacagtggccggccagatcgtgctgcgctggaagaagccagacatcccccggcccatcaagatcaacctgctcttccccatcatctacctgctcttctgggccttcctgctggtgttcagcctgtggagcgagcctgtggtgtgtggcatcggcctggccatcatgctgactggagtgcctgtgtacttcctgggcgtgtactggcagcacaagcccaagtgcttcagtgacttcatcgagctgctgaccctggtgtcccagaagatgtgtgtggtggtgtacccagaggtggagcggggcagcggcacagaggaggccaatgaagacatggaggagcagcagcagcccatgtaccagcccacccccaccaaggacaaggatgtggccggccagccccagccctag

SEQ ID NO: 171005 - DNA, 1968 bp, synthetic construct
  misc_feature 1..1968: note = Description of Artificial Sequence: Synthetic coding sequence
  source 1..1968: mol_type = other DNA
atggtgctgtacaccacccccttccccaacagctgcctgagcgccctgcactgtgtgtcctgggccctgatcttcccctgctactggctggtggaccggctggccgccagcttcatccccaccacctatgagaagaggcagagagcagatgacccctgctgcctgcagctgctgtgcacagccctcttcacccccatctacctggccctgctggtggccagcctgccctttgccttcctgggcttcctgttctggagccccctgcagagcgcccggcggccctacatctacagccggctggaggacaagggcctggccggcggggccgccctgctgtctgagtggaagggcaccggccctgggaagagcttctgctttgccacagccaacgtgtgcctgctgcctgacagcctggcccgggtgaacaacctcttcaacacccaggcccgggccaaggagatcggccagaggatcagaaatggagctgcccggccccagatcaagatctacatcgacagccccaccaacaccagcatctctgctgccagcttcagcagcctggtgagcccccagggcggagatggagtggcccgggctgtgcccggcagcatcaagaggacagcctctgtggagtacaagggagatggcggccgccaccctggagatgaggccgccaacggccctgccagcggggaccctgtggacagcagcagcccagaagatgcctgcatcgtgagaattggaggagaggagggcggccggcccccagaggctgatgatcctgtgcctgggggccaggccagaaatggagctgggggcggcccccggggccagacccccaaccacaaccagcaggatggagacagcggcagcctgggcagccccagcgccagccgggagagcctggtgaagggccgggccggccctgacaccagcgccagcggggagcccggggccaacagcaagctgctgtacaaggcctctgtggtgaagaaggccgccgccaggagaagaagacacccagatgaggcctttgaccacgaggtgtctgccttcttccctgccaacctggacttcctgtgcctgcaggaggtgtttgacaagagagctgccaccaagctgaaggagcagctgcacggctactttgagtacatcctgtatgatgtgggcgtgtatggctgccagggctgctgcagcttcaagtgcctgaacagcggcctgctgtttgccagccgctaccccatcatggatgtggcctaccactgctaccccaacaagtgcaatgatgatgccctggccagcaaaggagccctcttcctgaaggtgcaggtgggcagcaccccccaggaccagagaattgtgggctacatcgcctgcacccacctgcacgccccccaggaggacagcgccatccgctgtggccagctggacctgctgcaggactggctggccgacttcaggaagagcaccagcagcagcagcgctgccaaccctgaggagctggtggcctttgatgtggtgtgtggggacttcaactttgacaactgcagcagtgatgacaagctggagcagcagcacagcctcttcacccactacagagacccctgccgcctgggccctggagaggagaagccctgggccatcggcaccctgctggacaccaacggcctgtatgatgaagatgtgtgcaccccagacaacctgcagaaggtgctggagagcgaggagggccggcgggagtacctggccttccccaccagcaagagcagcggccagaagggcaggaaggagctgctgaagggaaatggaagaagaattgactacatgctgcacgccgaggagggcctgtgcccagactggaaggccgaggtggaggagttctccttcatcacccagctgagcggcctgacagaccacctgcctgtggccatgaggctgatggtgagcagcggggaggaggaggcctag

SEQ ID NO: 171006 - DNA, 690 bp, synthetic construct
  misc_feature 1..690: note = Description of Artificial Sequence: Synthetic coding sequence
  source 1..690: mol_type = other DNA
atggaggcccgggagcccggccggcccacccccacctaccacctggtgcccaacaccagccagagccaggtggaggaggatgtgagcagccccccccagaggagcagcgagaccatgcagctgaagaaggagatcagcctgctgaatggagtgtccctggtggtgggcaacatgattggcagcggcatctttgtgagccccaagggcgtgctggtgcacacagccagctatggcatgagcctcatcgtgtgggccatcggcggcctcttctctgtggtgggcgccctgtgctacgccgagctgggcaccaccatcaccaagagcggggccagctatgcctacatcctggaggcctttggaggcttcatcgccttcatccggctgtgggtgtccctgctggtggtggagcccaccggccaggccatcatcgccatcacctttgccaactacatcatccagcccagcttccccagctgtgaccccccctacctggcctgccgcctgctggccgccgcctgcatctgcctgctgacctttgtgaactgtgcctacgtgaagtggggcaccagggtgcaggacaccttcacctacgccaaggtggtggccctgattgccatcatcgtgatgggcctggtgaagctgtgccaggagatctgcccctggcccctgggcttcctgtgccagctgtag

SEQ ID NO: 171007 - DNA, 1536 bp, synthetic construct
  misc_feature 1..1536: note = Description of Artificial Sequence: Synthetic coding sequence
  source 1..1536: mol_type = other DNA
atggtggacagcacagaatatgaggtggccagccagcctgaggtggagaccagccccctgggagatggagccagccctggccctgagcaggtgaagctgaagaaggagatcagcctgctgaatggagtgtgcctgattgtgggcaacatgattggcagcggcatctttgtgagccccaagggcgtgctgatctacagcgccagctttggcctgagcctggtgatctgggccgtgggcggcctcttctctgtgtttggagccctgtgctacgccgagctgggcaccaccatcaagaagagcggggccagctatgcctacatcctggaggcctttggaggcttcctggccttcatccggctgtggaccagcctgctgatcatcgagcccaccagccaggccatcatcgccatcacctttgccaactacatggtgcagcccctcttccccagctgctttgccccctatgctgccagccggctgctggccgccgcctgcatctgcctgctgaccttcatcaactgtgcctacgtgaagtggggcaccctggtgcaggacatcttcacctacgccaaggtgctggccctgattgctgtgattgtggccggcatcgtgcggctgggccagggcgccagcacccactttgaaaattcctttgagggcagcagctttgctgtgggggacatcgccctggccctgtacagcgccctcttctcctacagcggctgggacaccctgaactacgtgacagaggagatcaagaaccctgagaggaacctgcccctgagcatcggcatctccatgcccatcgtgaccatcatctacatcctgaccaacgtggcctactacacagtgctggacatgagggacatcctggccagtgatgctgtggccgtgacctttgctgaccagatcttcggcatcttcaactggatcatccccctgtctgtggccctgagctgctttggaggcctgaatgccagcatcgtggccgccagccgcctcttctttgtgggcagccgggagggccacctgcctgatgccatctgcatgatccacgtggagcgcttcacccctgtgcccagcctgctcttcaacggcatcatggccctgatctacctgtgtgtggaggacatcttccagctgatcaactactacagcttctcctactggttctttgtgggcctgagcatcgtgggccagctgtacctgcgctggaaggagccagaccggccccggcccctgaagctgtctgtgttcttccccatcgtgttctgcctgtgcaccatcttcctggtggccgtgcccctgtacagcgacaccatcaacagcctgattggaattgccatcgccctgagcggcctgcccttctacttcctgatcatccgggtgcctgagcacaagaggcccctgtacctgcggagaattgtgggcagcgccacccgctacctgcaggtgctgtgcatgtctgtggccgctgagatggacctggaggatggaggagagatgcccaagcagagggaccccaagagcaactag

SEQ ID NO: 171008 - DNA, 1536 bp, synthetic construct; identical to SEQ ID NO: 171007
  misc_feature 1..1536: note = Description of Artificial Sequence: Synthetic coding sequence
  source 1..1536: mol_type = other DNA

SEQ ID NO: 171009 - DNA, 1536 bp, synthetic construct; identical to SEQ ID NO: 171007
  misc_feature 1..1536: note = Description of Artificial Sequence: Synthetic coding sequence
  source 1..1536: mol_type = other DNA

SEQ ID NO: 171010 - DNA, 1536 bp, synthetic construct; identical to SEQ ID NO: 171007
  misc_feature 1..1536: note = Description of Artificial Sequence: Synthetic coding sequence
  source 1..1536: mol_type = other DNA

SEQ ID NO: 171011 - DNA, 1455 bp, synthetic construct
  misc_feature 1..1455: note = Description of Artificial Sequence: Synthetic coding sequence
  source 1..1455: mol_type = other DNA
atggtggacagcacagaatatgaggtggccagccagcctgaggtggagaccagccccctgggagatggagccagccctggccctgagcaggtgaagctgaagaaggagatctacagcgccagctttggcctgagcctggtgatctgggccgtgggcggcctcttctctgtgtttggagccctgtgctacgccgagctgggcaccaccatcaagaagagcggggccagctatgcctacatcctggaggccttcggcggcttcctggccttcatccggctgtggaccagcctgctgatcatcgagcccaccagccaggccatcatcgccatcacctttgccaactacatggtgcagcccctcttccccagctgctttgccccctatgctgccagccggctgctggccgccgcctgcatctgcctgctgaccttcatcaactgtgcctacgtgaagtggggcaccctggtgcaggacatcttcacctacgccaaggtgctggccctgattgctgtgattgtggccggcatcgtgcggctgggccagggcgccagcacccactttgagaacagctttgagggcagcagctttgctgtgggggacatcgccctggccctgtacagcgccctcttctcctacagcggctgggacaccctgaactacgtgacagaggagatcaagaaccctgagaggaacctgcccctgagcatcggcatctccatgcccatcgtgaccatcatctacatcctgaccaacgtggcctactacacagtgctggacatgagggacatcctggccagtgatgctgtggccgtgacctttgctgaccagatcttcggcatcttcaactggatcatccccctgtctgtggccctgagctgcttcggcggcctgaatgccagcatcgtggccgccagccgcctcttctttgtgggcagccgggagggccacctgcctgatgccatctgcatgattcatgtggagcgcttcacccctgtgcccagcctgctcttcaacggcatcatggccctgatctacctgtgtgtggaggacatcttccagctgatcaactactacagcttctcctactggttctttgtgggcctgagcatcgtgggccagctgtacctgcgctggaaggagccagaccggccccggcccctgaagctgagcgtcttcttccccatcgtgttctgcctgtgcaccatcttcctggtggccgtgcccctgtacagcgacaccatcaacagcctcatcggcatcgccatcgccctgagcggcctgcccttctacttcctgatcatccgggtgcctgagcacaagaggcccctgtacctgcggcgcatcgtgggcagcgccacccgctacctgcaggtgctgtgcatgtctgtggccgctgagatggacctggaggatggaggagagatgcccaagcagagggaccccaagagcaactag

SEQ ID NO: 171012 - DNA, 426 bp, synthetic construct
  misc_feature 1..426: note = Description of Artificial Sequence: Synthetic coding sequence
  source 1..426: mol_type = other DNA
atggtggacagcacagaatatgaggtggccagccagcctgaggtggagaccagccccctgggagatggagccagccctggccctgagcaggtgaagctgaagaaggagatcagcctgctgaatggagtgtgcctgattgtgggcaacatgattggcagcggcatctttgtgagccccaagggcgtgctgatctacagcgccagctttggcctgagcctggtgatctgggccgtgggcggcctcttctctgtgtttggagccctgtgctacgccgagctgggcaccaccatcaagaagagcggggccagctatgcctacatcctggaggcctttggaggcttcctggccttcatccggctgtggaccagcctgctgatcatcgagcccaccagccaggccatcatcgccatcacctttgccaactag

SEQ ID NO: 171013 - DNA, 135 bp, synthetic construct
  misc_feature 1..135: note = Description of Artificial Sequence: Synthetic coding sequence
  source 1..135: mol_type = other DNA
atggtggacagcacagaatatgaggtggccagccagcctgaggtggagaccagccccctgggagatggagccagccctggccctgagcaggtgaagctgaagaaggagatcagcctgctgaatggagtgtgctag

SEQ ID NO: 171014 - DNA, 495 bp, synthetic construct
  misc_feature 1..495: note = Description of Artificial Sequence: Synthetic coding sequence
  source 1..495: mol_type = other DNA
atggtggacagcacagaatatgaggtggccagccagcctgaggtggagaccagccccctgggagatggagccagccctggccctgagcaggtgaagctgaagaaggagatcagcctgctgaatggagtgtgcctgattgtgggcaacatgattggcagcggcatctttgtgagccccaagggcgtgctgatctacagcgccagctttggcctgagcctggtgatctgggccgtgggcggcctcttctctgtgtttggagccctgtgctacgccgagctgggcaccaccatcaagaagagcggggccagctatgcctacatcctggaggcctttggaggcttcctggccttcatccggctgtggaccagcctgctgatcatcgagcccaccagccaggccatcatcgccatcacctttgccaactacatggtgcagcccctcttccccagctgctttgccccctatgctgccagccggctgctggccgccgcctag

SEQ ID NO: 171015 - DNA, 369 bp, synthetic construct
  misc_feature 1..369: note = Description of Artificial Sequence: Synthetic coding sequence
  source 1..369: mol_type = other DNA
atggtggacagcacagaatatgaggtggccagccagcctgaggtggagaccagccccctgggagatggagccagccctggccctgagcaggtgaagctgaagaaggagatcagcctgctgaatggagtgtgcctgattgtgggcaacatgattggcagcggcatctttgtgagccccaagggcgtgctgatctacagcgccagctttggcctgagcctggtgatctgggccgtgggcggcctcttctctgtgtttggagccctgtgctacgccgagctgggcaccaccatcaagaagagcggggccagctatgcctacatcctggaggcctttggaggcttcctggccttcatccggctgtggacctag

SEQ ID NO: 171016 - DNA, 1536 bp, synthetic construct; identical to SEQ ID NO: 171007
  misc_feature 1..1536: note = Description of Artificial Sequence: Synthetic coding sequence
  source 1..1536: mol_type = other DNA

SEQ ID NO: 171017 - DNA, 348 bp, synthetic construct
  misc_feature 1..348: note = Description of Artificial Sequence: Synthetic coding sequence
  source 1..348: mol_type = other DNA
atggtggacagcacagaatatgaggtggccagccagcctgaggtggagaccagccccctgggagatggagccagccctggccctgagcaggtgaagctgaagaaggagatcagcctgctgaatggagtgtgcctgattgtgggcaacatgattggcagcggcatctttgtgagccccaagggcgtgctgatctacagcgccagctttggcctgagcctggtgatctgggccgtgggcggcctcttctctgtgtttggagccctgtgctacgccgagctgggcaccaccatcaagaagagcggggccagctatgcctacatcctggaggcctttggaggcttcctgtag

SEQ ID NO: 171018 - DNA, 93 bp, synthetic construct
  misc_feature 1..93: note = Description of Artificial Sequence: Synthetic coding sequence
  source 1..93: mol_type = other DNA
atggtggacagcacagaatatgaggtggccagccagcctgaggtggagaccagccccctgggagatggagccagccctggccctgagcagtag

SEQ ID NO: 171019 - DNA, 933 bp, synthetic construct
  misc_feature 1..933: note = Description of Artificial Sequence: Synthetic coding sequence
  source 1..933: mol_type = other DNA
atggtggacagcacagaatatgaggtggccagccagcctgaggtggagaccagccccctgggagatggagccagccctggccctgagcaggtgaagctgaagaaggagatcagcctgctgaatggagtgtgcctgattgtgggcaacatgattggcagcggcatctttgtgagccccaagggcgtgctgatctacagcgccagctttggcctgagcctggtgatctgggccgtgggcggcctcttctctgtgtttggagccctgtgctacgccgagctgggcaccaccatcaagaagagcggggccagctatgcctacatcctggaggcctttggaggcttcctggccttcatccggctgtggaccagcctgctgatcatcgagcccaccagccaggccatcatcgccatcacctttgccaactacatggtgcagcccctcttccccagctgctttgccccctatgctgccagccggctgctggccgccgcctgcatctgcctgctgaccttcatcaactgtgcctacgtgaagtggggcaccctggtgcaggacatcttcacctacgccaaggtgctggccctgattgctgtgattgtggccggcatcgtgcggctgggccagggcgccagcacccactttgaaaattcctttgagggcagcagctttgctgtgggggacatcgccctggccctgtacagcgccctcttctcctacagcggctgggacaccctgaactacgtgacagaggagatcaagaaccctgagaggaacctgcccctgagcatcggcatctccatgcccatcgtgaccatcatctacatcctgaccaacgtggcctactacacagtgctggacatgagggacatcctggccagtgatgctgtggccgtggccttcctgtgtggcctgaagaggcggcccagcccctag

SEQ ID NO: 171020 - DNA, 321 bp, synthetic construct
  misc_feature 1..321: note = Description of Artificial Sequence: Synthetic coding sequence
  source 1..321: mol_type = other DNA
atggtggacagcacagaatatgaggtggccagccagcctgaggtggagaccagccccctgggagatggagccagccctggccctgagcaggtgaagctgaagaaggagatcagcctgctgaatggagtgtgcctgattgtgggcaacatgattggcagcggcatctttgtgagccccaagggcgtgctgatctacagcgccagctttggcctgagcctggtgatctgggccgtgggcggcctcttctctgtgtttggagccctgtgctacgccgagctgggcaccaccatcaagaagagcggggccagctatgcctactag

SEQ ID NO: 171021 - DNA, 351 bp, synthetic construct
  misc_feature 1..351: note = Description of Artificial Sequence: Synthetic coding sequence
  source 1..351: mol_type = other DNA
atggtggacagcacagaatatgaggtggccagccagcctgaggtggagaccagccccctgggagatggagccagccctggccctgagcaggtgaagctgaagaaggagatcagcctgctgaatggagtgtgcctgattgtgggcaacatgattggcagcggcatctttgtgagccccaagggcgtgctgatctacagcgccagctttggcctgagcctggtgatctgggccgtgggcggcctcttctctgtgtttggagccctgtgctacgccgagctgggcaccaccatcaagaagagcggggccagctatgcctacatcctggaggcctttggaggcttcctggcctag

SEQ ID NO: 171022 - DNA, 1890 bp, synthetic construct
  misc_feature 1..1890: note = Description of Artificial Sequence: Synthetic coding sequence
  source 1..1890: mol_type = other DNA
atgggctgcaaggtgctgctgaacatcggccagcagatgctgcggaggaaggtggtggactgcagccgggaggagacccggctgagccgctgcctgaacacctttgacctggtggccctgggcgtgggcagcaccctgggcgctggggtgtatgtgctggccggggctgtggcccgggagaatgccggccctgccatcgtcatctccttcctgattgctgccctggcctctgtgctggccggcctgtgctacggggagtttggagcccgggtgcccaagacaggcagcgcctacctgtacagctatgtgacagtgggggagctgtgggccttcatcaccggctggaacctgatcctgagctacatcatcggcaccagctctgtggcccgggcctggagcgccacctttgatgagctgattggccggcccatcggggagttcagcaggacccacatgaccctgaatgcccctggggtgctggccgagaacccagacatctttgctgtgatcatcatcctgatcctgaccggcctgctgaccctgggcgtgaaggagagcgccatggtgaacaagatcttcacctgcatcaacgtgctggtgctgggcttcatcatggtgtctggctttgtgaagggctctgtgaagaactggcagctgacagaggaggactttggaaacaccagcggccgcctgtgcctgaacaatgacaccaaggagggcaagccaggagtgggcggcttcatgcccttcggcttctctggagtgctgtctggagctgccacctgcttctacgcctttgtgggctttgactgcatcgccaccactggagaggaggtgaagaacccccagaaggccatccctgtgggcatcgtggccagcctgctgatctgcttcatcgcctactttggagtgtctgctgccctgaccctgatgatgccctacttctgcctggacaacaacagccccctgcctgatgccttcaagcacgtgggctgggagggcgccaagtatgctgtggccgtgggcagcctgtgtgccctgagcgccagcctgctgggctccatgttccccatgcccagggtcatctatgccatggctgaagatggcctgctcttcaagttcctggccaacgtgaatgacaggaccaagacccccatcatcgccaccctggccagcggggctgtggccgctgtgatggccttcctgtttgacctgaaggacctggtggacctgatgagcatcggcaccctgctggcctacagcctggtggccgcctgtgtgctggtgctgcgctaccagcctgagcagcccaacctggtgtaccagatggccagcaccagtgatgagctggaccctgctgaccagaatgagctggccagcaccaatgacagccagctgggcttcctgcctgaggccgagatgttcagcctgaagaccatcctgagccccaagaacatggagcccagcaagatcagcggcctgattgtgaacatcagcaccagcctgattgctgtgctgatcatcaccttctgcatcgtgacagtgctgggccgggaggccctgaccaagggggccctgtgggccgtgttcctgctggccggcagcgccctgctgtgtgctgtggtgactggagtcatctggaggcagcctgagagcaagaccaagctgtccttcaaggtgcccttcctgcctgtgctgcccatcctgagcatctttgtgaatgtgtacctgatgatgcagctggaccagggcacctgggtgcgctttgctgtgtggatgctgattggcttcatcatctacttcggctacggcctgtggcacagcgaggaggccagcctggatgctgaccaggcccggaccccagatggcaacctggaccagtgcaagtag

SEQ ID NO: 171023 - DNA, 366 bp, synthetic construct
  misc_feature 1..366: note = Description of Artificial Sequence: Synthetic coding sequence
  source 1..366: mol_type = other DNA
atgggctgcaaggtgctgctgaacatcggccagcagatgctgcggaggaaggtggtggactgcagccgggaggagacccggctgagccgctgcctgaacacctttgacctggtggccctgggcgtgggcagcaccctgggcgctggggtgtatgtgctggccggggctgtggcccgggagaatgccggccctgccatcgtcatctccttcctgattgctgccctggcctctgtgctggccggcctgtgctacggggagtttggagcccgggtgcccaagacaggcagcgcctacctgtacagctatgtgacagtgggggagctgtgggccttcatcaccggctggaacctgatcctgagctactag

SEQ ID NO: 171024 - DNA, 2097 bp, synthetic construct
  misc_feature 1..2097: note = Description of Artificial Sequence: Synthetic coding sequence
  source 1..2097: mol_type = other DNA
atgaagattgagaccagcggctacaacagcgacaagctgatctgccggggcttcatcggcaccccagcccctcctgtgtgtgacagcaagttcctgctgagccccagcagtgatgtgaggatgatcccctgccgggccgccctgacctttgcccgctgcctgatccggaggaagatcgtgaccctggacagcctggaggacaccaagctgtgccgctgcctgagcaccatggacctgattgccctgggcgtgggcagcaccctgggcgctggggtgtatgtgctggccggggaggtggccaaggctgacagcggccccagcatcgtggtgtccttcctgattgctgccctggcctctgtgatggccggcctgtgctacgccgagtttggagcccgggtgcccaagacaggcagcgcctacctgtacacctacgtgacagtgggggagctgtgggccttcatcaccggctggaacctgatcctgtcctatgtgattggcaccagctctgtggcccgggcctggagcggcacctttgatgagctgctgagcaagcagatcggccagttcctgcggacctacttcaggatgaactacacaggcctggccgagtacccagacttctttgctgtgtgcctgatcctgctgctggccggcctgctgagctttggagtgaaggagagcgcctgggtgaacaaggtgttcaccgctgtgaacatcctggtgctgctgtttgtgatggtggccggctttgtgaagggaaatgtggccaactggaagatcagcgaggagttcctgaagaacatcagcgccagcgcccgggagcccccatctgaaaatggcaccagcatctacggggccggcggcttcatgccctacggcttcaccggcaccctggccggggccgccacctgcttctacgcctttgtgggctttgactgcatcgccaccactggagaggaggtgaggaacccccagaaggccatccccatcggcatcgtgaccagcctgctggtgtgcttcatggcctactttggagtgtctgctgccctgaccctgatgatgccctactacctgctggatgagaagagccccctgcctgtggcctttgaatatgtgggctggggccctgccaagtatgtggtggccgccggcagcctgtgtgccctgagcaccagcctgctgggcagcatcttccccatgcccagggtcatctatgccatggctgaagatggcctgctcttcaagtgcctggcccagatcaacagcaagaccaagacccccatcatcgccaccctgagcagcggggctgtggccgccctgatggccttcctgtttgacctgaaggccctggtggacatgatgagcatcggcaccctgatggcctacagcctggtggccgcctgtgtgctgatcctgcgctaccagcccggcctgtcctatgaccagcccaagtgcagccctgagaaggatggcctgggcagcagcccccgggtgaccagcaagtctgagagccaggtgaccatgctgcagaggcagggcttctccatgaggaccctcttctgccccagcctgctgcccacccagcagagcgccagcctggtgtccttcctggtgggcttcctggccttcctggtgctgggcctgtctgtgctgaccacctacggcgtgcacgccatcacccggctggaggcctggagcctggccctgctggccctcttcctggtgctgtttgtggccatcgtgctgaccatctggaggcagccccagaaccagcagaaggtggccttcatggtgcccttcctgcccttcctgcctgccttcagcatcctggtgaacatctacctgatggtgcagctgtctgctgacacctgggtgcgcttcagcatctggatggccatcggcttcctgatctacttctcctatggcatccgccacagcctggagggccacctgagagatgagaacaatgaggaggatgcctacccagacaacgtgcatgctgctgctgaggagaagagcgccatccaggccaatgaccaccaccccaggaacctgagcagccccttcatcttccacgagaagaccagcgagttctag

SEQ ID NO: 171025 - DNA, 2094 bp, synthetic construct
  misc_feature 1..2094: note = Description of Artificial Sequence: Synthetic coding sequence
  source 1..2094: mol_type = other DNA
atgaagattgagaccagcggctacaacagcgacaagctgatctgccggggcttcatcggcaccccagcccctcctgtgtgtgacagcaagttcctgctgagccccagcagtgatgtgaggatgatcccctgccgggccgccctgacctttgcccgctgcctgatccggaggaagatcgtgaccctggacagcctggaggacaccaagctgtgccgctgcctgagcaccatggacctgattgccctgggcgtgggcagcaccctgggcgctggggtgtatgtgctggccggggaggtggccaaggctgacagcggccccagcatcgtggtgtccttcctgattgctgccctggcctctgtgatggccggcctgtgctacgccgagtttggagcccgggtgcccaagacaggcagcgcctacctgtacacctacgtgacagtgggggagctgtgggccttcatcaccggctggaacctgatcctgtcctatgtgattggcaccagctctgtggcccgggcctggagcggcacctttgatgagctgctgagcaagcagatcggccagttcctgcggacctacttcaggatgaactacacaggcctggccgagtacccagacttctttgctgtgtgcctgatcctgctgctggccggcctgctgagctttggagtgaaggagagcgcctgggtgaacaaggtgttcaccgctgtgaacatcctggtgctgctgtttgtgatggtggccggctttgtgaagggaaatgtggccaactggaagatcagcgaggagttcctgaagaacatcagcgccagcgcccgggagcccccatctgaaaatggcaccagcatctacggggccggcggcttcatgccctacggcttcaccggcaccctggccggggccgccacctgcttctacgcctttgtgggctttgactgcatcgccaccactggagaggaggtgaggaacccccagaaggccatccccatcggcatcgtgaccagcctgctggtgtgcttcatggcctactttggagtgtctgctgccctgaccctgatgatgccctactacctgctggatgagaagagccccctgcctgtggcctttgaatatgtgggctggggccctgccaagtatgtggtggccgccggcagcctgtgtgccctgagcaccagcctgctgggctccatgttccccctgccccgcatcctgtttgccatggccagagatggcctgctcttccgcttcctggcccgggtgtccaagaggcagagccctgtggccgccaccctgacagctggggtcatcagcgccctgatggccttcctgtttgacctgaaggccctggtggacatgatgagcatcggcaccctgatggcctacagcctggtggccgcctgtgtgctgatcctgcgctaccagcccggcctgtcctatgaccagcccaagtgcagccctgagaaggatggcctgggcagcagcccccgggtgaccagcaagtctgagagccaggtgaccatgctgcagaggcagggcttctccatgaggaccctcttctgccccagcctgctgcccacccagcagagcgccagcctggtgtccttcctggtgggcttcctggccttcctggtgctgggcctgtctgtgctgaccacctatggagtgcacgccatcacccggctggaggcctggagcctggccctgctggccctcttcctggtgctgtttgtggccatcgtgctgaccatctggaggcagccccagaaccagcagaaggtggccttcatggtgcccttcctgcccttcctgcctgccttcagcatcctggtgaacatctacctgatggtgcagctgtctgctgacacctgggtgcgcttcagcatctggatggccatcggcttcctgatctacttctcctatggcatccgccacagcctggagggccacctgagagatgaaaataatgaagaagatgcctacccagacaacgtgcacgccgctgctgaggagaagagcgccatccaggccaatgaccaccaccccaggaacctgagcagccccttcatcttccacgagaagaccagcgagttctag

SEQ ID NO: 171026 - DNA, 2094 bp, synthetic construct; identical to SEQ ID NO: 171025
  misc_feature 1..2094: note = Description of Artificial Sequence: Synthetic coding sequence
  source 1..2094: mol_type = other DNA

SEQ ID NO: 171027 - DNA, 1977 bp, synthetic construct
  misc_feature 1..1977: note = Description of Artificial Sequence: Synthetic coding sequence
  source 1..1977: mol_type = other DNA
atgatcccctgccgggccgccctgacctttgcccgctgcctgatccggaggaagatcgtgaccctggacagcctggaggacaccaagctgtgccgctgcctgagcaccatggacctgattgccctgggcgtgggcagcaccctgggcgctggggtgtatgtgctggccggggaggtggccaaggctgacagcggccccagcatcgtggtgtccttcctgattgctgccctggcctctgtgatggccggcctgtgctacgccgagtttggagcccgggtgcccaagacaggcagcgcctacctgtacacctacgtgacagtgggggagctgtgggccttcatcaccggctggaacctgatcctgtcctatgtgattggcaccagctctgtggcccgggcctggagcggcacctttgatgagctgctgagcaagcagatcggccagttcctgcggacctacttcaggatgaactacacaggcctggccgagtacccagacttctttgctgtgtgcctgatcctgctgctggccggcctgctgagctttggagtgaaggagagcgcctgggtgaacaaggtgttcaccgctgtgaacatcctggtgctgctgtttgtgatggtggccggctttgtgaagggaaatgtggccaactggaagatcagcgaggagttcctgaagaacatcagcgccagcgcccgggagcccccatctgaaaatggcaccagcatctacggggccggcggcttcatgccctacggcttcaccggcaccctggccggggccgccacctgcttctacgcctttgtgggctttgactgcatcgccaccactggagaggaggtgaggaacccccagaaggccatccccatcggcatcgtgaccagcctgctggtgtgcttcatggcctactttggagtgtctgctgccctgaccctgatgatgccctactacctgctggatgagaagagccccctgcctgtggcctttgaatatgtgggctggggccctgccaagtatgtggtggccgccggcagcctgtgtgccctgagcaccagcctgctgggcagcatcttccccatgcccagggtcatctatgccatggctgaagatggcctgctcttcaagtgcctggcccagatcaacagcaagaccaagacccccatcatcgccaccctgagcagcggggctgtggccgccctgatggccttcctgtttgacctgaaggccctggtggacatgatgagcatcggcaccctgatggcctacagcctggtggccgcctgtgtgctgatcctgcgctaccagcccggcctgtcctatgaccagcccaagtgcagccctgagaaggatggcctgggcagcagcccccgggtgaccagcaagtctgagagccaggtgaccatgctgcagaggcagggcttctccatgaggaccctcttctgccccagcctgctgcccacccagcagagcgccagcctggtgtccttcctggtgggcttcctggccttcctggtgctgggcctgtctgtgctgaccacctacggcgtgcacgccatcacccggctggaggcctggagcctggccctgctggccctcttcctggtgctgtttgtggccatcgtgctgaccatctggaggcagccccagaaccagcagaaggtggccttcatggtgcccttcctgcccttcctgcctgccttcagcatcctggtgaacatctacctgatggtgcagctgtctgctgacacctgggtgcgcttcagcatctggatggccatcggcttcctgatctacttctcctatggcatccgccacagcctggagggccacctgagagatgagaacaatgaggaggatgcctacccagacaacgtgcatgctgctgctgaggagaagagcgccatccaggccaatgaccaccaccccaggaacctgagcagccccttcatcttccacgagaagaccagcgagttctag

SEQ ID NO: 171028 - DNA, 1977 bp, synthetic construct; identical to SEQ ID NO: 171027
  misc_feature 1..1977: note = Description of Artificial Sequence: Synthetic coding sequence
  source 1..1977: mol_type = other DNA

SEQ ID NO: 171029 - DNA, 1464 bp, synthetic construct
  misc_feature 1..1464: note = Description of Artificial Sequence: Synthetic coding sequence
  source 1..1464: mol_type = other DNA
atgggagacaccggcctgaggaagagaagagaagatgagaagagcatccagagccaggagcccaagaccaccagcctgcagaaggagctgggcctcatcagcggcatcagcatcatcgtgggcaccatcatcggcagcggcatctttgtgagccccaagtctgtgctgagcaacacagaagctgtgggcccctgcctgatcatctgggccgcctgtggggtgctggccaccctgggcgccctgtgctttgctgagctgggcaccatgatcaccaagtctggaggagagtacccctacctgatggaggcctacggccccatcccagcctacctgttctcctgggccagcctcatcgtcatcaagcccaccagctttgccatcatctgcctgtccttctctgaatatgtgtgtgcccccttctacgtgggctgcaagccaccccagatcgtggtgaagtgcctggccgctgctgccatcctcttcatcagcacagtgaacagcctgtctgtgcggctgggcagctatgtgcagaacatcttcaccgctgccaagctggtgattgtggccatcatcatcatcagcggcctggtgctgctggcccagggcaacaccaagaactttgacaacagctttgaaggagcccagctgtctgtgggcgccatcagcctggccttctacaacggcctgtgggcctatgatggctggaaccagctgaactacatcacagaggagctgaggaacccctacagaaacctgcccctggccatcatcatcggcatccccctggtgacagcctgctacatcctgatgaatgtgtcctacttcaccgtgatgacagccacagagctgctgcagagccaggccgtggccgtgacctttggagacagagtgctgtacccagcctcctggatcgtgcccctgtttgtggccttcagcaccatcggggccgccaacggcacctgcttcaccgctggccgcctcatctacgtggccggccgggagggccacatgctgaaggtgctgagctacatctctgtgcggcggctgaccccagccccagccatcatcttctacggcatcatcgccaccatctacatcatccctggggacatcaacagcctggtgaactacttctcctttgctgcctggctgttctacggcctgaccatcctgggcctcatcgtgatgaggttcaccaggaaggagctggagcggcccatcaaggtgcctgtggtgattcctgtgctgatgaccctcatctctgtgttcctggtgctggcccccatcatcagcaagcccacctgggagtacctgtactgtgtgctcttcatcctgagcggcctgctcttctacttcctgtttgtgcactacaagtttggctgggcccagaagatcagcaagcccatcaccatgcacctgcagatgctgatggaggtggtgcccccagaggaggaccctgagtag

SEQ ID NO: 171030 - DNA, 1464 bp, synthetic construct; identical to SEQ ID NO: 171029
  misc_feature 1..1464: note = Description of Artificial Sequence: Synthetic coding sequence
  source 1..1464: mol_type = other DNA

SEQ ID NO: 171031 - DNA, 1908 bp, synthetic construct
  misc_feature 1..1908: note = Description of Artificial Sequence: Synthetic coding sequence
  source 1..1908: mol_type = other DNA
atggcccggggcctgcccaccatcgccagcctggcccggctgtgccagaagctgaaccggctgaagcccctggaggacagcaccatggagaccagcctgcggcgctgcctgagcaccctggacctgaccctgctgggcgtgggcggcatggtgggcagcggcctgtatgtgctgactggagctgtggccaaggaggtggccggccctgctgtgctgctgagctttggagtggccgctgtggccagcctgctggccgccctgtgctacgccgagtttggagcccgggtgcccaggactggaagtgcctacctgttcacctacgtgtccatgggagagctgtgggccttcctgattggctggaatgtgctgctggagtacatcatcggcggcgctgctgtggcccgggcctggagcggctacctggacagcatgttcagccacagcatccggaacttcacagagacccacgtgggctcctggcaggtgcccctgctgggccactacccagacttcctggccgccggcatcatcctgctggccagcgcctttgtgtcctgtggggcccgggtgtcctcctggctgaaccacaccttcagcgccatcagcctgctggtgatcctcttcatcgtcatcctgggcttcatcctggcccagccccacaactggagcgcagatgaaggaggctttgcccccttcggcttctctggagtgatggccggcacagccagctgcttctacgcctttgtgggctttgatgtgattgctgccagcagcgaggaggcccagaaccccaggagatctgtgcccctggccatcgccatcagcctggccatcgccgccggggcctacatcctggtgtccacagtgctgaccctgatggtgccctggcacagcctggaccctgattctgccctggctgatgccttctaccagaggggctaccgctgggccggcttcatcgtggccgccggcagcatctgtgccatgaacacagtgctgctgagcctgctcttcagcctgcccagaattgtgtatgccatggctgctgatggcctcttcttccaggtgtttgcccacgtgcaccccaggacccaggtgcctgtggccggcaccctggccttcggcctgctgacagccttcctggccctgctgctggacctggagagcctggtgcagttcctgagcctgggcaccctgctggcctacacctttgtggccaccagcatcatcgtgctgcgcttccagaagagcagcccccccagcagccctggccctgccagccctggccccctgaccaagcagcagagcagcttcagtgaccacctgcagctggtgggcaccgtgcacgcctctgtgcctgagcctggagagctgaagccagccctgcggccctacctgggcttcctggatggctacagccctggagctgtggtgacctgggccctgggcgtgatgctggccagcgccatcaccatcggctgtgtgctggtgtttggaaacagcaccctgcacctgccccactggggctacatcctgctgctgctgctgacctctgtgatgttcctgctgagcctgctggtgctgggcgcccaccagcagcagtacagagaagatctcttccagatccccatggtgcccctcatcccagccctgagcatcgtgctgaacatctgcctgatgctgaagctgagctacctgacctgggtgcgcttcagcatctggctgctgatgggcctggccgtgtacttcggctacggcatccgccacagcaaggagaaccagcgggagctgcccggcctgaacagcacccactacgtggtgttcccccggggcagcctggaggagaccgtgcaggccatgcagccccccagccaggccccagcccaggaccccggccacatggagtag

SEQ ID NO: 171032 - DNA, 1908 bp, synthetic construct; identical to SEQ ID NO: 171031
  misc_feature 1..1908: note = Description of Artificial Sequence: Synthetic coding sequence
  source 1..1908: mol_type = other DNA

SEQ ID NO: 171033 - DNA, 249 bp, synthetic construct
  misc_feature 1..249: note = Description of Artificial Sequence: Synthetic coding sequence
  source 1..249: mol_type = other DNA
atggcccggggcctgcccaccatcgccagcctggcccggctgtgccagaagctgaaccggctgaagcccctggaggacagcaccatggagaccagcctgcggcgctgcctgagcaccctggacctgaccctgctgggcgtgggcggcatggtgggcagcggcctgtatgtgctgactggagctgtggccaaggaggtggccggccctgctgtgctgctgagctttggagtggccgctgtggccagctag

SEQ ID NO: 171034 - DNA, 2922 bp, synthetic construct
  misc_feature 1..2922: note = Description of Artificial Sequence: Synthetic coding sequence
  source 1..2922: mol_type = other DNA
atgtacaacatgaggcggctgagcctgagccccaccttctccatgggcttccacctgctggtgacagtgtccctgctcttcagccacgtggaccacgtgattgctgagacagagatggagggggagggcaatgagaccggggagtgcaccggcagctactactgcaagaagggcgtcatcctgcccatctgggagccccaggaccccagctttggagacaagatcgcccgggccaccgtgtactttgtggccatggtgtacatgttcctgggcgtgtccatcatcgctgaccgcttcatgagcagcattgaagtcatcaccagccaggagaaggagatcaccatcaagaagcccaatggagagaccaccaagaccaccgtgcgcatctggaatgaaacagtgagcaacctgaccctgatggccctgggcagcagcgcccctgagatcctgctgagcgtcatcgaggtgtgtggccacaacttcaccgctggggacctgggccccagcaccatcgtgggcagcgctgccttcaacatgttcatcatcatcgccctgtgtgtgtatgtggtgcctgatggagagaccaggaagatcaagcacctgcgggtcttctttgtgacagctgcctggagcatctttgcctacacctggctgtacatcatcctgagcgtcatcagccctggggtggtggaggtgtgggagggcctgctgaccttcttcttcttccccatctgtgtggtgtttgcctgggtggccgaccggcggctgctcttctacaagtatgtgtacaagcgctaccgggccggcaagcagaggggcatgatcatcgagcacgagggggaccggcccagcagcaagacagaaattgagatggatggcaaggtggtgaacagccacgtggagaacttcctggatggagccctggtgctggaggtggatgagcgggaccaggatgatgaggaggcccggcgggagatggcccgcatcctgaaggagctgaagcagaagcacccagacaaggagattgagcagctgattgagctggccaactaccaggtgctgagccagcagcagaagagccgggccttctaccgcatccaggccacccggctgatgactggagctggcaacatcctgaagagacatgctgctgaccaggccaggaaggctgtgtccatgcatgaggtgaacacagaggtgacagaaaatgaccctgtgtccaagatcttctttgagcagggcacctaccagtgcctggagaactgtggcaccgtggccctgaccatcatcagaagaggaggagacctgaccaacacagtgtttgtggacttcagaacagaagatggaacagccaatgccggcagtgactatgagttcacagagggcaccgtggtgttcaagccaggggacacccagaaggagatccgggtgggcatcattgatgatgacatctttgaagaagatgagaacttcctggtgcacctgagcaatgtgaaggtgagcagcgaggcctctgaagatggcatcctggaggccaaccacgtgtccaccctggcctgcctgggcagccccagcacagccaccgtgaccatctttgatgatgaccatgctggcatcttcacctttgaggagcctgtgacccacgtgtctgagagcatcggcatcatggaggtgaaggtgctgcggaccagcggggcccggggaaatgtgattgtgccctacaagaccatcgagggcacagcccggggcggcggggaggactttgaggacacctgtggggagctggagttccagaatgatgagatcgtgaagaccatctctgtgaaggtgattgatgatgaggagtatgagaagaacaagaccttcttcctggagatcggggagccccggctggtggagatgtctgagaagaaggccctgctgctgaatgagctgggcggcttcaccatcaccgggaagtacctgtttggccagcctgtgttcaggaaggtgcacgcccgggagcaccccatcctgagcaccgtcatcaccatcgcagatgaatatgatgacaagcagcccctgaccagcaaggaggaggaggagaggagaattgctgagatgggccggcccatcctgggggagcacaccaagctggaggtgatcatcgaggagagctatgagttcaagagcacagtggacaagctgatcaagaagaccaacctggccctggtggtgggcaccaacagctggagggagcagttcatcgaggccatcaccgtgtctgctggggaggatgatgatgatgatgaatgtggggaggagaagctgcccagctgctttgattatgtgatgcacttcctgaccgtcttctggaaggtgctgtttgcctttgtgcccccaacagagtactggaatggctgggcctgcttcatcgtgtccatcctgatgattggcctgctgacagccttcatcggggacctggccagccacttcggctgcaccatcggcctgaaggacagcgtgacagctgtggtgtttgtggccctgggcacctctgtgcctgacacctttgccagcaaggtggccgccacccaggaccagtatgcagatgccagcattggaaatgtgacaggcagcaatgctgtgaatgtgttcctgggcatcggcgtggcctggagcattgctgccatctaccacgccgccaacggggagcagttcaaggtgtccccaggcaccctggccttctctgtgaccctcttcaccatctttgccttcatcaacgtgggcgtgctgctgtacagaagaagacctgagattggaggagagctgggcggccccaggacagccaagctgctgaccagctgcctgtttgtgctgctgtggctgctgtacatcttcttcagcagcctggaggcctactgccacatcaagggcttctag

SEQ ID NO: 171035 - DNA, 2922 bp, synthetic construct; identical to SEQ ID NO: 171034
  misc_feature 1..2922: note = Description of Artificial Sequence: Synthetic coding sequence
  source 1..2922: mol_type = other DNA

SEQ ID NO: 171036 - DNA, 2814 bp, synthetic construct
  misc_feature 1..2814: note = Description of Artificial Sequence: Synthetic coding sequence
  source 1..2814: mol_type = other DNA
atgtacaacatgaggcggctgagcctgagccccaccttctccatgggcttccacctgctggtgacagtgtccctgctcttcagccacgtggaccacgtgattgctgagacagagatggagggggagggcaatgagaccggggagtgcaccggcagctactactgcaagaagggcgtcatcctgcccatctgggagccccaggaccccagctttggagacaagatcgcccgggccaccgtgtactttgtggccatggtgtacatgttcctgggcgtgtccatcatcgctgaccgcttcatgagcagcattgaagtcatcaccagccaggagaaggagatcaccatcaagaagcccaatggagagaccaccaagaccaccgtgcgcatctggaatgaaacagtgagcaacctgaccctgatggccctgggcagcagcgcccctgagatcctgctgagcgtcatcgaggtgtgtggccacaacttcaccgctggggacctgggccccagcaccatcgtgggcagcgctgccttcaacatgttcatcatcatcgccctgtgtgtgtatgtggtgcctgatggagagaccaggaagatcaagcacctgcgggtcttctttgtgacagctgcctggagcatctttgcctacacctggctgtacatcatcctgagcgtcatcagccctggggtggtggaggtgtgggagggcctgctgaccttcttcttcttccccatctgtgtggtgtttgcctgggtggccgaccggcggctgctcttctacaagtatgtgtacaagcgctaccgggccggcaagcagaggggcatgatcatcgagcacgagggggaccggcccagcagcaagacagaaattgagatggatggcaaggtggtgaacagccacgtggagaacttcctggatggagccctggtgctggaggtggatgagcgggaccaggatgatgaggaggcccggcgggagatggcccgcatcctgaaggagctgaagcagaagcacccagacaaggagattgagcagctgattgagctggccaactaccaggtgctgagccagcagcagaagagccgggccttctaccgcatccaggccacccggctgatgactggagctggcaacatcctgaagagacatgctgctgaccaggccaggaaggctgtgtccatgcatgaggtgaacacagaggtgacagaaaatgaccctgtgtccaagatcttctttgagcagggcacctaccagtgcctggagaactgtggcaccgtggccctgaccatcatcagaagaggaggagacctgaccaacacagtgtttgtggacttcagaacagaagatggaacagccaatgccggcagtgactatgagttcacagagggcaccgtggtgttcaagccaggggacacccagaaggagatccgggtgggcatcattgatgatgacatctttgaagaagatgagaacttcctggtgcacctgagcaatgtgaaggtgagcagcgaggcctctgaagatggcatcctggaggccaaccacgtgtccaccctggcctgcctgggcagccccagcacagccaccgtgaccatctttgatgatgaccatgctggcatcttcacctttgaggagcctgtgacccacgtgtctgagagcatcggcatcatggaggtgaaggtgctgcggaccagcggggcccggggaaatgtgattgtgccctacaagaccatcgagggcacagcccggggcggcggggaggactttgaggacacctgtggggagctggagttccagaatgatgagatcgtgaagatcatcaccatccgcatctttgaccgggaggagtatgagaaggaatgttccttcagcctggtgctggaggagcccaagtggatcagaagaggcatgaagggcggcttcaccatcacagatgaatatgatgacaagcagcccctgaccagcaaggaggaggaggagaggagaattgctgagatgggccggcccatcctgggggagcacaccaagctggaggtgatcatcgaggagagctatgagttcaagagcacagtggacaagctgatcaagaagaccaacctggccctggtggtgggcaccaacagctggagggagcagttcatcgaggccatcaccgtgtctgctggggaggatgatgatgatgatgaatgtggggaggagaagctgcccagctgctttgattatgtgatgcacttcctgaccgtcttctggaaggtgctgtttgcctttgtgcccccaacagagtactggaatggctgggcctgcttcatcgtgtccatcctgatgattggcctgctgacagccttcatcggggacctggccagccacttcggctgcaccatcggcctgaaggacagcgtgacagctgtggtgtttgtggccctgggcacctctgtgcctgacacctttgccagcaaggtggccgccacccaggaccagtatgcagatgccagcattggaaatgtgacaggcagcaatgctgtgaatgtgttcctgggcatcggcgtggcctggagcattgctgccatctaccacgccgccaacggggagcagttcaaggtgtccccaggcaccctggccttctctgtgaccctcttcaccatctttgccttcatcaacgtgggcgtgctgctgtacagaagaagacctgagattggaggagagctgggcggccccaggacagccaagctgctgaccagctgcctgtttgtgctgctgtggctgctgtacatcttcttcagcagcctggaggcctactgccacatcaagggcttctag

SEQ ID NO: 171037 - DNA, 2922 bp, synthetic construct; identical to SEQ ID NO: 171034
  misc_feature 1..2922: note = Description of Artificial Sequence: Synthetic coding sequence
  source 1..2922: mol_type = other DNA

SEQ ID NO: 171038 - DNA, 2814 bp, synthetic construct; identical to SEQ ID NO: 171036
  misc_feature 1..2814: note = Description of Artificial Sequence: Synthetic coding sequence
  source 1..2814: mol_type = other DNA

SEQ ID NO: 171039 - DNA, 2907 bp, synthetic construct
  misc_feature 1..2907: note = Description of Artificial Sequence: Synthetic coding sequence
  source 1..2907: mol_type = other DNA
atgtacaacatgaggcggctgagcctgagccccaccttctccatgggcttccacctgctggtgacagtgtccctgctcttcagccacgtggaccacgtgattgctgagacagagatggagggggagggcaatgagaccggggagtgcaccggcagctactactgcaagaagggcgtcatcctgcccatctgggagccccaggaccccagctttggagacaagatcgcccgggccaccgtgtactttgtggccatggtgtacatgttcctgggcgtgtccatcatcgctgaccgcttcatgagcagcattgaagtcatcaccagccaggagaaggagatcaccatcaagaagcccaatggagagaccaccaagaccaccgtgcgcatctggaatgaaacagtgagcaacctgaccctgatggccctgggcagcagcgcccctgagatcctgctgagcgtcatcgaggtgtgtggccacaacttcaccgctggggacctgggccccagcaccatcgtgggcagcgctgccttcaacatgttcatcatcatcgccctgtgtgtgtatgtggtgcctgatggagagaccaggaagatcaagcacctgcgggtcttctttgtgacagctgcctggagcatctttgcctacacctggctgtacatcatcctgagcgtcatcagccctggggtggtggaggtgtgggagggcctgctgaccttcttcttcttccccatctgtgtggtgtttgcctgggtggccgaccggcggctgctcttctacaagtatgtgtacaagcgctaccgggccggcaagcagaggggcatgatcatcgagcacgagggggaccggcccagcagcaagacagaaattgagatggatggcaaggtggtgaacagccacgtggagaacttcctggatggagccctggtgctggaggtggatgagcgggaccaggatgatgaggaggcccggcgggagatggcccgcatcctgaaggagctgaagcagaagcacccagacaaggagattgagcagctgattgagctggccaactaccaggtgctgagccagcagcagaagagccgggccttctaccgcatccaggccacccggctgatgactggagctggcaacatcctgaagagacatgctgctgaccaggccaggaaggctgtgtccatgcatgaggtgaacacagaggtgacagaaaatgaccctgtgtccaagatcttctttgagcagggcacctaccagtgcctggagaactgtggcaccgtggccctgaccatcatcagaagaggaggagacctgaccaacacagtgtttgtggacttcagaacagaagatggaacagccaatgccggcagtgactatgagttcacagagggcaccgtggtgttcaagccaggggacacccagaaggagatccgggtgggcatcattgatgatgacatctttgaagaagatgagaacttcctggtgcacctgagcaatgtgaaggtgagcagcgaggcctctgaagatggcatcctggaggccaaccacgtgtccaccctggcctgcctgggcagccccagcacagccaccgtgaccatctttgatgatgaccatgctggcatcttcacctttgaggagcctgtgacccacgtgtctgagagcatcggcatcatggaggtgaaggtgctgcggaccagcggggcccggggaaatgtgattgtgccctacaagaccatcgagggcacagcccggggcggcggggaggactttgaggacacctgtggggagctggagttccagaatgatgagatcgtgaagaccatctctgtgaaggtgattgatgatgaggagtatgagaagaacaagaccttcttcctggagatcggggagccccggctggtggagatgtctgagaagaaggccctgctgctgaatgagctgggcggcttcaccatcaccggccagcccgtcttcaggaaggtgcacgcccgggagcaccccatcctgagcaccgtcatcaccatcgcagatgaatatgatgacaagcagcccctgaccagcaaggaggaggaggagaggagaattgctgagatgggccggcccatcctgggggagcacaccaagctggaggtgatcatcgaggagagctatgagttcaagagcacagtggacaagctgatcaagaagaccaacctggccctggtggtgggcaccaacagctggagggagcagttcatcgaggccatcaccgtgtctgctggagaagatgatgatgatgatgaatgtggggaggagaagctgcccagctgctttgattatgtgatgcacttcctgactgtgttctggaaggtgctgtttgcctttgtgcccccaacagagtactggaatggctgggcctgcttcatcgtgtccatcctgatgattggcctgctgacagccttcatcggggacctggccagccacttcggctgcaccatcggcctgaaggacagcgtgacagctgtggtgtttgtggccctgggcacctctgtgcctgacacctttgccagcaaggtggccgccacccaggaccagtatgcagatgccagcattggaaatgtgacaggcagcaatgctgtgaatgtgttcctgggcattggagtggcctggagcattgctgccatctaccacgccgccaatggagagcagttcaaggtgtccccaggcaccctggccttctctgtgaccctcttcaccatctttgccttcatcaacgtgggcgtgctgctgtacagaagaagacctgagatcggcggggagctgggcggccccaggacagccaagctgctgaccagctgcctgtttgtgctgctgtggctgctgtacatcttcttcagcagcctggaggcctactgccacatcaagggcttctag

SEQ ID NO: 171040 - DNA, 2814 bp, synthetic construct; identical to SEQ ID NO: 171036
  misc_feature 1..2814: note = Description of Artificial Sequence: Synthetic coding sequence
  source 1..2814: mol_type = other DNA

SEQ ID NO: 171041 - DNA, 2814 bp, synthetic construct; identical to SEQ ID NO: 171036
  misc_feature 1..2814: note = Description of Artificial Sequence: Synthetic coding sequence
  source 1..2814: mol_type = other DNA

SEQ ID NO: 171042 - DNA, 1995 bp, synthetic construct
  misc_feature 1..1995: note = Description of Artificial Sequence: Synthetic coding sequence
  source 1..1995: mol_type = other DNA
atgaggcggctgagcctgagccccaccttctccatgggcttccacctgctggtgacagtgtccctgctcttcagccacgtggaccacgtgattgctgagacagagatggagggggagggcaatgaaacaggagaatgtacaggcagctactactgcaagaagggcgtcatcctgcccatctgggagccccaggaccccagctttggagacaagatcgcccgggccaccgtgtactttgtggccatggtgtacatgttcctgggcgtgtccatcatcgctgaccgcttcatgagcagcattgaggtgatcaccagccaggagaaggagatcaccatcaagaagcccaacggggagaccaccaagaccaccgtgcgcatctggaatgagaccgtgagcaacctgaccctgatggccctgggcagcagcgcccctgagatcctgctgtctgtgattgaggtgtgtggccacaacttcaccgctggggacctgggccccagcaccatcgtgggcagcgctgccttcaacatgttcatcatcatcgccctgtgtgtgtatgtggtgcctgatggagagaccaggaagatcaagcacctgcgggtcttctttgtgacagctgcctggagcatctttgcctacacctggctgtacatcatcctgagcgtcatcagccctggggtggtggaggtgtgggagggcctgctgaccttcttcttcttccccatctgtgtggtgtttgcctgggtggccgaccggcggctgctcttctacaagtatgtgtacaagcgctacagagctgggaagcagaggggcatgatcattgaacatgaaggagaccggcccagcagcaagacagaaattgagatggatggcaaggtggtgaacagccacgtggagaacttcctggatggagccctggtgctggaggtggatgagcgggaccaggatgatgaggaggcccggcgggagatggcccgcatcctgaaggagctgaagcagaagcacccagacaaggagattgagcagctgattgagctggccaactaccaggtgctgagccagcagcagaagagccgggccttctaccgcatccaggccacccggctgatgaccggggccggcaacatcctgaagagacatgctgctgaccaggccaggaaggctgtgtccatgcatgaggtgaacacagaggtgacagaaaatgaccctgtgtccaagatcttctttgagcagggcacctaccagtgcctggagaactgtggcaccgtggccctgaccatcatccggcggggcggggacctgaccaacacagtgtttgtggacttcagaacagaagatggaacagccaatgccggcagtgactatgagttcacagagggcaccgtggtgttcaagccaggggacacccagaaggagatccgggtgggcatcattgatgatgacatctttgaggaggatgagaacttcctggtgcacctgagcaatgtgaaggtgtcctctgaggcctctgaagatggcatcctggaggccaaccacgtgtccaccctggcctgcctgggcagccccagcacagccaccgtgaccatctttgatgatgaccacgccggcatcttcacctttgaggagcctgtgacccacgtgtctgagagcatcggcatcatggaggtgaaggtgctgcggaccagcggggcccggggaaatgtcatcgtgccctacaagaccatcgagggcacagcccggggcggcggagaagattttgaggacacctgtggggagctggagttccagaatgatgaaattgtgaagaccatctctgtgaaggtgattgatgatgaggagtatgagaagaacaagaccttcttcctggagattggagagccccggctggtggagatgtctgagaagaagggccgcagcctgcccctggagtacctgactgtgaggaacatgaggaagtctgctgtgagccccctgtgcctgaggaaccagaatggatag

SEQ ID NO: 171043 - DNA, 2898 bp, synthetic construct
  misc_feature 1..2898: note = Description of Artificial Sequence: Synthetic coding sequence
  source 1..2898: mol_type = other DNA
atgtacaacatgaggcggctgagcctgagccccaccttctccatgggcttccacctgctggtgacagtgtccctgctcttcagccacgtggaccacgtgattgctgagacagagatggagggggagggcaatgagaccggggagtgcaccggcagctactactgcaagaagggcgtcatcctgcccatctgggagccccaggaccccagctttggagacaagatcgcccgggccaccgtgtactttgtggccatggtgtacatgttcctgggcgtgtccatcatcgctgaccgcttcatgagcagcattgaagtcatcaccagccaggagaaggagatcaccatcaagaagcccaatggagagaccaccaagaccaccgtgcgcatctggaatgaaacagtgagcaacctgaccctgatggccctgggcagcagcgcccctgagatcctgctgagcgtcatcgaggtgtgtggccacaacttcaccgctggggacctgggccccagcaccatcgtgggcagcgctgccttcaacatgttcatcatcatcgccctgtgtgtgtatgtggtgcctgatggagagaccaggaagatcaagcacctgcgggtcttctttgtgacagctgcctggagcatctttgcctacacctggctgtacatcatcctgagcgtcatcagccctggggtggtggaggtgtgggagggcctgctgaccttcttcttcttccccatctgtgtggtgtttgcctgggtggccgaccggcggctgctcttctacaagtatgtgtacaagcgctaccgggccggcaagcagaggggcatgatcatcgagcacgagggggaccggcccagcagcaagacagaaattgagatggatggcaaggtggtgaacagccacgtggagaacttcctggatggagccctggtgctggaggtggatgagcgggaccaggatgatgaggaggcccggcgggagatggcccgcatcctgaaggagctgaagcagaagcacccagacaaggagattgagcagctgattgagctggccaactaccaggtgctgagccagcagcagaagagccgggccttctaccgcatccaggccacccggctgatgactggagctggcaacatcctgaagagacatgctgctgaccaggccaggaaggctgtgtccatgcatgaggtgaacacagaggtgacagaaaatgaccctgtgtccaagatcttctttgagcagggcacctaccagtgcctggagaactgtggcaccgtggccctgaccatcatcagaagaggaggagacctgaccaacacagtgtttgtggacttcagaacagaagatggaacagccaatgccggcagtgactatgagttcacagagggcaccgtggtgttcaagccaggggacacccagaaggagatccgggtgggcatcattgatgatgacatctttgaagaagatgagaacttcctggtgcacctgagcaatgtgaaggtgagcagcgaggcctctgaagatggcatcctggaggccaaccacgtgtccaccctggcctgcctgggcagccccagcacagccaccgtgaccatctttgatgatgaccatgctggcatcttcacctttgaggagcctgtgacccacgtgtctgagagcatcggcatcatggaggtgaaggtgctgcggaccagcggggcccggggaaatgtgattgtgccctacaagaccatcgagggcacagcccggggcggcggggaggactttgaggacacctgtggggagctggagttccagaatgatgagatcgtgaagatcatcaccatccgcatctttgaccgggaggagtatgagaaggaatgttccttcagcctggtgctggaggagcccaagtggatcagaagaggcatgaagggcggcttcaccatcaccgggaagtacctgtttggccagcctgtgttcaggaaggtgcacgcccgggagcaccccatcctgagcaccgtcatcaccatcgcagatgaatatgatgacaagcagcccctgaccagcaaggaggaggaggagaggagaattgctgagatgggccggcccatcctgggggagcacaccaagctggaggtgatcatcgaggagagctatgagttcaagagcacagtggacaagctgatcaagaagaccaacctggccctggtggtgggcaccaacagctggagggagcagttcatcgaggccatcaccgtgtctgctggggaggatgatgatgatgatgaatgtggggaggagaagctgcccagctgctttgattatgtgatgcacttcctgaccgtcttctggaaggtgctgtttgcctttgtgcccccaacagagtactggaatggctgggcctgcttcatcgtgtccatcctgatgattggcctgctgacagccttcatcggggacctggccagccacttcggctgcaccatcggcctgaaggacagcgtgacagctgtggtgtttgtggccctgggcacctctgtgcctgacacctttgccagcaaggtggccgccacccaggaccagtatgcagatgccagcattggaaatgtgacaggcagcaatgctgtgaatgtgttcctgggcatcggcgtggcctggagcattgctgccatctaccacgccgccaacggggagcagttcaaggtgtccccaggcaccctggccttctctgtgaccctcttcaccatctttgccttcatcaacgtgggcgtgctgctgtacagaagaagacctgagattggaggagagctgggcggccccaggacagccaagctgctgaccagctgcctgtttgtgctgctgtggctgctgtacatcttcttcagcagcctggaggcctactgccacatcaagggcttctag

SEQ ID NO: 171044 - DNA, 222 bp, synthetic construct
  misc_feature 1..222: note = Description of Artificial Sequence: Synthetic coding sequence
  source 1..222: mol_type = other DNA
atgtacaacatgaggcggctgagcctgagccccaccttctccatgggcttccacctgctggtgacagtgtccctgctcttcagccacgtggaccacgtgattgctgagacagagatggagggggagggcaatgagaccggggagtgcaccggcagctactactgcaagaagggcgtcatcctgcccatctgggagccccaggaccccagctttggagactag

SEQ ID NO: 171045 - DNA, 264 bp, synthetic construct
  misc_feature 1..264: note = Description of Artificial Sequence: Synthetic coding sequence
  source 1..264: mol_type = other DNA
atgtacaacatgaggcggctgagcctgagccccaccttctccatgggcttccacctgctggtgacagtgtccctgctcttcagccacgtggaccacgtgattgctgagacagagatggagggggagggcaatgagaccggggagtgcaccggcagctactactgcaagaagggcgtcatcctgcccatctgggagccccaggaccccagctttggagacaagatcgcccgggccaccgtgtactttgtggccatggtgtactag

SEQ ID NO: 171046 - DNA, 264 bp, synthetic construct; identical to SEQ ID NO: 171045
  misc_feature 1..264: note = Description of Artificial Sequence: Synthetic coding sequence
  source 1..264: mol_type = other DNA

SEQ ID NO: 171047 - DNA, 2883 bp, synthetic construct
  misc_feature 1..2883: note = Description of Artificial Sequence: Synthetic coding sequence
  source 1..2883: mol_type = other DNA
atgtacaacatgaggcggctgagcctgagccccaccttctccatgggcttccacctgctggtgacagtgtccctgctcttcagccacgtggaccacgtgattgctgagacagagatggagggggagggcaatgagaccggggagtgcaccggcagctactactgcaagaagggcgtcatcctgcccatctgggagccccaggaccccagctttggagacaagatcgcccgggccaccgtgtactttgtggccatggtgtacatgttcctgggcgtgtccatcatcgctgaccgcttcatgagcagcattgaagtcatcaccagccaggagaaggagatcaccatcaagaagcccaatggagagaccaccaagaccaccgtgcgcatctggaatgaaacagtgagcaacctgaccctgatggccctgggcagcagcgcccctgagatcctgctgagcgtcatcgaggtgtgtggccacaacttcaccgctggggacctgggccccagcaccatcgtgggcagcgctgccttcaacatgttcatcatcatcgccctgtgtgtgtatgtggtgcctgatggagagaccaggaagatcaagcacctgcgggtcttctttgtgacagctgcctggagcatctttgcctacacctggctgtacatcatcctgagcgtcatcagccctggggtggtggaggtgtgggagggcctgctgaccttcttcttcttccccatctgtgtggtgtttgcctgggtggccgaccggcggctgctcttctacaagtatgtgtacaagcgctaccgggccggcaagcagaggggcatgatcatcgagcacgagggggaccggcccagcagcaagacagaaattgagatggatggcaaggtggtgaacagccacgtggagaacttcctggatggagccctggtgctggaggtggatgagcgggaccaggatgatgaggaggcccggcgggagatggcccgcatcctgaaggagctgaagcagaagcacccagacaaggagattgagcagctgattgagctggccaactaccaggtgctgagccagcagcagaagagccgggccttctaccgcatccaggccacccggctgatgactggagctggcaacatcctgaagagacatgctgctgaccaggccaggaaggctgtgtccatgcatgaggtgaacacagaggtgacagaaaatgaccctgtgtccaagatcttctttgagcagggcacctaccagtgcctggagaactgtggcaccgtggccctgaccatcatcagaagaggaggagacctgaccaacacagtgtttgtggacttcagaacagaagatggaacagccaatgccggcagtgactatgagttcacagagggcaccgtggtgttcaagccaggggacacccagaaggagatccgggtgggcatcattgatgatgacatctttgaagaagatgagaacttcctggtgcacctgagcaatgtgaaggtgagcagcgaggcctctgaagatggcatcctggaggccaaccacgtgtccaccctggcctgcctgggcagccccagcacagccaccgtgaccatctttgatgatgaccatgctggcatcttcacctttgaggagcctgtgacccacgtgtctgagagcatcggcatcatggaggtgaaggtgctgcggaccagcggggcccggggaaatgtgattgtgccctacaagaccatcgagggcacagcccggggcggcggggaggactttgaggacacctgtggggagctggagttccagaatgatgagatcgtgaagatcatcaccatccgcatctttgaccgggaggagtatgagaaggaatgttccttcagcctggtgctggaggagcccaagtggatcagaagaggcatgaaggagggcttctggctgagcagccagcccgtcttcaggaaggtgcacgcccgggagcaccccatcctgagcaccgtcatcaccatcgcagatgaatatgatgacaagcagcccctgaccagcaaggaggaggaggagaggagaattgctgagatgggccggcccatcctgggggagcacaccaagctggaggtgatcatcgaggagagctatgagttcaagagcacagtggacaagctgatcaagaagaccaacctggccctggtggtgggcaccaacagctggagggagcagttcatcgaggccatcaccgtgtctgctggagaagatgatgatgatgatgaatgtggggaggagaagctgcccagctgctttgattatgtgatgcacttcctgactgtgttctggaaggtgctgtttgcctttgtgcccccaacagagtactggaatggctgggcctgcttcatcgtgtccatcctgatgattggcctgctgacagccttcatcggggacctggccagccacttcggctgcaccatcggcctgaaggacagcgtgacagctgtggtgtttgtggccctgggcacctctgtgcctgacacctttgccagcaaggtggccgccacccaggaccagtatgcagatgccagcattggaaatgtgacaggcagcaatgctgtgaatgtgttcctgggcattggagtggcctggagcattgctgccatctaccacgccgccaatggagagcagttcaaggtgtccccaggcaccctggccttctctgtgaccctcttcaccatctttgccttcatcaacgtgggcgtgctgctgtacagaagaagacctgagatcggcggggagctgggcggccccaggacagccaagctgctgaccagctgcctgtttgtgctgctgtggctgctgtacatcttcttcagcagcctggaggcctactgccacatcaagggcttctag

SEQ ID NO: 171048 - DNA, 2814 bp, synthetic construct
  misc_feature 1..2814: note = Description of Artificial Sequence: Synthetic coding sequence
  source 1..2814: mol_type = other DNA
atgtacaacatgaggcggctgagcctgagccccaccttctccatgggcttccacctgctggtgacagtgtccctgctcttcagccacgtggaccacgtgattgctgagacagagatggagggggagggcaatgagaccggggagtgcaccggcagctactactgcaagaagggcgtcatcctgcccatctgggagccccaggaccccagctttggagacaagatcgcccgggccaccgtgtactttgtggccatggtgtacatgttcctgggcgtgtccatcatcgctgaccgcttcatgagcagcattgaagtcatcaccagccaggagaaggagatcaccatcaagaagcccaatggagagaccaccaagaccaccgtgcgcatctggaatgaaacagtgagcaacctgaccctgatggccctgggcagcagcgcccctgagatcctgctgagcgtcatcgaggtgtgtggccacaacttcaccgctggggacctgggccccagcaccatcgtgggcagcgctgccttcaacatgttcatcatcatcgccctgtgtgtgtatgtggtgcctgatggagagaccaggaagatcaagcacctgcgggtcttctttgtgacagctgcctggagcatctttgcctacacctggctgtacatcatcctgagcgtcatcagccctggggtggtggaggtgtgggagggcctgctgaccttcttcttcttccccatctgtgtggtgtttgcctgggtggccgaccggcggctgctcttctacaagtatgtgtacaagcgctaccgggccggcaagcagaggggcatgatcatcgagcacgagggggaccggcccagcagcaagacagaaattgagatggatggcaaggtggtgaacagccacgtggagaacttcctggatggagccctggtgctggaggtggatgagcgggaccaggatgatgaggaggcccggcgggagatggcccgcatcctgaaggagctgaagcagaagcacccagacaaggagattgagcagctgattgagctggccaactaccaggtgctgagccagcagcagaagagccgggccttctaccgcatccaggccacccggctgatgactggagctggcaacatcctgaagagacatgctgctgaccaggccaggaaggctgtgtccatgcatgaggtgaacacagaggtgacagaaaatgaccctgtgtccaagatcttctttgagcagggcacctaccagtgcctggagaactgtggcaccgtggccctgaccatcatcagaagaggaggagacctgaccaacacagtgtttgtggacttcagaacagaagatggaacagccaatgccggcagtgactatgagttcacagagggcaccgtggtgttcaagccaggggacacccagaaggagatccgggtgggcatcattgatgatgacatctttgaagaagatgagaacttcctggtgcacctgagcaatgtgaaggtgagcagcgaggcctctgaagatggcatcctggaggccaaccacgtgtccaccctggcctgcctgggcagccccagcacagccaccgtgaccatctttgatgatgaccatgctggcatcttcacctttgaggagcctgtgacccacgtgtctgagagcatcggcatcatggaggtgaaggtgctgcggaccagcggggcccggggaaatgtgattgtgccctacaagaccatcgagggcacagcccggggcggcggggaggactttgaggacacctgtggggagctggagttccagaatgatgagatcgtgaagatcatcaccatccgcatctttgaccgggaggagtatgagaaggaatgttccttcagcctggtgctggaggagcccaagtggatcagaagaggcatgaaggagggcttctgcttcacagatgaatatgatgacaagcagcccctgaccagcaaggaggaggaggagaggagaattgctgagatgggccggcccatcctgggggagcacaccaagctggaggtgatcatcgaggagagctatgagttcaagagcacagtggacaagctgatcaagaagaccaacctggccctggtggtgggcaccaacagctggagggagcagttcatcgaggccatcaccgtgtctgctggggaggatgatgatgatgatgaatgtggggaggagaagctgcccagctgctttgattatgtgatgcacttcctgaccgtcttctggaaggtgctgtttgcctttgtgcccccaacagagtactggaatggctgggcctgcttcatcgtgtccatcctgatgattggcctgctgacagccttcatcggggacctggccagccacttcggctgcaccatcggcctgaaggacagcgtgacagctgtggtgtttgtggccctgggcacctctgtgcctgacacctttgccagcaaggtggccgccacccaggaccagtatgcagatgccagcattggaaatgtgacaggcagcaatgctgtgaatgtgttcctgggcatcggcgtggcctggagcattgctgccatctaccacgccgccaacggggagcagttcaaggtgtccccaggcaccctggccttctctgtgaccctcttcaccatctttgccttcatcaacgtgggcgtgctgctgtacagaagaagacctgagattggaggagagctgggcggccccaggacagccaagctgctgaccagctgcctgtttgtgctgctgtggctgctgtacatcttcttcagcagcctggaggcctactgccacatcaagggcttctag

SEQ ID NO: 171049 - DNA, 417 bp, synthetic construct
  misc_feature 1..417: note = Description of Artificial Sequence: Synthetic coding sequence
  source 1..417: mol_type = other DNA
atgtacaacatgaggcggctgagcctgagccccaccttctccatgggcttccacctgctggtgacagtgtccctgctcttcagccacgtggaccacgtgattgctgagacagagatggagggggagggcaatgagaccggggagtgcaccggcagctactactgcaagaagggcgtcatcctgcccatctgggagccccaggaccccagctttggagacaagatcgcccgggccaccgtgtactttgtggccatggtgtacatgttcctgggcgtgtccatcatcgctgaccgcttcatgagcagcattgaagtcatcaccagccaggagaaggagatcaccatcaagaagcccaatggagagaccaccaagaccaccgtgcgcatctggaatgaaacagtgagcaacctgacctag

SEQ ID NO: 171050 - DNA, 2907 bp, synthetic construct; identical to SEQ ID NO: 171039
  misc_feature 1..2907: note = Description of Artificial Sequence: Synthetic coding sequence
  source 1..2907: mol_type = other DNA

SEQ ID NO: 171051 - DNA, 2766 bp, synthetic construct
  misc_feature 1..2766: note = Description of Artificial Sequence: Synthetic coding sequence
  source 1..2766: mol_type = other DNA
atggcccccctggccctggtgggcgtgaccctgctgctggccgccccaccctgcagcggggccgccacccccacccccagcctgcccccacctccagccaatgacagcgacaccagcactggaggctgccagggcagctaccgctgccagcccggggtgctgctgcctgtgtgggagccagatgaccccagcctgggggacaaggccgcccgggctgtggtgtactttgtggccatggtgtacatgttcctgggcgtgtccatcatcgctgaccgcttcatggccgccattgaagtcatcaccagcaaggagaaggagatcaccatcaccaaggccaatggagagacctctgtgggcaccgtgcgcatctggaatgaaacagtgagcaacctgaccctgatggccctgggcagcagcgcccctgagatcctgctgagcgtcatcgaggtgtgtggccacaacttccaggccggggagctgggccctggcaccatcgtgggcagcgctgccttcaacatgtttgtggtgattgctgtgtgcatctacgtgatcccagctggggagagcaggaagatcaagcacctgcgggtcttctttgtgacagcctcctggagcatctttgcctacgtgtggctgtacctgatcctggccgtgttcagccctggggtggtgcaggtgtgggaggccctgctgaccctggtgttcttccctgtgtgtgtggtgtttgcctggatggctgacaagaggctgctcttctacaagtatgtgtacaagcgctacagaacagaccccaggagcggcatcatcatcggggctgagggggacccccccaagagcattgagctggatggcacctttgtgggcgctgaggcccctggagagctgggcggcctgggccctggccctgctgaggcccgggagctggatgccagccggcgggaggtgatccagatcctgaaggacctgaagcagaagcacccagacaaggacctggagcagctggtgggcatcgccaactactatgccctgctgcaccagcagaagagccgggccttctaccgcatccaggccacccggctgatgaccggggctggaaatgtgctgcggagacatgctgctgatgccagcagaagagctgccccagctgagggcgctggagaagatgaagatgatggagccagccgcatcttctttgagcccagcctgtaccactgcctggagaactgtggctctgtgctgctgtctgtgacctgccagggcggggagggcaacagcaccttctacgtggactacagaacagaagatggcagcgccaaggccggcagtgactatgagtacagcgagggcaccctggtgttcaagccaggagagacccagaaggagctgcgcatcggcatcattgatgatgacatctttgaggaggatgagcacttctttgtgcggctgctgaacctgcgggtgggagatgcccagggcatgtttgagccagatggcggcggccggcccaagggccgcctggtggcccccctgctggccaccgtgaccatcctggatgatgaccacgccggcatcttctccttccaggaccggctgctgcacgtgtctgagtgcatgggcaccgtggatgtgcgggtggtgcgcagcagcggggcccggggcaccgtgcggctgccctacagaacagtggatggaacagcccggggcggcggcgtgcactatgaagatgcctgtggggagctggagtttggagatgatgagaccatgaagaccctgcaggtgaagatcgtggatgatgaggagtatgagaagaaggacaacttcttcatcgagctgggccagccccagtggctgaagaggggcatcagcgccctgctgctgaaccagggagatggagacaggaagctgacagctgaggaggaggaggccaggagaattgctgagatgggcaagcctgtgctgggggagaactgccgcctggaggtgatcatcgaggagagctatgacttcaagaacacagtggacaagctgatcaagaagaccaacctggccctggtgattggcacccacagctggagggagcagttcctggaggccatcaccgtgtctgctggagatgaggaggaggaggaggatggcagccgggaggagcggctgcccagctgctttgattatgtgatgcacttcctgaccgtcttctggaaggtgctgtttgcctgtgtgcccccaacagagtactgccacggctgggcctgcttcggcgtgtccatcctggtgattggcctgctgacagccctgattggagacctggccagccacttcggctgcaccgtgggcctgaaggacagcgtgaatgctgtggtgtttgtggccctgggcaccagcatcccagacacctttgccagcaaggtggccgccctgcaggaccagtgtgctgatgccagcattggaaatgtgacaggcagcaatgctgtgaatgtgttcctgggcctgggcgtggcctggagcgtggccgctgtgtactgggccgtgcagggccggccctttgaggtgaggacaggcaccctggccttctctgtgaccctcttcaccgtgtttgcctttgtgggcattgctgtgctgctgtacagaagaagaccccacatcggcggggagctgggcggcccccggggccccaagctggccaccacagccctcttcctgggcctgtggctgctgtacatcctgtttgccagcctggaggcctactgccacatccggggcttctag

SEQ ID NO: 171052 - DNA, 2478 bp, synthetic construct
  misc_feature 1..2478: note = Description of Artificial Sequence: Synthetic coding sequence
  source 1..2478: mol_type = other DNA
atgtttgtggtgattgctgtgtgcatctacgtgatcccagctggggagagcaggaagatcaagcacctgcgggtcttctttgtgacagcctcctggagcatctttgcctacgtgtggctgtacctgatcctggccgtgttcagccctggggtggtgcaggtgtgggaggccctgctgaccctggtgttcttccctgtgtgtgtggtgtttgcctggatggctgacaagaggctgctcttctacaagtatgtgtacaagcgctacagaacagaccccaggagcggcatcatcatcggggctgagggggacccccccaagagcattgagctggatggcacctttgtgggcgctgaggcccctggagagctgggcggcctgggccctggccctgctgaggcccgggagctggatgccagccggcgggaggtgatccagatcctgaaggacctgaagcagaagcacccagacaaggacctggagcagctggtgggcatcgccaactactatgccctgctgcaccagcagaagagccgggccttctaccgcatccaggccacccggctgatgaccggggctggaaatgtgctgcggagacatgctgctgatgccagcagaagagctgccccagctgagggcgctggagaagatgaagatgatggagccagccgcatcttctttgagcccagcctgtaccactgcctggagaactgtggctctgtgctgctgtctgtgacctgccagggcggggagggcaacagcaccttctacgtggactacagaacagaagatggcagcgccaaggccggcagtgactatgagtacagcgagggcaccctggtgttcaagccaggagagacccagaaggagctgcgcatcggcatcattgatgatgacatctttgaggaggatgagcacttctttgtgcggctgctgaacctgcgggtgggagatgcccagggcatgtttgagccagatggcggcggccggcccaagggccgcctggtggcccccctgctggccaccgtgaccatcctggatgatgaccacgccggcatcttctccttccaggaccggctgctgcacgtgtctgagtgcatgggcaccgtggatgtgcgggtggtgcgcagcagcggggcccggggcaccgtgcggctgccctacagaacagtggatggaacagcccggggcggcggcgtgcactatgaagatgcctgtggggagctggagtttggagatgatgagaccatgaagaccctgcaggtgaagatcgtggatgatgaggagtatgagaagaaggacaacttcttcatcgagctgggccagccccagtggctgaagaggggcatcagcgccctgctgctgaaccagggagatggagacaggaagctgacagctgaggaggaggaggccaggagaattgctgagatgggcaagcctgtgctgggggagaactgccgcctggaggtgatcatcgaggagagctatgacttcaagaacacagtggacaagctgatcaagaagaccaacctggccctggtgattggcacccacagctggagggagcagttcctggaggccatcaccgtgtctgctggagatgaggaggaggaggaggatggcagccgggaggagcggctgcccagctgctttgattatgtgatgcacttcctgaccgtcttctggaaggtgctgtttgcctgtgtgcccccaacagagtactgccacggctgggcctgcttcggcgtgtccatcctggtgattggcctgctgacagccctgattggagacctggccagccacttcggctgcaccgtgggcctgaaggacagcgtgaatgctgtggtgtttgtggccctgggcaccagcatccctggcaacaccctgggggactttggaggagtgggcagccagatgagccaggccggggccacccaggaccctgccaagatgagacatgtgcggcagcagggcggcggcgctgctggccctgtgagaagaagagtgcaccggcagagggaccggctgcagagaggagagcgggtgccctggccaggccggcggctggtgtgtggccggcgggtgctgggcggggccggcccccccctgcggggggcccactggcatgctggcctgctgcggcatgccctgcaccggctgcggctgcggggccactgcagagctgctgtgcctgccccagctgcccacagaagaagagctggccggcctgcccggacccaggcccggcaccaccgggccctgcccggccccctggcccctgtgcaccccctgcggcagcccggcggcgtgctgccccaccctggcctgctgggccccagggctgagacccggccccacaggcctcctggggcccgggacagcgctgccccagccctgggcccctggagccccttccccccccggctgggcctgctgtcctgggacagcgccagcctgctgcggcccctgccctggctgtag

SEQ ID NO: 171053 - DNA, 1155 bp, synthetic construct
  misc_feature 1..1155: note = Description of Artificial Sequence: Synthetic coding sequence
  source 1..1155: mol_type = other DNA
atgggcaccgtggatgtgcgggtggtgcgcagcagcggggcccggggcaccgtgcggctgccctacagaacagtggatggaacagcccggggcggcggcgtgcactatgaagatgcctgtggggagctggagtttggagatgatgagaccatgaagaccctgcaggtgaagatcgtggatgatgaggagtatgagaagaaggacaacttcttcatcgagctgggccagccccagtggctgaagaggggcatcagcgccctgctgctgaaccagggagatggagacaggaagctgacagctgaggaggaggaggccaggagaattgctgagatgggcaagcctgtgctgggggagaactgccgcctggaggtgatcatcgaggagagctatgacttcaagaacacagtggacaagctgatcaagaagaccaacctggccctggtgattggcacccacagctggagggagcagttcctggaggccatcaccgtgtctgctggagatgaggaggaggaggaggatggcagccgggaggagcggctgcccagctgctttgattatgtgatgcacttcctgactgtgttctggaaggtgctgtttgcctgtgtgcccccaacagagtactgccacggctgggcctgctttggagtgtccatcctggtgattggcctgctgacagccctgattggagacctggccagccacttcggctgcaccgtgggcctgaaggacagcgtgaatgctgtggtgtttgtggccctgggcaccagcatcccagacacctttgccagcaaggtggccgccctgcaggaccagtgtgctgatgccagcattggaaatgtgacaggcagcaatgctgtgaatgtgttcctgggcctgggcgtggcctggagcgtggccgctgtgtactgggccgtgcagggccggccctttgaggtgaggacaggcaccctggccttctctgtgaccctcttcaccgtgtttgcctttgtgggcattgctgtgctgctgtacagaagaagaccccacatcggcggggagctgggcggcccccggggccccaagctggccaccacagccctcttcctgggcctgtggctgctgtacatcctgtttgccagcctggaggcctactgccacatccggggcttctag

SEQ ID NO: 171054 - DNA, 2034 bp, synthetic construct
  misc_feature 1..2034: note = Description of Artificial Sequence: Synthetic coding sequence
  source 1..2034: mol_type = other DNA
atggctgacaagaggctgctcttctacaagtatgtgtacaagcgctacagaacagaccccaggagcggcatcatcatcggggctgagggggacccccccaagagcattgagctggatggcacctttgtgggcgctgaggcccctggagagctgggcggcctgggccctggccctgctgaggcccgggagctggatgccagccggcgggaggtgatccagatcctgaaggacctgaagcagaagcacccagacaaggacctggagcagctggtgggcatcgccaactactatgccctgctgcaccagcagaagagccgggccttctaccgcatccaggccacccggctgatgaccggggctggaaatgtgctgcggagacatgctgctgatgccagcagaagagctgccccagctgagggcgctggagaagatgaagatgatggagccagccgcatcttctttgagcccagcctgtaccactgcctggagaactgtggctctgtgctgctgtctgtgacctgccagggcggggagggcaacagcaccttctacgtggactacagaacagaagatggcagcgccaaggccggcagtgactatgagtacagcgagggcaccctggtgttcaagccaggagagacccagaaggagctgcgcatcggcatcattgatgatgacatctttgaggaggatgagcacttctttgtgcggctgctgaacctgcgggtgggagatgcccagggcatgtttgagccagatggcggcggccggcccaagggccgcctggtggcccccctgctggccaccgtgaccatcctggatgatgaccacgccggcatcttctccttccaggaccggctgctgcacgtgtctgagtgcatgggcaccgtggatgtgcgggtggtgcgcagcagcggggcccggggcaccgtgcggctgccctacagaacagtggatggaacagcccggggcggcggcgtgcactatgaagatgcctgtggggagctggagtttggagatgatgagaccatgaagaccctgcaggtgaagatcgtggatgatgaggagtatgagaagaaggacaacttcttcatcgagctgggccagccccagtggctgaagaggggcatcagcgccctgctgctgaaccagggagatggagacaggaagctgacagctgaggaggaggaggccaggagaattgctgagatgggcaagcctgtgctgggggagaactgccgcctggaggtgatcatcgaggagagctatgacttcaagaacacagtggacaagctgatcaagaagaccaacctggccctggtgattggcacccacagctggagggagcagttcctggaggccatcaccgtgtctgctggagatgaggaggaggaggaggatggcagccgggaggagcggctgcccagctgctttgattatgtgatgcacttcctgaccgtcttctggaaggtgctgtttgcctgtgtgcccccaacagagtactgccacggctgggcctgcttcggcgtgtccatcctggtgattggcctgctgacagccctgattggagacctggccagccacttcggctgcaccgtgggcctgaaggacagcgtgaatgctgtggtgtttgtggccctgggcaccagcatcccagacacctttgccagcaaggtggccgccctgcaggaccagtgtgctgatgccagcattggaaatgtgacaggcagcaatgctgtgaatgtgttcctgggcctgggcgtggcctggagcgtggccgctgtgtactgggccgtgcagggccggccctttgaggtgaggacaggcaccctggccttctctgtgaccctcttcaccgtgtttgcctttgtgggcattgctgtgctgctgtacagaagaagaccccacatcggcggggagctgggcggcccccggggccccaagctggccaccacagccctcttcctgggcctgtggctgctgtacatcctgtttgccagcctggaggcctactgccacatccggggcttctag

SEQ ID NO: 171055 - DNA, 2448 bp, synthetic construct
  misc_feature 1..2448: note = Description of Artificial Sequence: Synthetic coding sequence
  source 1..2448: mol_type = other DNA
atggtgctgcggagcggcatctgtggcctgagcccccaccgcatcttccccagcctgctggtggtggtggccctggtgggcctgctgcctgtgctgcggagccacggcctgcagctgagccccacagccagcaccatccgcagcagcgagcccccccgggagaggagcattggagatgtgaccacagcccctcctgaggtgaccccagagagcaggcctgtgaaccacagcgtgacagaccacggcatgaagcccaggaaggccttccctgtgctgggcatcgactacacccacgtgaggaccccatttgagatcagcctgtggatcctgctggcctgcctgatgaagattggcttccacgtgatccccaccatcagcagcatcgtgcctgagagctgcctgctgattgtggtgggcctgctggtgggcggcctcatcaagggcgtgggggagaccccacccttcctgcagagtgatgtgttcttcctgttcctgctgccccccatcatcctggatgctggctacttcctgcccctgcggcagttcacagagaacctgggcaccatcctgatctttgctgtggtgggcaccctgtggaatgccttcttcctgggcggcctgatgtatgctgtgtgcctggtgggcggggagcagatcaacaacatcggcctgctggacaacctgctgtttggcagcatcatctctgctgtggaccctgtggccgtgctggccgtgtttgaggagatccacatcaatgagctgctgcacatcctggtgtttggagagagcctgctgaatgatgctgtgacagtggtgctgtaccacctgtttgaggagtttgccaactatgaacatgtgggcatcgtggacatcttcctgggcttcctgtccttctttgtggtggccctgggcggcgtgctggtgggcgtggtgtatggagtgattgctgccttcaccagccgcttcaccagccacatccgggtgattgagcccctgtttgtgttcctgtacagctacatggcctacctgtctgctgagctgttccacctgagcggcatcatggccctgattgccagcggcgtggtgatgaggccctacgtggaggccaacatcagccacaagagccacaccaccatcaagtacttcctgaagatgtggagctctgtgtctgagaccctcatcttcatcttcctgggcgtgtccacagtggccggcagccaccactggaactggacctttgtgatcagcaccctgctcttctgcctgattgcccgggtgctgggcgtgctgggcctgacctggttcatcaacaagttcagaattgtgaagctgacccccaaggaccagttcatcatcgcctacggcggcctgcggggggccatcgccttcagcctgggctacctgctggacaagaagcacttccccatgtgtgacctcttcctgacagccatcatcaccgtcatcttcttcaccgtgtttgtgcagggcatgaccatccggcccctggtggacctgctggccgtgaagaagaagcaggagaccaagaggagcatcaatgaggagatccacacccagttcctggaccacctgctgaccggcatcgaggacatctgtggccactacggccaccaccactggaaggacaagctgaaccgcttcaacaagaagtatgtgaagaagtgcctgattgctggggagaggagcaaggagccccagctgattgccttctaccacaagatggagatgaagcaggccatcgagctggtggagagcggcggcatgggcaagatccccagcgctgtgtccacagtgtccatgcagaacatccaccccaagagcctgcccagcgagcgcatcctgcctgccctgagcaaggacaaggaggaggagatcaggaagatcctgaggaacaacctgcagaagacccggcagaggctgcggagctacaacagacacaccctggtggccgacccctatgaggaggcctggaaccagatgctgctgcggcggcagaaggcccggcagctggagcagaagatcaacaactacctgactgtgcctgcccacaagctggacagccccaccatgagccgggccagaattggaagtgaccccctggcctatgagcccaaggaggacctgcctgtgatcaccattgatcctgccagcccccagagccctgagagcgtggacctggtgaatgaggagctgaagggcaaggtgctgggcctgagccgggaccctgccaaggtggccgaggaggatgaagatgatgatggcggcatcatgatgaggagcaaggagaccagcagccctggaacagatgatgtgttcaccccagcccccagcgacagccccagcagccagaggatccagcgctgcctgagtgaccccggcccccaccctgagcccggggagggggagcccttcttccccaagggccagtag

SEQ ID NO: 171056 - DNA, 408 bp, synthetic construct
  misc_feature 1..408: note = Description of Artificial Sequence: Synthetic coding sequence
  source 1..408: mol_type = other DNA
atggtgctgcggagcggcatctgtggcctgagcccccaccgcatcttccccagcctgctggtggtggtggccctggtgggcctgctgcctgtgctgcggagccacggcctgcagctgagccccacagccagcaccatccgcagcagcgagcccccccgggagaggagcattggagatgtgaccacagcccctcctgaggtgaccccagagagcaggcctgtgaaccacagcgtgacagaccacggcatgaagcccaggaaggccttccctgtgctgggcatcgactacacccacgtgaggaccccatttgagatcagcctgtggatcctgctggcctgcctgatgaagattggcttcccctgtgacccccactacctgaagcacaggcctggagagctgcctgcctag

SEQ ID NO: 171057 - DNA, 1668 bp, synthetic construct
  misc_feature 1..1668: note = Description of Artificial Sequence: Synthetic coding sequence
  source 1..1668: mol_type = other DNA
atggtgctgcggagcggcatctgtggcctgagcccccaccgcatcttccccagcctgctggtggtggtggccctggtgggcctgctgcctgtgctgcggagccacggcctgcagctgagccccacagccagcaccatccgcagcagcgagcccccccgggagaggagcattggagatgtgaccacagcccctcctgaggtgaccccagagagcaggcctgtgaaccacagcgtgacagaccacggcatgaagcccaggaaggccttccctgtgctgggcatcgactacacccacgtgaggaccccatttgagatcagcctgtggatcctgctggcctgcctgatgaagattggcttccacgtgatccccaccatcagcagcatcgtgcctgagagctgcctgctgattgtggtgggcctgctggtgggcggcctcatcaagggcgtgggggagaccccacccttcctgcagagtgatgtgttcttcctgttcctgctgccccccatcatcctggatgctggctacttcctgcccctgcggcagttcacagagaacctgggcaccatcctgatctttgctgtggtgggcaccctgtggaatgccttcttcctgggcggcctgatgtatgctgtgtgcctggtgggcggggagcagatcaacaacatcggcctgctggacaacctgctgtttggcagcatcatctctgctgtggaccctgtggccgtgctggccgtgtttgaggagatccacatcaatgagctgctgcacatcctggtgtttggagagagcctgctgaatgatgctgtgacagtggtgctgtaccacctgtttgaggagtttgccaactatgaacatgtgggcatcgtggacatcttcctgggcttcctgtccttctttgtggtggccctgggcggcgtgctggtgggcgtggtgtatggagtgattgctgccttcaccagccgcttcaccagccacatccgggtgattgagcccctgtttgtgttcctgtacagctacatggcctacctgtctgctgagctgttccacctgagcggcatcatggccctgattgccagcggcgtggtgatgaggccctacgtggaggccaacatcagccacaagagccacaccaccatcaagtacttcctgaagatgtggagctctgtgtctgagaccctcatcttcatcttcctgggcgtgtccacagtggccggcagccaccactggaactggacctttgtgatcagcaccctgctcttctgcctgattgcccgggtgctgggcgtgctgggcctgacctggttcatcaacaagttcagaattgtgaagctgacccccaaggaccagttcatcatcgcctacggcggcctgcggggggccatcgccttcagcctgggctacctgctggacaagaagcacttccccatgtgtgacctcttcctgacagccatcatcaccgtcatcttcttcaccgtgtttgtgcaggtgctgggccagggccgggccggcccctgcctgggggacccccacaggctcttcccctggaaggagaggaaggcctgtgacctgaagtgtgacagcagccccagcagcaccaccaacctgctgtgtgacctgggccgggccaccccacccttctgggcctctgtgagcagcatcgtgaagtag

SEQ ID NO: 171058 - DNA, 960 bp, synthetic construct
  misc_feature 1..960: note = Description of Artificial Sequence: Synthetic coding sequence
  source 1..960: mol_type = other DNA
atgaccatccggcccctggtggacctgctggccgtgaagaagaagcaggagaccaagaggagcatcaatgaggagatccacacccagttcctggaccacctgctgaccggcatcgaggacatctgtggccactacggccaccaccactggaaggacaagctgaaccgcttcaacaagaagtatgtgaagaagtgcctgattgctggggagaggagcaaggagccccagctgattgccttctaccacaagatggagatgaagcaggccatcgagctggtggagagcggcggcatgggcaagatccccagcgctgtgtccacagtgtccatgcagaacatccaccccaagagcctgcccagcgagcgcatcctgcctgccctgagcaaggacaaggaggaggagatcaggaagatcctgaggaacaacctgcagaagacccggcagaggctgcggagctacaacagacacaccctggtggccgacccctatgaggaggcctggaaccagatgctgctgcggcggcagaaggcccggcagctggagcagaagatcaacaactacctgactgtgcctgcccacaagctggacagccccaccatgagccgggccagaattggaagtgaccccctggcctatgagcccaaggaggacctgcctgtgatcaccattgatcctgccagcccccagagccctgagagcgtggacctggtgaatgaggagctgaagggcaaggtgctgggcctgagccgggaccctgccaaggtggccgaggaggatgaagatgatgatggcggcatcatgatgaggagcaaggagaccagcagccctggaacagatgatgtgttcaccccagcccccagcgacagccccagcagccagaggatccagcgctgcctgagtgaccccggcccccaccctgagcccggggagggggagcccttcttccccaagggccagtag

SEQ ID NO: 171059 - DNA, 675 bp, synthetic construct
  misc_feature 1..675: note = Description of Artificial Sequence: Synthetic coding sequence
  source 1..675: mol_type = other DNA
atggagatgaagcaggccatcgagctggtggagagcggcggcatgggcaagatccccagcgctgtgtccacagtgtccatgcagaacatccaccccaagagcctgcccagcgagcgcatcctgcctgccctgagcaaggacaaggaggaggagatcaggaagatcctgaggaacaacctgcagaagacccggcagaggctgcggagctacaacagacacaccctggtggccgacccctatgaggaggcctggaaccagatgctgctgcggcggcagaaggcccggcagctggagcagaagatcaacaactacctgactgtgcctgcccacaagctggacagccccaccatgagccgggcccgcatcggcagtgaccccctggcctatgagcccaaggaggacctgcccgtcatcaccatcgaccctgccagcccccagagccctgagagcgtggacctggtgaatgaggagctgaagggcaaggtgctgggcctgagccgggaccctgccaaggtggccgaggaggatgaagatgatgatggcggcatcatgatgaggagcaaggagaccagcagccctggaacagatgatgtgttcaccccagcccccagcgacagccccagcagccagaggatccagcgctgcctgagtgaccccggcccccaccctgagtag

SEQ ID NO: 171060 - DNA, 1431 bp, synthetic construct
  misc_feature 1..1431: note = Description of Artificial Sequence: Synthetic coding sequence
  source 1..1431: mol_type = other DNA
atggcctacctgtctgctgagctgttccacctgagcggcatcatggccctgattgccagcggcgtggtgatgaggccctacgtggaggccaacatcagccacaagagccacaccaccatcaagtacttcctgaagatgtggagctctgtgtctgagaccctcatcttcatcttcctgggcgtgtccacagtggccggcagccaccactggaactggaccttcgtcatcagcaccctgctcttctgcctgattgcccgggtgctgggcgtgctgggcctgacctggttcatcaacaagttccgcatcgtgaagctgacccccaaggaccagttcatcatcgcctatggaggcctgcggggggccatcgccttcagcctgggctacctgctggacaagaagcacttccccatgtgtgacctcttcctgacagccatcatcaccgtcatcttcttcaccgtgtttgtgcagggcatgaccatccggcccctggtggacctgctggccgtgaagaagaagcaggagaccaagaggagcatcaatgaggagatccacacccagttcctggaccacctgctgactggaattgaggacatctgtggccactacggccaccaccactggaaggacaagctgaaccgcttcaacaagaagtatgtgaagaagtgcctgattgctggggagaggagcaaggagccccagctgattgccttctaccacaagatggagatgaagcaggccatcgagctggtggagagcggcggcatgggcaagatccccagcgctgtgtccacagtgtccatgcagaacatccaccccaagagcctgcccagcgagcgcatcctgcctgccctgagcaaggacaaggaggaggagatcaggaagatcctgaggaacaacctgcagaagacccggcagaggctgcggagctacaacagacacaccctggtggccgacccctatgaggaggcctggaaccagatgctgctgcggcggcagaaggcccggcagctggagcagaagatcaacaactacctgactgtgcctgcccacaagctggacagccccaccatgagccgggcccgcatcggcagtgaccccctggcctatgagcccaaggaggacctgcccgtcatcaccatcgaccctgccagcccccagagccctgagagcgtggacctggtgaatgaggagctgaagggcaaggtgctgggcctgagccgggaccctgccaaggtggccgaggaggatgaagatgatgatggcggcatcatgatgaggagcaaggagaccagcagccctggaacagatgatgtgttcaccccagcccccagcgacagccccagcagccagaggatccagcgctgcctgagtgaccccggcccccaccctgagcctggagagggggagcccttcttccccaagggccagtag

SEQ ID NO: 171061 - DNA, 1626 bp, synthetic construct; identical to SEQ ID NO: 156394
  misc_feature 1..1626: note = Description of Artificial Sequence: Synthetic coding sequence
  source 1..1626: mol_type = other DNA

SEQ ID NO: 171062 - DNA, 2505 bp, synthetic construct
  misc_feature 1..2505: note = Description of Artificial Sequence: Synthetic coding sequence
  source 1..2505: mol_type = other DNA
atgtggggcctgggcgcccggggccctgaccggggcctgctgctggccctggccctgggcggcctggcccgggccggcggcgtggaggtggagcccggcggggcccacggggagagcggcggcttccaggtggtgacctttgagtgggcccacgtgcaggacccctacgtgattgccctgtggatcctggtggccagcctggccaagattggcttccacctgagccacaaggtgacctctgtggtgcctgagagcgccctgctgattgtgctgggcctggtgctgggcggcatcgtgtgggccgctgaccacatcgccagcttcaccctgacccccaccgtcttcttcttctacctgctgccccccatcgtgctggatgctggctacttcatgcccaacagactcttctttggaaacctgggcaccatcctgctgtatgctgtggtgggcaccgtgtggaatgctgccaccaccggcctgagcctgtatggagtcttcctgagcggcctgatgggagacctgcagatcggcctgctggacttcctgctgtttggcagcctgatggctgctgtggaccctgtggccgtgctggccgtgtttgaggaggtgcacgtgaatgaggtgctcttcatcatcgtgtttggagagagcctgctgaatgatgctgtgacagtggtgctgtacaacgtgtttgagagctttgtggccctgggcggggacaacgtgactggagtggactgtgtgaagggcatcgtgtccttctttgtggtgtccctgggcggcaccctggtgggcgtggtgtttgccttcctgctgagcctggtgacccgcttcaccaagcacgtgcgcatcatcgagcccggctttgtgttcatcatctcctacctgagctacctgaccagcgagatgctgagcctgagcgccatcctggccatcaccttctgtggcatctgctgccagaagtatgtgaaggccaacatcagcgagcagagcgccaccaccgtgcgctacaccatgaagatgctggccagcagcgctgagaccatcatcttcatgttcctgggcatctctgctgtgaaccccttcatctggacctggaacacagcctttgtgctgctgaccctggtgttcatctctgtgtaccgggccatcggcgtggtgctgcagacctggctgctgaaccgctacaggatggtgcagctggagcccatcgaccaggtggtgctgtcctatggaggcctgcggggagctgtggcctttgccctggtggtgctgctggatggagacaaggtgaaggagaagaacctgtttgtgtccaccaccatcatcgtggtgttcttcaccgtcatcttccagggcctgaccatcaagcccctggtgcagtggctgaaggtgaagaggtctgagcaccgggagccccggctgaatgagaagctgcacggccgggcctttgaccacatcctgagcgccatcgaggacatcagcggccagatcggccacaactacctgcgggacaagtggagccactttgacaggaagttcctgagccgggtgctgatgagaagaagtgcccagaagagccgggaccgcatcctgaatgtgttccacgagctgaacctgaaggatgccatctcctatgtggccgagggggagcggcggggcagcctggccttcatccgcagccccagcacagacaacgtggtgaatgtggacttcacccccaggagcagcacagtggaggcctctgtgtcctacctgctgagagaaaatgtgtctgctgtgtgcctggacatgcagagcctggagcagaggagaagaagcatcagagatgctgaggacatggtgacccaccacaccctgcagcagtacctgtacaagccccggcaggagtacaagcacctgtacagcagacatgagctgacccccacagaagatgagaagcaggaccgggagatcttccacaggaccatgaggaagaggctggagagcttcaagagcaccaagctgggcctgaaccagaacaagaaggccgccaagctgtacaagcgggagcgggcccagaagagaagaaacagcagcatccccaacgggaagctgcccatggagagccctgcccagaacttcaccatcaaggagaaggacctggagctgagtgacacagaggagccccccaactatgatgaggagatgtctgggggcatcgagttcctggcctctgtgaccaaggacacagccagtgacagccctgctggcatcgacaaccctgtgttctccccagatgaggccctggacaggagcctgctggcccggctgcccccctggctgagccctggagagaccgtggtgcccagccagagggcccggacccagatcccctacagccctggcaccttctgccgcctgatgcccttccggctgagcagcaagtctgtggacagcttcctgcaggctgatggccctgaggagcggcccccagctgccctgcctgagagcacccacatgtag

SEQ ID NO: 171063 - DNA, 1077 bp, synthetic construct
  misc_feature 1..1077: note = Description of Artificial Sequence: Synthetic coding sequence
  source 1..1077: mol_type = other DNA
atgtctgcagatgctgctgctggggcccccctgccccggctgtgctgcctggagaagggccccaacggctacggcttccacctgcatggagagaagggcaagctgggccagtacatccggctggtggagcccggcagccctgctgagaaggccggcctgctggccggggaccggctggtggaggtgaatggagaaaatgtggagaaggagacccaccagcaggtggtgagccgcatccgggccgccctgaatgctgtgcggctgctggtggtggaccctgagacagatgagcagctgcagaagctgggcgtgcaggtgcgggaggagctgctgcgggcccaggaggcccctggccaggccgagcccccagctgctgctgaggtgcagggcgctggaaatgaaaatgagccccgggaggccgacaagagccaccctgagcagcgggagctgcggccccggctgtgcaccatgaagaagggccccagcggctacggcttcaacctgcacagcgacaagagcaagccaggccagttcatccgctctgtggaccctgacagccctgctgaggccagcggcctgcgggcccaggacagaattgtggaggtgaatggagtgtgcatggagggcaagcagcacggagatgtggtgtctgccatccgggctggaggagatgagaccaagctgctggtggtggaccgggagacagatgagttcttcaagaagtgcagggtcatccccagccaggagcacctgaatggccccctgcctgtgcccttcaccaatggagagatccagaaggagaacagccgggaggccctggccgaggccgccctggagagccccaggcctgccctggtgcgcagcgccagcagtgacaccagcgaggagctgaacagccaggacagcccccccaagcaggacagcacagcccccagcagcaccagcagcagtgaccccatcctggacttcaacatcagcctggccatggccaaggagcgggcccaccagaagaggagcagcaagagggccccccagatggactggagcaagaagaatgagctgttcagcaacctgtag

SEQ ID NO: 171064 - DNA, 822 bp, synthetic construct
  misc_feature 1..822: note = Description of Artificial Sequence: Synthetic coding sequence
  source 1..822: mol_type = other DNA
atgtctgcagatgctgctgctggggcccccctgccccggctgtgctgcctggagaaggagacccaccagcaggtggtgagccgcatccgggccgccctgaatgctgtgcggctgctggtggtggaccctgagacagatgagcagctgcagaagctgggcgtgcaggtgcgggaggagctgctgcgggcccaggaggcccctggccaggccgagcccccagctgctgctgaggtgcagggcgctggaaatgaaaatgagccccgggaggccgacaagagccaccctgagcagcgggagctgcggccccggctgtgcaccatgaagaagggccccagcggctacggcttcaacctgcacagcgacaagagcaagccaggccagttcatccgctctgtggaccctgacagccctgctgaggccagcggcctgcgggcccaggacagaattgtggaggtgaatggagtgtgcatggagggcaagcagcacggagatgtggtgtctgccatccgggctggaggagatggcagcggcggcggcaaccagagaggagctgagttcccccggcagccccccaagacaggcctgcacagcgccctggtgtacctgctgctgcggccccacccccggctgcagcacctgcccggccacggccagcgggagggccccccagagacccagcagcagacaggccctgcagatggcctggagcaggagaagaggaccctgcagcagcccctgagcgccctgctgcccccaagtgactggcagggccgggccagcatccccccccacctgttccccagcccccagctgctgccctag

SEQ ID NO: 171065 - DNA, 1014 bp, synthetic construct
  misc_feature 1..1014: note = Description of Artificial Sequence: Synthetic coding sequence
  source 1..1014: mol_type = other DNA
atggccgcccctgagcccctgcggccccggctgtgccgcctggtgcggggggagcagggctacggcttccacctgcacggggagaagggcagaagaggccagttcatcagaagagtggagcccggcagccctgctgaggccgccgccctgcgggccggggaccggctggtggaggtgaatggagtgaatgtggagggggagacccaccaccaggtggtgcagaggatcaaggctgtggagggccagacccggctgctggtggtggaccaggagacagatgaggagctgcggcggcggcagctgacctgcacagaggagatggcccagaggggcctgcccccagcccatgacccctgggagcccaagccagactgggcccacacaggcagccacagcagcgaggccggcaagaaggatgtgtctggccccctgcgggagctgcggccccggctgtgccacctgaggaagggcccccagggctacggcttcaacctgcacagcgacaagagccggcccggccagtacatccgctctgtggaccccggcagccctgctgcccggagcggcctgcgggcccaggaccggctgattgaggtgaatggccagaatgtggagggcctgcggcatgctgaggtggtggccagcatcaaggcccgggaggatgaggcccggctgctggtggtggaccctgagacagatgagcacttcaagaggctgcgggtgacccccacagaggagcacgtggagggccccctgcccagccctgtgaccaacggcaccagccctgcccagctgaatggaggcagcgcctgcagcagcagaagtgacctgcccggcagtgacaaggacacagaagatggcagcgcctggaagcaggaccccttccaggagagcggcctgcacctgagccccacagctgctgaggccaaggagaaggcccgggccatgagggtgaacaagagggccccccagatggactggaacaggaagcgggagatcttcagcaacttctag

SEQ ID NO: 171066 - DNA, 981 bp, synthetic construct
  misc_feature 1..981: note = Description of Artificial Sequence: Synthetic coding sequence
  source 1..981: mol_type = other DNA
atggccgcccctgagcccctgcggccccggctgtgccgcctggtgcggggggagcagggctacggcttccacctgcacggggagaagggcagaagaggccagttcatcagaagagtggagcccggcagccctgctgaggccgccgccctgcgggccggggaccggctggtggaggtgaatggagtgaatgtggagggggagacccaccaccaggtggtgcagaggatcaaggctgtggagggccagacccggctgctggtggtggaccaggagacagatgaggagctgcggcggcggcagctgacctgcacagaggagatggcccagaggggcctgcccccagcccatgacccctgggagcccaagccagactgggcccacacaggcagccacagcagcgaggccggcaagaaggatgtgtctggccccctgcgggagctgcggccccggctgtgccacctgaggaagggcccccagggctacggcttcaacctgcacagcgacaagagccggcccggccagtacatccgctctgtggaccccggcagccctgctgcccggagcggcctgcgggcccaggaccggctgattgaggtgaatggccagaatgtggagggcctgcggcatgctgaggtggtggccagcatcaaggcccgggaggatgaggcccggctgctggtggtggaccctgagacagatgagcacttcaagaggctgcgggtgacccccacagaggagcacgtggagggccccctgcccagccctgtgaccaacggcaccagccctgcccagctgaatggaggcagcgcctgcagcagcagaagtgacctgcccggcagtgacaaggacacagaggagagcggcctgcacctgagccccacagctgctgaggccaaggagaaggcccgggccatgagggtgaacaagagggccccccagatggactggaacaggaagcgggagatcttcagcaacttctag

SEQ ID NO: 171067 - DNA, 2397 bp, synthetic construct
  misc_feature 1..2397: note = Description of Artificial Sequence: Synthetic coding sequence
  source 1..2397: mol_type = other DNA
atggccctgcagatgtttgtgacctacagcccctggaactgcctgctgctgctggtggccctggagtgcagcgaggccagcagtgacctgaatgaaagtgccaacagcacagcccagtatgccagcaatgcctggtttgctgctgccagcagcgagcctgaggagggcatctctgtgtttgagctggactatgactatgtgcagatcccctatgaggtgaccctgtggatcctgctggccagcctggccaagattggcttccacctgtaccaccggctgcccggcctgatgcctgagagctgcctgctgatcctggtgggcgccctggtgggcggcatcatctttggaacagaccacaagagcccccctgtgatggacagcagcatctacttcctgtacctgctgccccccatcgtgctggagggcggctacttcatgcccacccggcccttctttgaaaatattggcagcatcctgtggtgggccgtgctgggcgccctgatcaatgccctgggcatcggcctgagcctgtacctgatctgccaggtgaaggccttcggcctgggagatgtgaacctgctgcagaacctgctgtttggcagcctcatctctgctgtggaccctgtggccgtgctggccgtgtttgaggaggcccgggtgaatgagcagctgtacatgatgatctttggagaggccctgctgaatgatggcatcaccgtggtgctgtacaacatgctgattgccttcaccaagatgcacaagtttgaggacatcgagaccgtggacatcctggccggctgtgcccgcttcatcgtggtgggcctgggcggcgtgctgtttggcatcgtgtttggcttcatcagcgccttcatcacccgcttcacccagaacatcagcgccatcgagcccctgattgtgttcatgttctcctacctgagctacctggccgctgagaccctgtacctgagcggcatcctggccatcacagcctgtgctgtgaccatgaagaagtatgtggaggagaatgtgtcccagaccagctacaccaccatcaagtacttcatgaagatgctgagctctgtgtctgagaccctcatcttcatcttcatgggcgtgtccacagtgggcaagaaccacgagtggaactgggccttcatctgcttcaccctggccttctgccagatctggagggccatctctgtgtttgccctcttctacatcagcaaccagttccgcaccttccccttcagcatcaaggaccagtgcatcatcttctacagcggcgtgcggggggccggcagcttcagcctggccttcctgctgcccctgagcctcttccccaggaagaagatgtttgtgacagccaccctggtggtgatctacttcaccgtcttcatccagggcatcaccgtgggccccctggtgcgctacctggatgtgaagaagaccaacaagaaggagagcatcaatgaggagctgcacatccggctgatggaccacctgaaggccggcattgaagatgtgtgtggccactggagccactaccaggtgcgggacaagttcaagaagtttgaccaccgctacctgaggaagatcctgatcaggaagaacctgcccaagagcagcatcgtgtccctgtacaagaagctggagatgaagcaggccatcgagatggtggagaccggcatcctgagcagcacagccttcagcatcccccaccaggcccagaggatccagggcatcaagaggctgagcccagaagatgtggagagcatccgggacatcctgaccagcaacatgtaccaggtgcggcagaggaccctgagctacaacaagtacaacctgaagccccagaccagcgagaagcaggccaaggagatcctgatccggcggcagaacaccctgcgggagagcatgaggaagggccacagcctgccctggggcaagccagctggcaccaagaacatccgctacctgagctacccctacggcaacccccagagcgctggccgggacaccagggctgctggcttcagtgatgatgacagcagtgaccccggcagccccagcatcaccttcagcgcctgcagcagaattggcagcctgcagaagcaggaggcccaggagatcatccccatgaagagcctgcaccggggcaggaaggccttctcctttggctaccagaggaacaccagccaggaggagtacctgggcggcgtgagaagagtggccctgcggcccaagcccctcttccacgctgtggatgaggagggggagagcggcggggagagcgagggcaaggccagcctggtggaggtgcgcagccgctggacagctgaccacggccacggccgggaccaccacaggagccacagccccctgctgcagaagaagtag

SEQ ID NO: 171068 - DNA, 2691 bp, synthetic construct
  misc_feature 1..2691: note = Description of Artificial Sequence: Synthetic coding sequence
  source 1..2691: mol_type = other DNA
atgctgcgggccgccctgagcctgctggccctgcccctggccggggctgctgaggagcccacccagaagccagagagccctggagagcccccacctggcctggagctgttccgctggcagtggcatgaggtggaggccccctacctggtggccctgtggatcctggtggccagcctggccaagatcgtgttccacctgagcaggaaggtgaccagcctggtgcctgagagctgcctgctgatcctgctgggcctggtgctgggcggcatcgtgctggccgtggccaagaaggccgagtaccagctggagcccggcaccttcttcctgttcctgctgccccccatcgtgctggacagcggctacttcatgcccagccgcctcttctttgacaacctgggcgccatcctgacctatgctgtggtgggcaccctgtggaatgccttcaccaccggggccgccctgtggggcctgcagcaggccggcctggtggccccccgggtgcaggccggcctgctggacttcctgctgtttggcagcctcatctctgctgtggaccctgtggccgtgctggccgtgtttgaggaggtgcacgtgaatgagaccctcttcatcatcgtgtttggagagagcctgctgaatgatgctgtgacagtggtgctgtacaaggtgtgcaacagctttgtggagatgggcagcgccaacgtgcaggccacagactacctgaagggcgtggccagcctgtttgtggtgtccctgggcggcgctgctgtgggcctggtgtttgccttcctgctggccctgaccacccgcttcaccaagagggtgcgcatcatcgagcccctgctggtgttcctgctggcctatgctgcctacctgacagctgagatggccagcctgagcgccatcctggccgtgaccatgtgtggcctgggctgcaagaagtatgtggaggccaacatcagccacaagagcaggaccaccgtgaagtacaccatgaagaccctggccagctgtgccgagaccgtcatcttcatgctgctgggcatctctgctgtggacagcagcaagtgggcctgggacagcggcctggtgctgggcaccctcatcttcatcctcttcttccgggccctgggcgtggtgctgcagacctgggtgctgaaccagttccggctggtgcccctggacaagattgaccaggtggtgatgtcctatggaggcctgcggggagctgtggcctttgccctggtgatcctgctggacaggaccaaggtgcctgccaaggactactttgtggccaccaccatcgtggtggtgttcttcaccgtgattgtgcagggcctgaccatcaagcccctggtgaagtggctgaaggtgaagaggtctgagcaccacaagcccaccctgaaccaggagctgcacgagcacacctttgaccacatcctggccgctgtggaggatgtggtgggccaccacggctaccactactggagggaccgctgggagcagtttgacaagaagtacctgagccagctgctgatgagaagaagtgcctaccgcatccgggaccagatctgggatgtgtactaccgcctgaacatcagagatgccatcagctttgtggaccagggcggccacgtgctgagcagcacaggcctgaccctgcccagcatgcccagcaggaacagcgtggccgagacctctgtgaccaacctgctgcgggagagcggcagcggggcctgcctggacctgcaggtgattgacacagtgcgcagcggccgggaccgggaggatgctgtgatgcaccacctgctgtgtggcggcctgtacaagccccggcggcgctacaaggccagctgcagccgccacttcatcagtgaagatgcccaggagcggcaggacaaggaggtgttccagcagaacatgaagaggcggctggagagcttcaagagcaccaagcacaacatctgcttcaccaagagcaagccccggcccaggaagacaggaagaaggaagaaggatggagtggccaatgctgaggccaccaacgggaagcaccggggcctgggcttccaggacacagctgctgtgatcctgactgtggagagcgaggaggaggaggaggagagtgacagcagcgagacagagaaggaggatgatgagggcatcatctttgtggcccgggccaccagcgaggtgctgcaggagggcaaggtgtctggcagcctggaggtgtgccccagcccccgcatcatcccccccagccccacctgtgccgagaaggagctgccctggaagagcggccagggcgacctggccgtgtatgtgtcctctgagaccaccaagatcgtgcctgtggacatgcagacaggctggaaccagagcatcagcagcctggagagcctggccagccccccctgcaaccaggcccccatcctgacctgcctgcccccccacccccggggcacagaggagccccaggtgcccctgcacctgcccagcgaccccaggagcagctttgccttcccccccagcctggccaaggccggccgcagccgctctgagagcagcgctgacctgccccagcagcaggagctgcagcccctgatgggccacaaggaccacacccacctgagccctggaacagccaccagccactggtgcatccagttcaacagaggcagccggctgtag

SEQ ID NO: 171069 - DNA, 1308 bp, synthetic construct
  misc_feature 1..1308: note = Description of Artificial Sequence: Synthetic coding sequence
  source 1..1308: mol_type = other DNA
atgagaagaagtgcctaccgcatccgggaccagatctgggatgtgtactaccgcctgaacatcagagatgccatcagctttgtggaccagggcggccacgtgctgagcagcacaggcctgaccctgcccagcatgcccagcaggaacagcgtggccgagacctctgtgaccaacctgctgcgggagagcggcagcggggcctgcctggacctgcaggtgattgacacagtgcgcagcggccgggaccgggaggatgctgtgatgcaccacctgctgtgtggcggcctgtacaagcccaggagaagaattgagctgaggacagagccctgtggcatgctgctgaagaccttcctgcagacagacatggaccaggccttcctgggcaccaagccagctgctgtggccaccagcagccagaggatgaggaggagcggccgcacccggcgcagcagcagcaggatgaagaggcggctggagagcttcaagagcaccaagcacaacatctgcttcaccaagagcaagccccggcccaggaagacaggccgcaggaagaaggatggagtggccaatgctgaggccaccaacgggaagcaccggggcctgggcttccaggacacagctgctgtgatcctgactgtggagagcgaggaggaggaggaggagagtgacagcagcgagacagagaaggaggatgatgagggcatcatctttgtggcccgggccaccagcgaggtgctgcaggagggcaaggtgtctggcagcctggaggtgtgccccagcccccgcatcatcccccccagccccacctgtgccgagaaggagctgccctggaagagcggccagggcgacctggccgtgtatgtgagcagcgagaccaccaagatcgtgcctgtggacatgcagacaggctggaaccagagcatcagcagcctggagagcctggccagccccccctgcaaccaggcccccatcctgacctgcctgcccccccacccccggggcacagaggagccccaggtgcccctgcacctgcccagcgaccccaggagcagctttgccttcccccccagcctggccaaggccggcctggccgtgcgggccgccctgaccagccccagcagccgcagctgcagccccagctgggccaccaggaccacccccatcagcgcccaggcccccctgcccccaactggagccagcagcagcacagaagctgctggctgcagcagccggccccggggcggggccggcggcggcatccctgtgggcagcgccccctgggtgatgggccgggccctggagacctag

SEQ ID NO: 171070 - DNA, 2106 bp, synthetic construct
  misc_feature 1..2106: note = Description of Artificial Sequence: Synthetic coding sequence
  source 1..2106: mol_type = other DNA
atggcccggcggggctggaggcgggcccccctgcggcggggcgtgggcagcagcccccgggcccggcggctgatgaggcccctgtggctgctgctggccgtgggcgtgtttgactgggccggggccagtgatggcggcggcggggaggcccgggccatggatgaggagatcgtgtctgagaagcaggccgaggagagccaccggcaggacagcgccaacctgctgatcttcatcctgctgctgaccctgaccatcctgaccatctggctgttcaagcaccggcgggcccgcttcctgcacgagaccggcctggccatgatctacggcctgctggtgggcctggtgctgcgctatggcatccacgtgcccagtgatgtgaacaacgtgaccctgagctgtgaggtgcagagcagccccaccaccctgctggtgaatgtgtctgggaagttctatgagtacatgctgaagggggagatcagcagccatgagctgaacaacgtgcaggacaatgagatgctgaggaaggtgacctttgatcctgaggtgttcttcaacatcctgctgccccccatcatcttctacgccggctacagcctgaagagaagacacttcttcaggaacctgggcagcatcctggcctatgccttcctgggcacagccatcagctgcttcgtcatcggcagcatcatgtatggctgtgtgaccctgatgaaggtgacaggccagctggccggggacttctacttcacagactgcctgctgtttggagccatcgtgtctgccacagatcctgtgacagtgctggccatcttccacgagctgcaggtggatgtggagctgtatgccctgctgtttggagagagcgtgctgaatgatgctgtggccatcgtgctgagcagcagcatcgtggcctaccagcctgctggggacaacagccacacctttgatgtgacagccatgttcaagagcatcggcatcttcctgggcatcttcagcggcagctttgccatgggcgccgccactggagtggtgacagccctggtgaccaagttcaccaagctgcgggagttccagctgctggagaccggcctcttcttcctgatgtcctggagcaccttcctgctggccgaggcctggggcttcaccggggtggtggccgtgctcttctgtggcatcacccaggcccactacacctacaacaacctgagcacagagagccagcacaggaccaagcagctgtttgagctgctgaacttcctggccgagaacttcatcttctcctacatgggcctgaccctcttcaccttccagaaccacgtgttcaaccccacctttgtggtgggcgcctttgtggccatcttcctgggccgggccgccaacatctaccccctgagcctgctgctgaacctgggccgccgcagcaagattggcagcaacttccagcacatgatgatgtttgctggcctgcggggggccatggcctttgccctggccatccgggacacagccacctacgcccggcagatgatgttcagcaccaccctgctgattgtgttcttcaccgtgtgggtgtttggaggcggcaccacagccatgctgagctgcctgcacatccgggtgggcgtggacagcgaccaggagcacctgggcgtgcctgaaaatgaaagaaggaccaccaaggccgagagcgcctggctgttcaggatgtggtacaactttgaccacaactacctgaagcccctgctgacccacagcggcccccccctgaccaccaccctgcctgcctgctgcggccccatcgcccgctgcctgaccagcccccaggcctatgagaaccaggagcagctgaaggatgatgacagcgacctgatcctgaatgatggagacatcagcctgacctacggggacagcacagtgaacacagagcccgccaccagcagcgccccccggcgcttcatgggcaacagcagtgaagatgccctggaccgggagctggcctttggagaccacgagctggtgatccggggcacccggctggtgctgcccatggatgacagcgagccccccctgaacctgctggacaacaccaggcatggccctgcctag

SEQ ID NO: 171071 - DNA, 2010 bp, synthetic construct
  misc_feature 1..2010: note = Description of Artificial Sequence: Synthetic coding sequence
  source 1..2010: mol_type = other DNA
atggcccggcggggctggaggcgggcccccctgcggcggggcgtgggcagcagcccccgggcccggcggctgatgaggcccctgtggctgctgctggccgtgggcgtgtttgactgggccggggccagtgatggcggcggcggggaggcccgggccatggatgaggagatcgtgtctgagaagcaggccgaggagagccaccggcaggacagcgccaacctgctgatcttcatcctgctgctgaccctgaccatcctgaccatctggctgttcaagcaccggcgggcccgcttcctgcacgagaccggcctggccatgatctacggcctgctggtgggcctggtgctgcgctatggcatccacgtgcccagtgatgtgaacaacgtgaccctgagctgtgaggtgcagagcagccccaccaccctgctggtgacctttgatcctgaggtgttcttcaacatcctgctgccccccatcatcttctacgccggctacagcctgaagagaagacacttcttcaggaacctgggcagcatcctggcctatgccttcctgggcacagccatcagctgcttcgtcatcggcagcatcatgtatggctgtgtgaccctgatgaaggtgacaggccagctggccggggacttctacttcacagactgcctgctgtttggagccatcgtgtctgccacagatcctgtgacagtgctggccatcttccacgagctgcaggtggatgtggagctgtatgccctgctgtttggagagagcgtgctgaatgatgctgtggccatcgtgctgagcagcagcatcgtggcctaccagcctgctggggacaacagccacacctttgatgtgacagccatgttcaagagcatcggcatcttcctgggcatcttcagcggcagctttgccatgggcgccgccactggagtggtgacagccctggtgaccaagttcaccaagctgcgggagttccagctgctggagaccggcctcttcttcctgatgtcctggagcaccttcctgctggccgaggcctggggcttcaccggggtggtggccgtgctcttctgtggcatcacccaggcccactacacctacaacaacctgagcacagagagccagcacaggaccaagcagctgtttgagctgctgaacttcctggccgagaacttcatcttctcctacatgggcctgaccctcttcaccttccagaaccacgtgttcaaccccacctttgtggtgggcgcctttgtggccatcttcctgggccgggccgccaacatctaccccctgagcctgctgctgaacctgggccgccgcagcaagattggcagcaacttccagcacatgatgatgtttgctggcctgcggggggccatggcctttgccctggccatccgggacacagccacctacgcccggcagatgatgttcagcaccaccctgctgattgtgttcttcaccgtgtgggtgtttggaggcggcaccacagccatgctgagctgcctgcacatccgggtgggcgtggacagcgaccaggagcacctgggcgtgcctgaaaatgaaagaaggaccaccaaggccgagagcgcctggctgttcaggatgtggtacaactttgaccacaactacctgaagcccctgctgacccacagcggcccccccctgaccaccaccctgcctgcctgctgcggccccatcgcccgctgcctgaccagcccccaggcctatgagaaccaggagcagctgaaggatgatgacagcgacctgatcctgaatgatggagacatcagcctgacctacggggacagcacagtgaacacagagcccgccaccagcagcgccccccggcgcttcatgggcaacagcagtgaagatgccctggaccgggagctggcctttggagaccacgagctggtgatccggggcacccggctggtgctgcccatggatgacagcgagccccccctgaacctgctggacaacaccaggcatggccctgcctag

SEQ ID NO: 171072 - DNA, 1950 bp, synthetic construct
  misc_feature 1..1950: note = Description of Artificial Sequence: Synthetic coding sequence
  source 1..1950: mol_type = other DNA
atggatgaggagatcgtgtctgagaagcaggccgaggagagccaccggcaggacagcgccaacctgctgatcttcatcctgctgctgaccctgaccatcctgaccatctggctgttcaagcaccggcgggcccgcttcctgcacgagaccggcctggccatgatctacggcctgctggtgggcctggtgctgcgctatggcatccacgtgcccagtgatgtgaacaacgtgaccctgagctgtgaggtgcagagcagccccaccaccctgctggtgaatgtgtctgggaagttctatgagtacatgctgaagggggagatcagcagccatgagctgaacaacgtgcaggacaatgagatgctgaggaaggtgacctttgatcctgaggtgttcttcaacatcctgctgccccccatcatcttctacgccggctacagcctgaagagaagacacttcttcaggaacctgggcagcatcctggcctatgccttcctgggcacagccatcagctgcttcgtcatcggcagcatcatgtatggctgtgtgaccctgatgaaggtgacaggccagctggccggggacttctacttcacagactgcctgctgtttggagccatcgtgtctgccacagatcctgtgacagtgctggccatcttccacgagctgcaggtggatgtggagctgtatgccctgctgtttggagagagcgtgctgaatgatgctgtggccatcgtgctgagcagcagcatcgtggcctaccagcctgctggggacaacagccacacctttgatgtgacagccatgttcaagagcatcggcatcttcctgggcatcttcagcggcagctttgccatgggcgccgccactggagtggtgacagccctggtgaccaagttcaccaagctgcgggagttccagctgctggagaccggcctcttcttcctgatgtcctggagcaccttcctgctggccgaggcctggggcttcaccggggtggtggccgtgctcttctgtggcatcacccaggcccactacacctacaacaacctgagcacagagagccagcacaggaccaagcagctgtttgagctgctgaacttcctggccgagaacttcatcttctcctacatgggcctgaccctcttcaccttccagaaccacgtgttcaaccccacctttgtggtgggcgcctttgtggccatcttcctgggccgggccgccaacatctaccccctgagcctgctgctgaacctgggccgccgcagcaagattggcagcaacttccagcacatgatgatgtttgctggcctgcggggggccatggcctttgccctggccatccgggacacagccacctacgcccggcagatgatgttcagcaccaccctgctgattgtgttcttcaccgtgtgggtgtttggaggcggcaccacagccatgctgagctgcctgcacatccgggtgggcgtggacagcgaccaggagcacctgggcgtgcctgaaaatgaaagaaggaccaccaaggccgagagcgcctggctgttcaggatgtggtacaactttgaccacaactacctgaagcccctgctgacccacagcggcccccccctgaccaccaccctgcctgcctgctgcggccccatcgcccgctgcctgaccagcccccaggcctatgagaaccaggagcagctgaaggatgatgacagcgacctgatcctgaatgatggagacatcagcctgacctacggggacagcacagtgaacacagagcccgccaccagcagcgccccccggcgcttcatgggcaacagcagtgaagatgccctggaccgggagctggcctttggagaccacgagctggtgatccggggcacccggctggtgctgcccatggatgacagcgagccccccctgaacctgctggacaacaccaggcatggccctgcctag

SEQ ID NO: 171073 - DNA, 2178 bp, synthetic construct
  misc_feature 1..2178: note = Description of Artificial Sequence: Synthetic coding sequence
  source 1..2178: mol_type = other DNA
atggagcctggagatgctgcccggcccggcagcggccgggccactggagcccccccaccccggctgctgctgctgcccctgctgctgggctggggcctgcgggtggccgccgccgccagcgccagcagcagcggggctgctgctgaggacagcagcgccatggaggagctggccacagagaaggaggccgaggagagccaccggcaggacagcgtgtccctgctgaccttcatcctgctgctgaccctgaccatcctgaccatctggctgttcaagcaccggcgggtgcgcttcctgcacgagaccggcctggccatgatctacggcctgattgtgggcgtcatcctgcgctatggcaccccagccaccagcggccgggacaagagcctgagctgcacccaggaggaccgggccttcagcaccctgctggtgaatgtgtctgggaagttctttgagtacaccctgaagggggagatcagccctgggaagatcaacagcgtggagcagaatgacatgctgaggaaggtgacctttgatcctgaggtgttcttcaacatcctgctgccccccatcatcttccacgccggctacagcctgaagaagaggcacttcttcaggaacctgggcagcatcctggcctatgccttcctgggcacagctgtgtcctgcttcatcatcggcaacctgatgtatggagtggtgaagctgatgaagatcatgggccagctgagtgacaagttctactacacagactgcctcttctttggagccatcatcagcgccacagatcctgtgacagtgctggccatcttcaatgagctgcacgcagatgtggacctgtatgccctgctgtttggagagagcgtgctgaatgatgctgtggccatcgtgctgagcagcagcatcgtggcctaccagcctgctggcctgaacacccacgcctttgatgctgctgccttcttcaagtctgtgggcatcttcctgggcatcttcagcggcagcttcaccatgggcgctgtgactggagtgaatgccaacgtgaccaagttcaccaagctgcactgcttccccctgctggagacagccctcttcttcctgatgtcctggagcaccttcctgctggccgaggcctgtggcttcaccggggtggtggccgtgctcttctgtggcatcacccaggcccactacacctacaacaacctgtctgtggagagccgcagcaggaccaagcagctgtttgaggtgctgcacttcctggccgagaacttcatcttctcctacatgggcctggccctcttcaccttccagaagcacgtgttcagccccatcttcatcatcggggcctttgtggccatcttcctgggccgggccgcccacatctaccccctgtccttcttcctgaacctgggcagaagacacaagattggctggaacttccagcacatgatgatgttcagcggcctgcggggggccatggcctttgccctggccatccgggacacagccagctatgcccggcagatgatgttcaccaccaccctgctgattgtgttcttcaccgtgtggatcatcggcggcggcaccacccccatgctgtcctggctgaacatccgggtgggcgtggaggagcccagcgaggaggaccagaatgagcaccactggcagtacttccgggtgggcgtggaccctgaccaggaccccccacccaacaatgacagcttccaggtgctgcagggagatggccctgacagcgcccggggcaacagaaccaagcaggagagcgcctggatcttccggctgtggtacagctttgaccacaactacctgaagcccatcctgacccacagcggcccccccctgaccaccaccctgcctgcctggtgtggcctgctggcccgctgcctgaccagcccccaggtgtatgacaaccaggagcccctgcgggaggaggacagcgacttcatcctgacagaaggagacctgaccctgacctatggagacagcacagtgacagccaacggcagcagcagcagccacacagccagcaccagcctggagggcagcaggaggaccaagagcagcagcgaggaggtgctggagcgggacctgggcatgggagaccagaaggtgagcagccggggcacccggctggtgttccccctggaggacaatgcctag

SEQ ID NO: 171074 - DNA, 1746 bp, synthetic construct
  misc_feature 1..1746: note = Description of Artificial Sequence: Synthetic coding sequence
  source 1..1746: mol_type = other DNA
atgggagagaagatggccgaggaggagcgcttccccaacaccacccatgagggcttcaacgtgaccctgcacaccaccctggtggtgaccaccaagctggtgctgcccacccctgggaagcccatcctgcctgtgcagacaggagagcaggcccagcaggaggagcagagcagcggcatgaccatcttcttcagcctgctggtgctggccatctgcatcatcctggtgcacctgctgatccgctaccgcctgcacttcctgcctgagagcgtggccgtggtgtccctgggcatcctgatgggcgccgtcatcaagatcatcgagttcaagaagctggccaactggaaggaggaggagatgttccggcccaacatgttcttcctgctgctgctgccccccatcatctttgagagcggctacagcctgcacaagggcaacttcttccagaacatcggcagcatcaccctgtttgctgtgtttggaacagccatcagcgcctttgtggtgggcggcggcatctacttcctgggccaggctgatgtgatcagcaagctgaacatgacagacagctttgccttcggcagcctcatctctgctgtggaccctgtggccaccatcgccatcttcaatgccctgcacgtggaccctgtgctgaacatgctggtgtttggagagagcatcctgaatgatgctgtgtccatcgtgctgaccaacacagctgagggcctgaccaggaagaacatgtctgatgtgtctggctggcagaccttcctgcaggccctggactacttcctgaagatgttctttggatctgctgccctgggcaccctgaccggcctcatcagcgccctggtgctgaagcacatcgacctgaggaagacccccagcctggagtttggcatgatgatcatctttgcctacctgccctacggcctggccgagggcatcagcctgagcggcatcatggccatcctcttctctggaattgtgatgagccactacacccaccacaacctgagccctgtgacccagatcctgatgcagcagaccctgaggacagtggccttcctgtgtgagacctgtgtgtttgccttcctgggcctgagcatcttctccttcccccacaagtttgagatcagctttgtgatctggtgcatcgtgctggtgctgtttggccgggctgtgaacatcttccccctgagctacctgctgaacttcttccgggaccacaagatcacccccaagatgatgttcatcatgtggttcagcggcctgcggggggccatcccctatgccctgagcctgcacctggacctggagcccatggagaagaggcagctgattggcaccaccaccatcgtgattgtgctcttcaccatcctgctgctgggcggcagcaccatgcccctcatccggctgatggacattgaagatgccaaggcccacagaagaaacaagaaggatgtgaacctgagcaagacagagaagatgggcaacacagtggagagcgagcacctgtctgagctgacagaggaggagtatgaggcccactacatccggcggcaggacctgaagggctttgtgtggctggatgccaagtacctgaaccccttcttcacccggcggctgacccaggaggacctgcaccacggccgcatccagatgaagaccctgaccaacaagtggtatgaggaggtgcggcagggccccagcggctctgaagatgatgagcaggagctgctgtag

SEQ ID NO: 171075 - DNA, 1794 bp, synthetic construct
  misc_feature 1..1794: note = Description of Artificial Sequence: Synthetic coding sequence
  source 1..1794: mol_type = other DNA
atgggagagaagatggccgaggaggagcgcttccccaacaccacccatgagggcttcaacgtgaccctgcacaccaccctggtggtgaccaccaagctggtgctgcccacccctgggaagcccatcctgcctgtgcagacaggagagcaggcccagcaggaggagcagagcagcggcatgaccatcttcttcagcctgctggtgctggccatctgcatcatcctggtgcacctgctgatccgctaccgcctgcacttcctgcctgagagcgtggccgtggtgtccctgggcatcctgatgggcgccgtcatcaagatcatcgagttcaagaagctggccaactggaaggaggaggagatgttccggcccaacatgttcttcctgctgctgctgccccccatcatctttgagagcggctacagcctgcacaagggcaacttcttccagaacatcggcagcatcaccctgtttgctgtgtttggaacagccatcagcgcctttgtggtgggcggcggcatctacttcctgggccagggcttcttctttgtgtgtgtgtgtgtgtttgtgtgcttcatcctgcaggctgatgtgatcagcaagctgaacatgacagacagctttgccttcggcagcctcatctctgctgtggaccctgtggccaccatcgccatcttcaatgccctgcacgtggaccctgtgctgaacatgctggtgtttggagagagcatcctgaatgatgctgtgtccatcgtgctgaccaacacagctgagggcctgaccaggaagaacatgtctgatgtgtctggctggcagaccttcctgcaggccctggactacttcctgaagatgttctttggatctgctgccctgggcaccctgaccggcctcatcagcgccctggtgctgaagcacatcgacctgaggaagacccccagcctggagtttggcatgatgatcatctttgcctacctgccctacggcctggccgagggcatcagcctgagcggcatcatggccatcctcttctctggaattgtgatgagccactacacccaccacaacctgagccctgtgacccagatcctgatgcagcagaccctgaggacagtggccttcctgtgtgagacctgtgtgtttgccttcctgggcctgagcatcttctccttcccccacaagtttgagatcagctttgtgatctggtgcatcgtgctggtgctgtttggccgggctgtgaacatcttccccctgagctacctgctgaacttcttccgggaccacaagatcacccccaagatgatgttcatcatgtggttcagcggcctgcggggggccatcccctatgccctgagcctgcacctggacctggagcccatggagaagaggcagctgattggcaccaccaccatcgtgattgtgctcttcaccatcctgctgctgggcggcagcaccatgcccctcatccggctgatggacattgaagatgccaaggcccacagaagaaacaagaaggatgtgaacctgagcaagacagagaagatgggcaacacagtggagagcgagcacctgtctgagctgacagaggaggagtatgaggcccactacatccggcggcaggacctgaagggctttgtgtggctggatgccaagtacctgaaccccttcttcacccggcggctgacccaggaggacctgcaccacggccgcatccagatgaagaccctgaccaacaagtggtatgaggaggtgcggcagggccccagcggctctgaagatgatgagcaggagctgctgtag

SEQ ID NO: 171076 - DNA, 1089 bp, synthetic construct
  misc_feature 1..1089: note = Description of Artificial Sequence: Synthetic coding sequence
  source 1..1089: mol_type = other DNA
atgctggtgtttggagagagcatcctgaatgatgctgtgtccatcgtgctgaccaacacagctgagggcctgaccaggaagaacatgtctgatgtgtctggctggcagaccttcctgcaggccctggactacttcctgaagatgttcttcggcagcgctgccctgggcaccctgaccggcctcatcagcgccctggtgctgaagcacatcgacctgaggaagacccccagcctggagtttggcatgatgatcatctttgcctacctgccctacggcctggccgagggcatcagcctgagcggcatcatggccatcctcttcagcggcatcgtgatgagccactacacccaccacaacctgagccctgtgacccagatcctgatgcagcagaccctgaggacagtggccttcctgtgtgagacctgtgtgtttgccttcctgggcctgagcatcttctccttcccccacaagtttgagatcagctttgtgatctggtgcatcgtgctggtgctgtttggccgggctgtgaacatcttccccctgagctacctgctgaacttcttccgggaccacaagatcacccccaagatgatgttcatcatgtggttcagcggcctgcggggggccatcccctatgccctgagcctgcacctggacctggagcccatggagaagaggcagctgattggcaccaccaccatcgtcatcgtgctcttcaccatcctgctgctgggcggcagcaccatgcccctcatccggctgatggacattgaagatgccaaggcccacagaagaaacaagaaggatgtgaacctgagcaagacagagaagatgggcaacacagtggagagcgagcacctgtctgagctgacagaggaggagtatgaggcccactacatccggcggcaggacctgaagggctttgtgtggctggatgccaagtacctgaaccccttcttcacccggcggctgacccaggaggacctgcaccacggccgcatccagatgaagaccctgaccaacaagtggtatgaggaggtgcggcagggccccagcggctctgaagatgatgagcaggagctgctgtag

SEQ ID NO: 171077 - DNA, 846 bp, synthetic construct
  misc_feature 1..846: note = Description of Artificial Sequence: Synthetic coding sequence
  source 1..846: mol_type = other DNA
atgatgatcatctttgcctacctgccctacggcctggccgagggcatcagcctgagcggcatcatggccatcctcttctctggaattgtgatgagccactacacccaccacaacctgagccctgtgacccagatcctgatgcagcagaccctgaggacagtggccttcctgtgtgagacctgtgtgtttgccttcctgggcctgagcatcttctccttcccccacaagtttgagatcagctttgtgatctggtgcatcgtgctggtgctgtttggccgggctgtgaacatcttccccctgagctacctgctgaacttcttccgggaccacaagatcacccccaagatgatgttcatcatgtggttcagcggcctgcggggggccatcccctatgccctgagcctgcacctggacctggagcccatggagaagaggcagctgattggcaccaccaccatcgtgattgtgctcttcaccatcctgctgctgggcggcagcaccatgcccctcatccggctgatggacattgaagatgccaaggcccacagaagaaacaagaaggatgtgaacctgagcaagacagagaagatgggcaacacagtggagagcgagcacctgtctgagctgacagaggaggagtatgaggcccactacatccggcggcaggacctgaagggctttgtgtggctggatgccaagtacctgaaccccttcttcacccggcggctgacccaggaggacctgcaccacggccgcatccagatgaagaccctgaccaacaagtggtatgaggaggtgcggcagggccccagcggctctgaagatgatgagcaggagctgctgtag

SEQ ID NO: 171078 - DNA, 1938 bp, synthetic construct
  misc_feature 1..1938: note = Description of Artificial Sequence: Synthetic coding sequence
  source 1..1938: mol_type = other DNA
atggagcggcagagccgggtgatgtctgagaaggatgagtaccagttccagcaccagggcgctgtggagctgctggtgttcaacttcctgctgatcctgaccatcctgaccatctggctgttcaagaaccaccgcttccgcttcctgcacgagaccggcggggccatggtgtatggcctcatcatgggcctcatcctgcgctatgccacagcccccacagacattgaaagtggcaccgtgtatgactgtgtgaagctgaccttcagccccagcaccctgctggtgaacatcacagaccaggtgtatgagtacaagtacaagcgggagatcagccagcacaacatcaacccccaccagggcaatgccatcctggagaagatgacctttgatcctgagatcttcttcaacgtgctgctgccccccatcatcttccacgccggctacagcctgaagaagaggcacttcttccagaacctgggcagcatcctgacctacgccttcctgggcacagccatcagctgcatcgtgattggcctcatcatgtatggctttgtgaaggccatgattcatgctggccagctgaagaatggagacttccacttcacagactgcctcttcttcggcagcctgatgtctgccacagatcctgtgacagtgctggccatcttccacgagctgcacgtggaccctgacctgtacaccctgctgtttggagagagcgtgctgaatgatgctgtggccatcgtgctgacctacagcatcagcatctacagccccaaggagaaccccaatgcctttgatgctgctgccttcttccagagcgtgggcaacttcctgggcatctttgctggcagctttgccatgggcagcgcctatgccatcatcacagccctgctgaccaagttcaccaagctgtgtgagttccccatgctggagaccggcctcttcttcctgctgtcctggagcgccttcctgtctgctgaggccgccggcctgactggaattgtggccgtgctcttctgtggggtgacccaggcccactacacctacaacaacctgagcagtgacagcaagatccgcaccaagcagctgtttgagttcatgaacttcctggctgaaaatgtcatcttctgctacatgggcctggccctcttcaccttccagaaccacatcttcaatgccctcttcatcctgggcgccttcctggccatctttgtggcccgggcctgcaacatctaccccctgtccttcctgctgaacctgggcaggaagcagaagatcccctggaacttccagcacatgatgatgttcagcggcctgcggggggccatcgcctttgccctggccatccggaacacagagagccagcccaagcagatgatgttcaccaccaccctgctgctggtgttcttcaccgtgtgggtgtttggaggcggcaccacccccatgctgacctggctgcagatccgggtgggcgtggacctggatgagaacctgaaggaggaccccagcagccagcaccaggaggccaacaacctggacaagaacatgaccaaggccgagagcgcccggctcttcaggatgtggtacagctttgaccacaagtacctgaagcccatcctgacccacagcggcccccccctgaccaccaccctgcctgagtggtgtggccccatcagccggctgctgaccagcccccaggcctatggagagcagctgaaggaggatgatgtggagtgcatcgtgaaccaggatgagctggccatcaactaccaggagcaggccagcagcccctgcagccccccagcccggctgggcctggaccagaaggccagcccccagacccctgggaaggagaacatctatgaaggagacctgggcctgggcggctatgagctgaagctggagcagaccctgggccagagccagctgaactag

SEQ ID NO: 171079 - DNA, 978 bp, synthetic construct
  misc_feature 1..978: note = Description of Artificial Sequence: Synthetic coding sequence
  source 1..978: mol_type = other DNA
ctgcggctgcagagctcctgggagcagatgacctttgatcctgagatcttcttcaacgtgctgctgccccccatcatcttccacgccggctacagcctgaagaagaggcacttcttccagaacctgggcagcatcctgacctacgccttcctgggcacagccatcagctgcatcgtcatcggcctcatcatgtatggctttgtgaaggccatgattcatgctggccagctgaagaatggagacttccacttcacagactgcctcttcttcggcagcctgatgtctgccacagatcctgtgacagtgctggccatcttccacgagctgcacgtggaccctgacctgtacaccctgctgtttggagagagcgtgctgaatgatgctgtggccatcgtgctgacctacagcatcagcatctacagccccaaggagaaccccaatgcctttgatgctgctgccttcttccagagcgtgggcaacttcctgggcatctttgctggcagctttgccatgggcagcgcctatgccatcatcacagccctgctgaccaagttcaccaagctgtgtgagttccccatgctggagaccggcctcttcttcctgctgtcctggagcgccttcctgtctgctgaggccgccggcctgaccggcatcgtggccgtgctcttctgtggggtgacccaggcccactacacctacaacaacctgagcagtgacagcaagatccgcaccaagcagctgtttgagttcatgaacttcctggccgagaatgtcatcttctgctacatgggcctggccctcttcaccttccagaaccacatcttcaatgccctcttcatcctgggcgcctttgtgtccatcttcctggcccgggcccacacagagctgaagaacctgctcttcttcctggccagcttcctgtgctacttcagccacaggagcaagggcctgcccatggccggctgtgccctgccctag

SEQ ID NO: 171080 - DNA, 3534 bp, synthetic construct
  misc_feature 1..3534: note = Description of Artificial Sequence: Synthetic coding sequence
  source 1..3534: mol_type = other DNA
atggccggcatcttcaaggagttcttcttcagcacagaggacctgcctgaggtgatcctgaccctgagcctcatcagcagcatcggggccttcctgaacagacacctggaggacttccccatccctgtgcctgtgatcctcttcctgctgggctgcagctttgaggtgctgtccttcaccagcagccaggtgcagagatatgccaatgccatccagtggatgagcccagacctcttcttccgcatcttcacccctgtggtgttcttcaccacagcctttgacatggacacctacatgctgcagaagctgttctggcagatcctgctgatcagcatccctggcttcctggtgaactacatcctggtgctgtggcacctggcctctgtgaaccagctgctgctgaagcccacccagtggctgctcttcagcgccatcctggtgtccagtgaccccatgctgacagctgctgccatccgggacctgggcctgagccgcagcctcatcagcctcatcaacggggagagcctgatgaccagcgtcatcagcctcatcaccttcaccagcatcatggactttgaccagaggctgcagagcaagaggaaccacaccctggccgaggagatcgtgggcggcatctgcagctacatcatcgccagcttcctgtttggcatcctgagcagcaagctgatccagttctggatgagcacagtgtttggagatgatgtgaaccacatcagcctcatcttcagcatcctgtacctgatcttctacatctgtgagctggtgggcatgagcggcatcttcaccctggccatcgtgggcctgctgctgaacagcaccagcttcaaggccgccatcgaggagaccctgctgctggagttctggaccttcctgagcagaattgccttcctgatggtgttcaccttcttcggcctgctgatcccagcccacacctacctgtacatcgagtttgtggacatctactacagcctgaacatctacctgaccctcatcgtgctgcgcttcctgaccctgctgctgatcagccctgtgctgagccgggtgggccacgagttctcctggcgctggatcttcatcatggtgtgcagcgagatgaagggcatgcccaacatcaacatggccctgctgctggcctacagcgacctgtactttggaagtgacaaggagaagagccagatcctcttccatggagtgctggtgtgcctgatcaccctggtggtgaaccgcttcatcctgcctgtggccgtgaccatcctgggcctgagagatgccaccagcaccaagtacaagtctgtgtgctgcaccttccagcacttccaggagctgaccaagtctgctgccagcgccctgaagtttgacaaggacctggccaatgctgactggaacatgattgagaaggccatcaccctggagaacccctacatgctgaatgaggaggagaccacagagcaccagaaggtgaagtgcccccactgcaacaaggagattgatgagatcttcaacacagaggccatggagctggccaacagaaggctgctgagcgcccagatcgccagctaccagaggcagtacagaaatgagatcctgagccagagcgctgtgcaggtgctggtgggcgctgctgagagctttggagagaagaagggcaagtgcatgagcctggacaccatcaagaactacagcgagagccagaagacagtgacctttgccaggaagctgctgctgaactgggtgtacaacaccaggaaggagaaggagggccccagcaagtacttcttcttccgcatctgccacaccatcgtgttcacagaggagtttgaacatgtgggctacctggtgatcctgatgaacatcttccccttcatcatctcctggatcagccagctgaatgtcatctaccacagcgagctgaagcacaccaactactgcttcctgaccctgtacatcctggaggccctgctgaagattgctgccatgaggaaggacttcttcagccacgcctggaacatctttgagctggccatcaccctgattggcatcctgcacgtgatcctgattgaaattgacaccatcaagtacatcttcaatgaaacagaggtgattgtgttcatcaaggtggtgcagttcttccgcatcctgcgcatcttcaagctgattgcccccaagctgctgcagatcatcgacaagaggatgagccaccagaagaccttctggtacggcatcctgaagggctacgtgcagggcgaggccgacatcatgaccatcatcgaccagatcaccagcagcaagcagatcaagcagatgctgctgaagcaggtgatccggaacatggagcacgccatcaaggagctgggctacctggagtatgaccaccctgagattgctgtgacagtgaagaccaaggaggagatcaacgtgatgctgaacatggccacagagatcctgaaggccttcggcctgaagggcatcatcagcaagacagagggcgccggcatcaacaagctgatcatggccaagaagaaggaggtgctggacagccagagcatcatccggcccctgactgtggaggaggtgctgtaccacatcccctggctggacaagaacaaggactacatcaacttcatccaggagaaggccaaggtggtgacctttgactgtggaaatgacatctttgaggagggagatgagcccaagggcatctacatcatcatcagcggcatggtgaagctggagaagagcaagccaggcctgggcatcgaccagatggtggagagcaaggagaaggacttccccatcatcgacacagactacatgctgtctggagagatcattggagagatcaactgcctgaccaatgagcccatgaagtacagcgccacctgcaagacagtggtggagacctgcttcatccccaagacccacctgtatgatgcctttgagcagtgcagccccctcatcaagcagaagatgtggctgaagctgggcctggccatcacagccaggaagatccgggagcacctgtcctatgaggactggaactacaacatgcagctgaagctgagcaacatctacgtggtggacatccccatgagcaccaagacagacatctatgatgagaacctgatctacgtgatcctgattcatggagctgtggaggactgcctgctgaggaagacctaccgggcccccttcctgatccccatcacctgccaccagatccagagcattgaggacttcaccaaggtggtgatcatccagacccccatcaacatgaagaccttcagaagaaacatcaggaagtttgtgcccaagcacaagagctacctgaccccaggcctgattggctctgtgggcaccctggaggagggcatccaggaggagagaaatgtgaaggaggatggagcccacagcgctgccacagcccggagcccccagccctgcagcctgctgggcaccaagttcaactgcaaggagagcccccgcatcaacctgaggaaggtgaggaaggagtag

SEQ ID NO: 171081 - DNA, 3390 bp, synthetic construct
  misc_feature 1..3390: note = Description of Artificial Sequence: Synthetic coding sequence
  source 1..3390: mol_type = other DNA
atggccggcatcttcaaggagttcttcttcagcacagaggacctgcctgaggtgatcctgaccctgagcctcatcagcagcatcggggccttcctgaacagacacctggaggacttccccatccctgtgcctgtgatcctcttcctgctgggctgcagctttgaggtgctgtccttcaccagcagccaggtgcagagatatgccaatgccatccagtggatgagcccagacctcttcttccgcatcttcacccctgtggtgttcttcaccacagcctttgacatggacacctacatgctgcagaagctgttctggcagatcctgctgatcagcatccctggcttcctggtgaactacatcctggtgctgtggcacctggcctctgtgaaccagctgctgctgaagcccacccagtggctgctcttcagcgccatcctggtgtccagtgaccccatgctgacagctgctgccatccgggacctgggcctgagccgcagcctcatcagcctcatcaacggggagagcctgatgaccagcgtcatcagcctcatcaccttcaccagcatcatggactttgaccagaggctgcagagcaagaggaaccacaccctggccgaggagatcgtgggcggcatctgcagctacatcatcgccagcttcctgtttggcatcctgagcagcaagctgatccagttctggatgagcacagtgtttggagatgatgtgaaccacatcagcctcatcttcagcatcctgtacctgatcttctacatctgtgagctggtgggcatgagcggcatcttcaccctggccatcgtgggcctgctgctgaacagcaccagcttcaaggccgccatcgaggagaccctgctgctggagttcctgaccctgctgctgatcagccctgtgctgagccgggtgggccacgagttctcctggcgctggatcttcatcatggtgtgcagcgagatgaagggcatgcccaacatcaacatggccctgctgctggcctacagcgacctgtactttggaagtgacaaggagaagagccagatcctcttccatggagtgctggtgtgcctgatcaccctggtggtgaaccgcttcatcctgcctgtggccgtgaccatcctgggcctgagagatgccaccagcaccaagtacaagtctgtgtgctgcaccttccagcacttccaggagctgaccaagtctgctgccagcgccctgaagtttgacaaggacctggccaatgctgactggaacatgattgagaaggccatcaccctggagaacccctacatgctgaatgaggaggagaccacagagcaccagaaggtgaagtgcccccactgcaacaaggagattgatgagatcttcaacacagaggccatggagctggccaacagaaggctgctgagcgcccagatcgccagctaccagaggcagtacagaaatgagatcctgagccagagcgctgtgcaggtgctggtgggcgctgctgagagctttggagagaagaagggcaagtgcatgagcctggacaccatcaagaactacagcgagagccagaagacagtgacctttgccaggaagctgctgctgaactgggtgtacaacaccaggaaggagaaggagggccccagcaagtacttcttcttccgcatctgccacaccatcgtgttcacagaggagtttgaacatgtgggctacctggtgatcctgatgaacatcttccccttcatcatctcctggatcagccagctgaatgtcatctaccacagcgagctgaagcacaccaactactgcttcctgaccctgtacatcctggaggccctgctgaagattgctgccatgaggaaggacttcttcagccacgcctggaacatctttgagctggccatcaccctgattggcatcctgcacgtgatcctgattgaaattgacaccatcaagtacatcttcaatgaaacagaggtgattgtgttcatcaaggtggtgcagttcttccgcatcctgcgcatcttcaagctgattgcccccaagctgctgcagatcatcgacaagaggatgagccaccagaagaccttctggtacggcatcctgaagggctacgtgcagggcgaggccgacatcatgaccatcatcgaccagatcaccagcagcaagcagatcaagcagatgctgctgaagcaggtgatccggaacatggagcacgccatcaaggagctgggctacctggagtatgaccaccctgagattgctgtgacagtgaagaccaaggaggagatcaacgtgatgctgaacatggccacagagatcctgaaggccttcggcctgaagggcatcatcagcaagacagagggcgccggcatcaacaagctgatcatggccaagaagaaggaggtgctggacagccagagcatcatccggcccctgactgtggaggaggtgctgtaccacatcccctggctggacaagaacaaggactacatcaacttcatccaggagaaggccaaggtggtgacctttgactgtggaaatgacatctttgaggagggagatgagcccaagggcatctacatcatcatcagcggcatggtgaagctggagaagagcaagccaggcctgggcatcgaccagatggtggagagcaaggagaaggacttccccatcatcgacacagactacatgctgtctggagagatcattggagagatcaactgcctgaccaatgagcccatgaagtacagcgccacctgcaagacagtggtggagacctgcttcatccccaagacccacctgtatgatgcctttgagcagtgcagccccctcatcaagcagaagatgtggctgaagctgggcctggccatcacagccaggaagatccgggagcacctgtcctatgaggactggaactacaacatgcagctgaagctgagcaacatctacgtggtggacatccccatgagcaccaagacagacatctatgatgagaacctgatctacgtgatcctgattcatggagctgtggaggactgcctgctgaggaagacctaccgggcccccttcctgatccccatcacctgccaccagatccagagcattgaggacttcaccaaggtggtgatcatccagacccccatcaacatgaagaccttcagaagaaacatcaggaagtttgtgcccaagcacaagagctacctgaccccaggcctgattggctctgtgggcaccctggaggagggcatccaggaggagagaaatgtgaaggaggatggagcccacagcgctgccacagcccggagcccccagccctgcagcctgctgggcaccaagttcaactgcaaggagagcccccgcatcaacctgaggaaggtgaggaaggagtag

SEQ ID NO: 171082 - DNA, 2079 bp, synthetic construct
  misc_feature 1..2079: note = Description of Artificial Sequence: Synthetic coding sequence
  source 1..2079: mol_type = other DNA
atgcagggcaagaagccaggcggcagcagcggcggcggccgctctggagagctgcagggagatgaggcccagaggaacaagaagaagaagaagaaggtgtcctgcttcagcaacatcaagatcttcctggtgtctgaatgtgccctgatgctggcccagggcaccgtgggcgcctacctggtgtctgtgctgaccaccctggagcggcgcttcaacctgcagagcgcagatgtgggcgtgattgccagcagctttgaaattggcaacctggccctgatcctgtttgtgtcctactttggagcccggggccaccggccccggctgattggctgcggcggcatcgtgatggccctgggcgccctgctgagcgccctgcctgagttcctgacccaccagtacaagtatgaagctggggagatccgctggggcgctgagggcagagatgtgtgtgccgccaatggaagtggaggagatgagggccctgaccctgacctgatctgcaggaacagaacagccaccaacatgatgtacctgctgctgattggagcccaggtgctgctgggcattggagccacccctgtgcagcccctgggcgtgtcctacattgatgaccacgtgcggaggaaggacagcagcctgtacatcggcatcctcttcaccatgctggtgtttggacctgcctgtggcttcatcctgggcagcttctgcaccaagatctacgtggatgctgtgttcatcgacaccagcaacctggacatcaccccagatgacccccgctggattggagcctggtggggcggcttcctgctgtgtggggccctgctcttcttcagcagcctgctgatgtttggcttcccccagagcctgcccccccacagcgagcccgccatggagagcgagcaggccatgctgtctgagcgggagtatgagcggcccaagcccagcaatggagtgctgcggcaccccctggagccagacagcagcgccagctgcttccagcagctgcgggtcatccccaaggtgaccaagcacctgctgagcaaccctgtgttcacctgcatcatcctggccgcctgcatggagattgctgtggtggccggctttgctgccttcctgggcaagtacctggagcagcagttcaacctgaccaccagcagcgccaaccagctgctgggcatgacagccatcccctgtgcctgcctgggcatcttcctgggcggcctgctggtgaagaagctgagcctgagcgccctgggcgccatccgcatggccatgctggtgaacctggtgtccacagcctgctacgtgtccttcctgttcctgggctgtgacaccggccctgtggccggcgtgacagtgccctacggcaacagcacagcccctggcagcgccctggacccctacagcccctgcaacaacaactgtgagtgccagacagacagcttcacccctgtgtgtggggctgatggcatcacctacctgagcgcctgctttgctggctgcaacagcaccaacctgaccggctgtgcctgcctgaccaccgtgcctgcagaaaatgccaccgtggtgcctgggaagtgccccagccctggctgccaggaggccttcctgaccttcctgtgtgtgatgtgcatctgcagcctgattggagccatggcccagaccccatctgtcatcatcctgatcagaacagtgtccccagagctgaagagctatgccctgggcgtgctcttcctgctgctgcggctgctgggcttcatccccccacccctcatctttggagctggcatcgacagcacctgcctcttctggagcaccttctgtggggagcagggcgcctgtgtgctgtatgacaacgtggtgtaccgctacctgtatgtgtccatcgccatcgccctgaagagctttgccttcatcctgtacaccaccacctggcagtgcctgaggaagaactacaagcgctacatcaagaaccatgaaggaggcctgagcaccagcacagagtaccaggacatcgagacagagaagacctgcccagagagccacagccccagcgaggacagctttgtgcgctcctag

SEQ ID NO: 171083 - DNA, 2076 bp, synthetic construct
  misc_feature 1..2076: note = Description of Artificial Sequence: Synthetic coding sequence
  source 1..2076: mol_type = other DNA
atggaccagaaccagcacctgaacaagacagctgaggcccagcccagcgagaacaagaagacccgctactgcaatggcctgaagatgttcctggccgccctgagcctgtccttcatcgccaagaccctgggcgccatcatcatgaagagcagcatcatccacattgaaagaagatttgagatcagcagcagcctggtgggcttcattgatggcagctttgaaattggcaacctgctggtgattgtgtttgtgtcctacttcggcagcaagctgcaccggcccaagctgattggaattggctgcttcatcatgggcatcggcggcgtgctgacagccctgccccacttcttcatgggctactaccgctacagcaaggagaccaacatcaacagcagcgagaacagcaccagcaccctgagcacctgcctgatcaaccagatcctgagcctgaacagagccagccctgagatcgtgggcaagggctgcctgaaggagagcggcagctacatgtggatctacgtgttcatgggcaacatgctgcggggcattggagagacccccatcgtgcccctgggcctgagctacattgatgactttgccaaggagggccacagcagcctgtacctgggcatcctgaatgccatcgccatgattggccccatcatcggcttcaccctgggcagcctcttcagcaagatgtatgtggacatcggctacgtggacctgagcaccatccgcatcacccccacagacagccgctgggtgggcgcctggtggctgaacttcctggtgtctggcctcttcagcatcatcagcagcatccccttcttcttcctgccccagacccccaacaagccccagaaggagaggaaggccagcctgagcctgcacgtgctggagaccaatgatgagaaggaccagacagccaacctgaccaaccagggcaagaacatcaccaagaatgtgacaggcttcttccagagcttcaagagcatcctgaccaaccccctgtatgtgatgtttgtgctgctgaccctgctgcaggtgtcctcctacatcggggccttcacctacgtgttcaagtatgtggagcagcagtatggccagcccagcagcaaggccaacatcctgctgggcgtcatcaccatccccatctttgccagcggcatgttcctgggcggctacatcatcaagaagttcaagctgaacacagtgggcatcgccaagttcagctgcttcaccgctgtgatgagcctgtccttctacctgctgtacttcttcatcctgtgtgagaacaagtctgtggccggcctgaccatgacctatgatggcaacaaccctgtgaccagccacagagatgtgcccctgagctactgcaacagcgactgcaactgtgatgagagccagtgggagcctgtgtgtggcaacaacggcatcacctacatcagcccctgcctggccggctgcaagagcagcagcggcaacaagaagcccatcgtgttctacaactgcagctgcctggaggtgacaggcctgcagaacagaaactacagcgcccacctgggagaatgtcccagagatgatgcctgcaccaggaagttctacttctttgtggccatccaggtgctgaacctcttcttcagcgccctgggcggcaccagccacgtgatgctgattgtgaagatcgtgcagcctgagctgaagagcctggccctgggcttccacagcatggtgatccgggccctgggcggcatcctggcccccatctactttggagccctgattgacaccacctgcatcaagtggagcaccaacaactgtggcacccggggcagctgcaggacctacaacagcaccagcttcagccgggtgtacctgggcctgagctccatgctgcgggtgagcagcctggtgctgtacatcatcctgatctatgccatgaagaagaagtaccaggagaaggacatcaatgcctctgaaaatggatctgtgatggatgaggccaacctggagagcctgaacaagaacaagcactttgtgcccagcgctggagctgacagcgagacccactgctag

SEQ ID NO: 171084 - DNA, 2109 bp, synthetic construct
  misc_feature 1..2109: note = Description of Artificial Sequence: Synthetic coding sequence
  source 1..2109: mol_type = other DNA
atggaccagcaccagcacctgaacaagacagctgagagcgccagcagcgagaagaagaagacccggcgctgcaatggcttcaagatgttcctggccgccctgtccttctcctacatcgccaaggccctgggcggcatcatcatgaagatcagcatcacccagattgaaagaagatttgacatcagcagcagcctggccggcctgattgatggcagctttgaaattggcaacctgctggtgattgtgtttgtgtcctacttcggcagcaagctgcaccggcccaagctgattggaattggctgcctgctgatgggcaccggcagcatcctgaccagcctgccccacttcttcatgggctactaccgctacagcaaggagacccacatcaaccccagcgagaacagcaccagcagcctgagcacctgcctgatcaaccagaccctgtccttcaacggcaccagccctgagatcgtggagaaggactgtgtgaaggagagcggcagccacatgtggatctacgtgttcatgggcaacatgctgcggggcattggagagacccccatcgtgcccctgggcatctcctacattgatgactttgccaaggagggccacagcagcctgtacctgggcagcctgaatgccatcggcatgattggccctgtgattggatttgccctgggcagcctgtttgccaagatgtatgtggacatcggctacgtggacctgagcaccatccgcatcacccccaaggacagccgctgggtgggcgcctggtggctgggcttcctggtgtctggcctcttcagcatcatcagcagcatccccttcttcttcctgcccaagaaccccaacaagccccagaaggagaggaagatcagcctgagcctgcacgtgctgaagaccaatgatgacaggaaccagacagccaacctgaccaaccagggcaagaatgtgaccaagaatgtgacaggcttcttccagagcctgaagagcatcctgaccaaccccctgtatgtgatcttcctgctgctgaccctgctgcaggtgtcctccttcatcggcagcttcacctacgtgttcaagtacatggagcagcagtatggccagagcgccagccacgccaacttcctgctgggcatcatcaccatccccaccgtggccaccggcatgttcctgggcggcttcatcatcaagaagttcaagctgagcctggtgggcatcgccaagttctccttcctgacctccatgatctccttcctgttccagctgctgtacttccccctcatctgtgagagcaagtctgtggccggcctgaccctgacctatgatggcaacaacagcgtggccagccacgtggatgtgcccctgagctactgcaacagcgagtgcaactgtgatgagagccagtgggagcctgtgtgtggcaacaacggcatcacctacctgagcccctgcctggccggctgcaagagcagcagcggcatcaagaagcacacagtgttctacaactgcagctgtgtggaggtgacaggcctgcagaacagaaactacagcgcccacctgggagaatgtccccgggacaacacctgcaccaggaagttcttcatctacgtggccatccaggtgatcaacagcctcttcagcgccaccggcggcaccaccttcatcctgctgactgtgaagatcgtgcagcctgagctgaaggccctggccatgggcttccagagcatggtgatccgcaccctgggcggcatcctggcccccatctactttggagccctgattgacaagacctgcatgaagtggagcaccaacagctgtggggcccagggcgcctgccgcatctacaacagcgtcttcttcggccgggtgtacctgggcctgagcatcgccctgcgcttccctgccctggtgctgtacatcgtgttcatctttgccatgaagaagaagttccagggcaaggacaccaaggccagtgacaatgaaaggaaggtgatggatgaggccaacctggagttcctgaacaacggggagcactttgtgcccagcgctggaacagacagcaagacctgcaacctggacatgcaggacaatgctgctgccaactag

SEQ ID NO: 171085 - DNA, 2109 bp, synthetic construct; identical to SEQ ID NO: 171084
  misc_feature 1..2109: note = Description of Artificial Sequence: Synthetic coding sequence
  source 1..2109: mol_type = other DNA

SEQ ID NO: 171086 - DNA, 2247 bp, synthetic construct
  misc_feature 1..2247: note = Description of Artificial Sequence: Synthetic coding sequence
  source 1..2247: mol_type = other DNA
atggaccagcaccagcacctgaacaagacagctgagagcgccagcagcgagaagaagaagacccggcgctgcaatggcttcaagatgttcctggccgccctgtccttctcctacatcgccaaggccctgggcggcatcatcatgaagatcagcatcacccagattgaaagaagatttgacatcagcagcagcctggccggcctgattgatggcagctttgaaattggcaacctgctggtgattgtgtttgtgtcctacttcggcagcaagctgcaccggcccaagctgattggaattggctgcctgctgatgggcaccggcagcatcctgaccagcctgccccacttcttcatgggctactaccgctacagcaaggagacccacatcaaccccagcgagaacagcaccagcagcctgagcacctgcctgatcaaccagaccctgtccttcaacggcaccagccctgagatcgtggagaaggactgtgtgaaggagagcggcagccacatgtggatctacgtgttcatgggcaacatgctgcggggcattggagagacccccatcgtgcccctgggcatctcctacattgatgactttgccaaggagggccacagcagcctgtacctgggcagcctgaatgccatcggcatgattggccctgtgattggatttgccctgggcagcctgtttgccaagatgtatgtggacatcggctacgtggacctgagcaccatccgcatcacccccaaggacagccgctgggtgggcgcctggtggctgggcttcctggtgtctggcctcttcagcatcatcagcagcatccccttcttcttcctgcccaagaaccccaacaagccccagaaggagaggaagatcagcctgagcctgcacgtgctgaagaccaatgatgacaggaaccagacagccaacctgaccaaccagggcaagaatgtgaccaagaatgtgacaggcttcttccagagcctgaagagcatcctgaccaaccccctgtatgtgatcttcctgctgctgaccctgctgcaggtgtcctccttcatcggcagcttcacctacgtgttcaagtacatggagcagcagtatggccagagcgccagccacgccaacttcctgctgggcatcatcaccatccccaccgtggccaccggcatgttcctgggcggcttcatcatcaagaagttcaagctgagcctggtgggcatcgccaagttctccttcctgacctccatgatctccttcctgttccagctgctgtacttccccctcatctgtgagagcaagtctgtggccggcctgaccctgacctatgatggcaacaacagcgtggccagccacgtggatgtgcccctgagctactgcaacagcgagtgcaactgtgatgagagccagtgggagcctgtgtgtggcaacaacggcatcacctacctgagcccctgcctggccggctgcaagagcagcagcggcatcaagaagcacacagtgttctacaactgcagctgtgtggaggtgacaggcctgcagaacagaaactacagcgcccacctgggagaatgtccccgggacaacacctgcaccaggaagttcttcatctacgtggccatccaggtgatcaacagcctcttcagcgccaccggcggcaccaccttcatcctgctgactgtgaagatcgtgcagcctgagctgaaggccctggccatgggcttccagagcatggtgatccgcaccctgggcggcatcctggcccccatctactttggagccctgattgacaagacctgcatgaagtggagcaccaacagctgtggggcccagggcgcctgccgcatctacaacagcgtcttctttggaattgtgcagcctgagctgaaggccctggccatcggcttccacagcatgatcatgaggagcctgggcggcatcctggtgcccatctactttggagccctgattgacaccacctgcatgaagtggagcaccaacagctgtggggcccggggggcctgccgcatctacaacagcacctacctgggccgggccttcttcggcctgaaggtggccctgatcttccctgtgctggtgctgctgaccgtcttcatctttgtggtgaggaagaagagccacggcaaggacaccaaggtgctggagaatgaaaggcaggtgatggatgaggccaacctggagttcctgaatgacagcgagcactttgtgcccagcgctgaggagcagtag

SEQ ID NO: 171087 - DNA, 2139 bp, synthetic construct
  misc_feature 1..2139: note = Description of Artificial Sequence: Synthetic coding sequence
  source 1..2139: mol_type = other DNA
atggacaccagcagcaaagaaaacatccagctgttctgcaagacctctgtgcagcctgtgggccggcccagcttcaagacagagtaccccagcagcgaggagaagcagccctgctgcggggagctgaaggtgttcctgtgtgccctgagctttgtgtactttgccaaggccctggccgagggctacctgaagagcaccatcacccagatcgagaggagatttgacatccccagcagcctggtgggcgtgattgatggcagctttgagatcggcaacctgctggtgatcacctttgtgtcctactttggagccaagctgcaccggcccaagatcatcggggccggctgcgtcatcatgggcgtgggcaccctgctgattgccatgccccagttcttcatggagcagtacaagtatgaaagatacagccccagcagcaacagcaccctgagcatcagcccctgcctgctggagagcagcagccagctgcctgtgtctgtgatggagaagagcaagagcaagatcagcaatgaatgtgaggtggacaccagcagctccatgtggatctacgtgttcctgggcaacctgctgcggggcattggagagacccccatccagcccctgggcatcgcctacctggatgactttgccagcgaggacaatgctgccttctacatcggctgtgtgcagacagtggccatcatcggccccatcttcggcttcctgctgggcagcctgtgtgccaagctgtatgtggacattggatttgtgaacctggaccacatcaccatcacccccaaggacccccagtgggtgggcgcctggtggctgggctacctgattgctggcatcatcagcctgctggccgctgtgcccttctggtacctgcccaagagcctgcccaggagccagagccgggaggacagcaacagcagcagcgagaagagcaagttcatcattgatgaccacacagactaccagaccccccagggagaaaatgccaagatcatggagatggcccgggacttcctgcccagcctgaagaacctgtttggaaatcctgtgtacttcctgtacctgtgcaccagcacagtgcagttcaacagcctgtttggcatggtgacctacaagcccaagtacatcgagcagcagtatggccagagcagcagccgggccaactttgtgattggcctcatcaacatcccagctgtggccctgggcatcttcagcggcggcatcgtgatgaagaagttccgcatctctgtgtgtggggccgccaagctgtacctgggcagctctgtgtttggctacctgctcttcctgagcctgtttgccctgggctgtgagaacagtgatgtggccggcctgactgtgtcctaccagggcaccaagcctgtgtcctaccacgagcgggccctcttcagtgactgcaacagccgctgcaagtgcagcgagaccaagtgggagcccatgtgtggagaaaatggcatcacctacgtgtctgcctgcctggccggctgccagaccagcaacagaagtggcaagaacatcatcttctacaactgcacctgtgtgggcattgctgccagcaagagcggcaacagcagcggcatcgtgggccgctgccagaaggacaatggctgcccccagatgttcctgtacttcctggtgatcagcgtcatcaccagctacaccctgagcctgggcggcatccctggctacatcctgctgctgcgctgcatcaagccccagctgaagagctttgccctgggcatctacaccctggccatccgggtgctggccggcatcccagcccctgtgtactttggagtgctgattgacaccagctgcctgaagtggggcttcaagagatgtggcagccggggcagctgccgcctgtatgacagcaatgtgttccgccacatctacctgggcctgaccgtcatcctgggcaccgtgtccatcctgctgagcattgctgtgctcttcatcctgaagaagaactacgtgtccaagcacaggagcttcatcaccaagcgggagaggaccatggtgtccacccgcttccagaaggagaactacaccaccagtgaccacctgctgcagcccaactactggccaggcaaggagacccagctgtag

SEQ ID NO: 171088 - DNA, 2193 bp, synthetic construct
  misc_feature 1..2193: note = Description of Artificial Sequence: Synthetic coding sequence
  source 1..2193: mol_type = other DNA
atggacaccagcagcaaagaaaacatccagctgttctgcaagacctctgtgcagcctgtgggccggcccagcttcaagacagagtaccccagcagcgaggagaagcagccctgctgcggggagctgaaggtgttcctgtgtgccctgagctttgtgtactttgccaaggccctggccgagggctacctgaagagcaccatcacccagatcgagaggagatttgacatccccagcagcctggtgggcgtgattgatggcagctttgagatcggcaacctgctggtgatcacctttgtgtcctactttggagccaagctgcaccggcccaagatcatcggggccggctgcgtcatcatgggcgtgggcaccctgctgattgccatgccccagttcttcatggagcagtacaagtatgaaagatacagccccagcagcaacagcaccctgagcatcagcccctgcctgctggagagcagcagccagctgcctgtgtctgtgatggagaagagcaagagcaagatcagcaatgaatgtgaggtggacaccagcagctccatgtggatctacgtgttcctgggcaacctgctgcggggcattggagagacccccatccagcccctgggcatcgcctacctggatgactttgccagcgaggacaatgctgccttctacatcggctgtgtgcagacagtggccatcatcggccccatcttcggcttcctgctgggcagcctgtgtgccaagctgtatgtggacattggatttgtgaacctggaccacatcaccatcacccccaaggacccccagtgggtgggcgcctggtggctgggctacctgattgctggcatcatcagcctgctggccgctgtgcccttctggtacctgcccaagagcctgcccaggagccagagccgggaggacagcaacagcagcagcgagaagagcaagttcatcattgatgaccacacagactaccagaccccccagggagaaaatgccaagatcatggagatggcccgggacttcctgcccagcctgaagaacctgtttggaaatcctgtgtacttcctgtacctgtgcaccagcacagtgcagttcaacagcctgtttggcatggtgacctacaagcccaagtacatcgagcagcagtatggccagagcagcagccgggccaactttgtgattggcctcatcaacatcccagctgtggccctgggcatcttcagcggcggcatcgtgatgaagaagttccgcatctctgtgtgtggggccgccaagctgtacctgggcagctctgtgtttggctacctgctcttcctgagcctgtttgccctgggctgtgagaacagtgatgtggccggcctgactgtgtcctaccagggcaccaagcctgtgtcctaccacgagcgggccctcttcagtgactgcaacagccgctgcaagtgcagcgagaccaagtgggagcccatgtgtggagaaaatggcatcacctacgtgtctgcctgcctggccggctgccagaccagcaacagaagtggcaagaacatcatcttctacaactgcacctgtgtgggcattgctgccagcaagagcggcaacagcagcggcatcgtgggccgctgccagaaggacaatggctgcccccagatgttcctgtacttcctggtgatcagcgtcatcaccagctacaccctgagcctgggcggcatccctggctacatcctgctgctgcgctgcatcaagccccagctgaagagctttgccctgggcatctacaccctggccatccgggtgctggccggcatcccagcccctgtgtactttggagtgctgattgacaccagctgcctgaagtggggcttcaagagatgtggcagccggggcagctgccgcctgtatgacagcaatgtgttccgctaccagatcaagagcatcccagccagccactgctacagcatcccagacctgcacaatgccacagacaccaacaagttcagctgccacttcaccgcctgcaagacctacatcagcggcaccaactgtgacaccggccacagcgtgaacagccccaagcactgcagcaccttccacttcaaggagaagctgtgcttcaagacccagaagttctacaaccaggagaggaagaacaatggagtgtacaagatccccaagggcaagctgcactacaagtag

SEQ ID NO: 171089 - DNA, 1992 bp, synthetic construct
  misc_feature 1..1992: note = Description of Artificial Sequence: Synthetic coding sequence
  source 1..1992: mol_type = other DNA
atggacaccagcagcaaagaaaacatccagctgttctgcaagacctctgtgcagcctgtgggccggcccagcttcaagacagagtaccccagcagcgaggagaagcagccctgctgcggggagctgaaggtgttcctgtgtgccctgagctttgtgtactttgccaaggccctggccgagggctacctgaagagcaccatcacccagatcgagaggagatttgacatccccagcagcctggtgggcgtgattgatggcagctttgagatcggcaacctgctggtgatcacctttgtgtcctactttggagccaagctgcaccggcccaagatcatcggggccggctgcgtcatcatgggcgtgggcaccctgctgattgccatgccccagttcttcatggagcagtacaagtatgaaagatacagccccagcagcaacagcaccctgagcatcagcccctgcctgctggagagcagcagccagctgcctgtgtctgtgatggagaagagcaagagcaagatcagcaatggctgtgtgcagacagtggccatcatcggccccatcttcggcttcctgctgggcagcctgtgtgccaagctgtatgtggacatcggctttgtgaacctggaccacatcaccatcacccccaaggacccccagtgggtgggcgcctggtggctgggctacctgattgctggcatcatcagcctgctggccgctgtgcccttctggtacctgcccaagagcctgcccaggagccagagccgggaggacagcaacagcagcagcgagaagagcaagttcatcattgatgaccacacagactaccagaccccccagggagaaaatgccaagatcatggagatggcccgggacttcctgcccagcctgaagaacctgtttggaaatcctgtgtacttcctgtacctgtgcaccagcacagtgcagttcaacagcctgtttggcatggtgacctacaagcccaagtacatcgagcagcagtatggccagagcagcagccgggccaacttcgtcatcggcctcatcaacatcccagctgtggccctgggcatcttcagcggcggcatcgtgatgaagaagttccgcatctctgtgtgtggggccgccaagctgtacctgggcagctctgtgtttggctacctgctcttcctgagcctgtttgccctgggctgtgaaaattctgatgtggccggcctgactgtgtcctaccagggcaccaagcctgtgtcctaccacgagcgggccctcttcagtgactgcaacagccgctgcaagtgcagcgagaccaagtgggagcccatgtgtggggagaatggcatcacctacgtgtctgcctgcctggccggctgccagaccagcaacagaagtggcaagaacatcatcttctacaactgcacctgtgtgggcattgctgccagcaagagcggcaacagcagcggcatcgtgggccgctgccagaaggacaatggctgcccccagatgttcctgtacttcctggtgatcagcgtcatcaccagctacaccctgagcctgggcggcatccctggctacatcctgctgctgcgctgcatcaagccccagctgaagagctttgccctgggcatctacaccctggccatccgggtgctggccggcatcccagcccctgtgtactttggagtgctgattgacaccagctgcctgaagtggggcttcaagagatgtggcagccggggcagctgccgcctgtatgacagcaatgtgttccgccacatctacctgggcctgaccgtcatcctgggcaccgtgtccatcctgctgagcattgctgtgctcttcatcctgaagaagaactacgtgtccaagcaccgctccttcatcaccaagcgggagaggaccatggtgtccacccgcttccagaaggagaactacaccaccagtgaccacctgctgcagcccaactactggccaggcaaggagacccagctgtag

SEQ ID NO: 171090 - DNA, 1839 bp, synthetic construct
  misc_feature 1..1839: note = Description of Artificial Sequence: Synthetic coding sequence
  source 1..1839: mol_type = other DNA
atgggcgtgggcaccctgctgattgccatgccccagttcttcatggagcagtacaagtatgaaagatacagccccagcagcaacagcaccctgagcatcagcccctgcctgctggagagcagcagccagctgcctgtgtctgtgatggagaagagcaagagcaagatcagcaatgaatgtgaggtggacaccagcagctccatgtggatctacgtgttcctgggcaacctgctgcggggcattggagagacccccatccagcccctgggcatcgcctacctggatgactttgccagcgaggacaatgctgccttctacatcggctgtgtgcagacagtggccatcatcggccccatcttcggcttcctgctgggcagcctgtgtgccaagctgtatgtggacattggatttgtgaacctggaccacatcaccatcacccccaaggacccccagtgggtgggcgcctggtggctgggctacctgattgctggcatcatcagcctgctggccgctgtgcccttctggtacctgcccaagagcctgcccaggagccagagccgggaggacagcaacagcagcagcgagaagagcaagttcatcattgatgaccacacagactaccagaccccccagggagaaaatgccaagatcatggagatggcccgggacttcctgcccagcctgaagaacctgtttggaaatcctgtgtacttcctgtacctgtgcaccagcacagtgcagttcaacagcctgtttggcatggtgacctacaagcccaagtacatcgagcagcagtatggccagagcagcagccgggccaactttgtgattggcctcatcaacatcccagctgtggccctgggcatcttcagcggcggcatcgtgatgaagaagttccgcatctctgtgtgtggggccgccaagctgtacctgggcagctctgtgtttggctacctgctcttcctgagcctgtttgccctgggctgtgagaacagtgatgtggccggcctgactgtgtcctaccagggcaccaagcctgtgtcctaccacgagcgggccctcttcagtgactgcaacagccgctgcaagtgcagcgagaccaagtgggagcccatgtgtggagaaaatggcatcacctacgtgtctgcctgcctggccggctgccagaccagcaacagaagtggcaagaacatcatcttctacaactgcacctgtgtgggcattgctgccagcaagagcggcaacagcagcggcatcgtgggccgctgccagaaggacaatggctgcccccagatgttcctgtacttcctggtgatcagcgtcatcaccagctacaccctgagcctgggcggcatccctggctacatcctgctgctgcgctgcatcaagccccagctgaagagctttgccctgggcatctacaccctggccatccgggtgctggccggcatcccagcccctgtgtactttggagtgctgattgacaccagctgcctgaagtggggcttcaagagatgtggcagccggggcagctgccgcctgtatgacagcaatgtgttccgctaccagatcaagagcatcccagccagccactgctacagcatcccagacctgcacaatgccacagacaccaacaagttcagctgccacttcaccgcctgcaagacctacatcagcggcaccaactgtgacaccggccacagcgtgaacagccccaagcactgcagcaccttccacttcaaggagaagctgtgcttcaagacccagaagttctacaaccaggagaggaagaacaatggagtgtacaagatccccaagggcaagctgcactacaagtag

SEQ ID NO: 171091 - DNA, 2193 bp, synthetic construct; identical to SEQ ID NO: 171088
  misc_feature 1..2193: note = Description of Artificial Sequence: Synthetic coding sequence
  source 1..2193: mol_type = other DNA

SEQ ID NO: 171092 - DNA, 1932 bp, synthetic construct
  misc_feature 1..1932: note = Description of Artificial Sequence: Synthetic coding sequence
  source 1..1932: mol_type = other DNA
atgggcctgctgcccaagctgggcgccagccagggcagtgacaccagcaccagccgggccggccgctgtgcccggtctgtgtttggaaacatcaaggtgtttgtgctgtgccagggcctgctgcagctgtgccagctgctgtacagcgcctacttcaagagcagcctgaccaccatcgagaagagatttggcctgagcagcagcagcagcggcctcatcagcagcctgaatgagatcagcaatgccatcctgatcatctttgtgtcctacttcggcagccgggtgcaccggccccggctgattggaattggaggcctcttcctggccgccggggccttcatcctgaccctgccccacttcctgtctgagccctaccagtacaccctggccagcacaggcaacaacagccggctgcaggccgagctgtgccagaagcactggcaggacctgccccccagcaagtgccacagcaccacccagaacccccagaaggagaccagctccatgtggggcctgatggtggtggcccagctgctggccggcatcggcaccgtgcccatccagcccttcggcatctcctatgtggatgacttcagcgagcccagcaacagccccctgtacatcagcatcctgtttgccatctctgtgtttggacctgccttcggctacctgctgggctctgtgatgctgcagatctttgtggactatggccgggtgaacacagctgctgtgaacctggtgcctggggacccccgctggattggagcctggtggctgggcctgctgatcagcagcgccctgctggtgctgaccagcttccccttcttcttcttcccccgggccatgcccatcggggccaagagggccccagccacagcagatgaggccaggaagctggaggaggccaagagccggggcagcctggtggacttcatcaagcgcttcccctgcatcttcctgcggctgctgatgaacagcctgtttgtgctggtggtgctggcccagtgcaccttcagctctgtgattgctggcctgagcaccttcctgaacaagttcctggagaagcagtatggcaccagcgctgcctatgccaacttcctgattggagctgtgaacctgcctgctgctgccctgggcatgctgtttggaggcatcctgatgaagagatttgtgttcagcctgcaggccatcccccgcatcgccaccaccatcatcaccatctccatgatcctgtgtgtgcccctcttcttcatgggctgcagcacccccaccgtggccgaggtgtacccacccagcaccagcagcagcatccacccccagagccctgcctgcagaagagactgcagctgcccagacagcatcttccaccctgtgtgtggggacaatggcatcgagtacctgagcccctgccacgccggctgcagcaacatcaacatgagcagcgccaccagcaagcagctgatctacctgaactgcagctgtgtgactggaggcagcgccagcgccaagacaggcagctgccctgtgccctgtgcccacttcctgctgcctgccatcttcctgatcagctttgtgtccctcatcgcctgcatcagccacaaccccctgtacatgatggtgctgcgggtggtgaaccaggaggagaagagctttgccatcggcgtgcagttcctgctgatgaggctgctggcctggctgcccagccctgccctgtatggcctgaccatcgaccacagctgcatccgctggaacagcctgtgcctgggccggcggggggcctgtgcctactatgacaatgatgccctgcgggaccgctacctgggcctgcagatgggctacaaggccctgggcatgctgctgctgtgcttcatctcctggagggtgaagaagaacaaggagtacaacgtgcagaaggccgccggcctcatctag

SEQ ID NO: 171093 - DNA, 1248 bp, synthetic construct
  misc_feature 1..1248: note = Description of Artificial Sequence: Synthetic coding sequence
  source 1..1248: mol_type = other DNA
atgggcctgctgcccaagctgggcgccagccagggcagtgacaccagcaccagccgggccggccgctgtgcccggtctgtgtttggaaacatcaaggtgtttgtgctgtgccagggcctgctgcagctgtgccagctgctgtacagcgcctacttcaagagcagcctgaccaccatcgagaagagatttggcctgagcagcagcagcagcggcctcatcagcagcctgaatgagatcagcaatgccatcctgatcatctttgtgtcctacttcggcagccgggtgcaccggccccggctgattggaattggaggcctcttcctggccgccggggccttcatcctgaccctgccccacttcctgtctgagccctaccagtacaccctggccagcacaggcaacaacagccggctgcaggccgagctgtgccagaagcactggcaggacctgccccccagcaagtgccacagcaccacccagaacccccagaaggagaccagctccatgtggggcctgatggtggtggcccagctgctggccggcatcggcaccgtgcccatccagcccttcggcatctcctatgtggatgacttcagcgagcccagcaacagccccctgtacatcagcatcctgtttgccatctctgtgtttggacctgccttcggctacctgctgggctctgtgatgctgcagatctttgtggactatggccgggtgaacacagctgctgtgaacctggtgcctggggacccccgctggattggagcctggtggctgggcctgctgatcagcagcgccctgctggtgctgaccagcttccccttcttcttcttcccccgggccatgcccatcggggccaagagggccccagccacagcagatgaggccaggaagctggaggaggccaagagccggggcagcctggtggacttcatcaagcgcttcccctgcatcttcctgcggctgctgatgaacagcctgtttgtgctggtggtgctggcccagtgcaccttcagctctgtgattgctggcctgagcaccttcctgaacaagttcctggagaagcagtatggcaccagcgctgcctatgccaacttcctgattgcccaccaggtgctgtacatccgcagcctgctgcctgctgctggaacagcccgggcccagatcctgagcagcaccaggtctgtggagaccatggagagcagcaccagccccctggccatgcctgctgctgccaccagcacctag

SEQ ID NO: 171094 - DNA, 2133 bp, synthetic construct
  misc_feature 1..2133: note = Description of Artificial Sequence: Synthetic coding sequence
  source 1..2133: mol_type = other DNA
atgcagggcaagaagccaggcggcagcagcggcggcggccgctctggagagctgcagggagatgaggcccagaggaacaagaagaagaagaagaaggtgtcctgcttcagcaacatcaagatcttcctggtgtctgaatgtgccctgatgctggcccagggcaccgtgggcgcctacctggtgtctgtgctgaccaccctggagcggcgcttcaacctgcagagcgcagatgtgggcgtgattgccagcagctttgaaattggcaacctggccctgatcctgtttgtgtcctactttggagcccggggccaccggccccggctgattggctgcggcggcatcgtgatggccctgggcgccctgctgagcgccctgcctgagttcctgacccaccagtacaagtatgaagctggggagatccgctggggcgctgagggcagagatgtgtgtgccgccaatggaagtggaggagatgagggccctgaccctgacctgatctgcaggaacagaacagccaccaacatgatgtacctgctgctgattggagcccaggtgctgctgggcattggagccacccctgtgcagcccctgggcgtgtcctacattgatgaccacgtgcggaggaaggacagcagcctgtacatcggcatcctcttcaccatgctggtgtttggacctgcctgtggcttcatcctgggcagcttctgcaccaagatctacgtggatgctgtgttcatcgacaccagcaacctggacatcaccccagatgacccccgctggattggagcctggtggggcggcttcctgctgtgtggggccctgctcttcttcagcagcctgctgatgtttggcttcccccagagcctgcccccccacagcgagcccgccatggagagcgagcaggccatgctgtctgagcgggagtatgagcggcccaagcccagcaatggagtgctgcggcaccccctggagccagacagcagcgccagctgcttccagcagctgcgggtcatccccaaggtgaccaagcacctgctgagcaaccctgtgttcacctgcatcatcctggccgcctgcatggagattgctgtggtggccggctttgctgccttcctgggcaagtacctggagcagcagttcaacctgaccaccagcagcgccaaccagctgctgggcatgacagccatcccctgtgcctgcctgggcatcttcctgggcggcctgctggtgaagaagctgagcctgagcgccctgggcgccatccgcatggccatgctggtgaacctggtgtccacagcctgctacgtgtccttcctgttcctgggctgtgacaccggccctgtggccggcgtgacagtgccctacggcaacagcacagcccctggcagcgccctggacccctacagcccctgcaacaacaactgtgagtgccagacagacagcttcacccctgtgtgtggggctgatggcatcacctacctgagcgcctgctttgctggctgcaacagcaccaacctgaccggctgtgcctgcctgaccaccgtgcctgcagaaaatgccaccgtggtgcctgggaagtgccccagccctggctgccaggaggccttcctgaccttcctgtgtgtgatgtgcatctgcagcctgattggagccatggcccagaccccatctgtcatcatcctgatcagaacagtgtccccagagctgaagagctatgccctgggcgtgctcttcctgctgctgcggctgctgggcttcatccccccacccctcatctttggagctggcatcgacagcacctgcctcttctggagcaccttctgtggggagcagggcgcctgtgtgctgtatgacaacgtggtgtaccgctacctgtatgtgtccatcgccatcgccctgaagagctttgccttcatcctgtacaccaccacctggcagtgcctgaggaagaactacaagcgctacatcaagaaccatgaaggaggcctgagcaccagcgagttctttgccagcaccctgaccctggacaacctgggccgggaccctgtgcctgccaaccagacccacaggaccaagttcatctacaacctggaggaccacgagtggtgtgagaacatggagagcgtgctgtag

SEQ ID NO: 171095 - DNA, 1356 bp, synthetic construct
  misc_feature 1..1356: note = Description of Artificial Sequence: Synthetic coding sequence
  source 1..1356: mol_type = other DNA
atgagggagatcgtgcacatccagatcggccagtgtggcaaccagatcggggccaagttctgggagatgattggagaggagcacggcatcgacctggccggcagtgacagaggagccagcgccctgcagctggagcgcatctctgtgtactacaatgaggcctacggcaggaaatatgtgcccagggctgtgctggtggacctggagcccggcaccatggacagcatccgcagcagcaagctgggcgccctcttccagcctgacagctttgtgcacggcaacagcggggccggcaacaactgggccaagggccactacacagaaggagctgagctgattgaaaatgtgctggaggtggtgagacatgagagcgagagctgtgactgcctgcagggcttccagatcgtgcacagcctgggcggcggcactggaagtggcatgggcaccctgctgatgaacaagatccgggaggagtacccagaccgcatcatgaacagcttctctgtgatgcccagccccaaggtgtctgacacagtggtggagccctacaatgctgtgctgagcatccaccagctgattgaaaatgctgatgcctgcttctgcatcgacaatgaggccctgtatgacatctgcttccgcaccctgaagctgaccacccccacctacggggacctgaaccacctggtgtccctgaccatgagcggcatcaccaccagcctgcgcttccctggccagctgaatgctgacctgaggaagctggccgtgaacatggtgcccttcccccggctgcacttcttcatgcctggctttgcccccctgacagcccagggcagccagcagtaccgggccctgtctgtggccgagctgacccagcagatgtttgatgccaggaacaccatggccgcctgtgacctgcggcggggccgctacctgactgtggcctgcatcttccggggcaagatgagcaccaaggaggtggaccagcagctgctgtctgtgcagaccaggaacagcagctgctttgtggagtggatccccaacaacgtgaaggtggccgtgtgtgacatccccccccggggcctgtccatggccgccaccttcatcggcaacaacacagccatccaggagatcttcaacagagtgtctgagcacttcagcgccatgttcaagaggaaggcctttgtgcactggtacaccagcgagggcatggacatcaatgaatttggagaggccgagaacaacatccatgacctggtgtctgagtaccagcagttccaggatgccaaggctgtgctggaggaggatgaggaggtgacagaggaggccgagatggagccagaagataaaggccactag

SEQ ID NO: 171096 - DNA, 1749 bp, synthetic construct
  misc_feature 1..1749: note = Description of Artificial Sequence: Synthetic coding sequence
  source 1..1749: mol_type = other DNA
atgcccctgcaccagctgggggacaagcccctgaccttccccagccccaacagcgccatggagaatggcctggaccacaccccacccagcagaagagccagccctggcacccccctgagccctggcagcctgcggtctgctgcccacagccccctggacaccagcaagcagcccctgtgccagctgtgggccgagaagcatggagcccggggcacccatgaggtgcgctacgtgtctgctggccagagcgtggcctgtggctggtgggcctttgccccaccctgcctgcaggtgctgaacacccccaagggcatcctcttcttcctgtgtgccgccgccttcctgcagggcatgacagtgaatggcttcatcaacacagtcatcaccagcctggagaggagatatgacctgcacagctaccagagcggcctgattgccagcagctatgacattgctgcctgcctgtgcctgacctttgtgtcctactttggaggcagcggccacaagccccgctggctgggctggggcgtgctgctgatgggcaccggcagcctggtgtttgccctgccccacttcaccgctggccgctatgaggtggagctggatgctggggtgaggacctgcccagccaaccctggagctgtgtgtgccgacagcaccagcggcctgagccgctaccagctggtgttcatgctgggccagttcctgcatggagtgggcgccacccccctgtacaccctgggcgtgacctacctgggcatgagcaccttcagccccaagttcctggagagccagttcagcctgagcgccagcgaggccgccaccctgtttggctacctggtggtgcctgctgggggcggcggcaccttcctgggcggcttctttgtgaacaagctgcggctgcggggcagcgctgtgatcaagttctgcctcttctgcaccgtggtgtccctgctgggcatcctggtgttcagcctgcactgccccagcgtgcccatggccggcgtgacagccagctatggaggcagcctgctgcctgagggccacctgaacctgacagccccctgcaatgctgcctgcagctgccagcctgagcactacagccctgtgtgtggcagtgatggcctgatgtacttcagcctgtgccacgccggctgcccagctgccacagagaccaacgtggatggccagaaggtgtacagagactgcagctgcatcccccagaacctgagcagcggcttcggccacgccacagctgggaagtgcaccagcacctgccagaggaagcccctgctgctggtgttcatctttgtggtgatcttcttcaccttcctgagcagcatcccagccctgacagccaccctgcgctgtgtgcgggacccccagaggagctttgccctgggcatccagtggatcgtggtgcgcatcctgggcggcatccctggccccatcgccttcggctgggtgattgacaaggcctgcctgctgtggcaggaccagtgtggccagcagggcagctgcctggtgtaccagaacagcgccatgagccgctacatcctgatcatgggcctgctgtacaaggtgctgggcgtgctcttctttgccatcgccagcagcagagctgccagtgaccaccggcccaggcctcctggccacggcggccacagcgccttcccagatgacagaacagtgcccctgggagatgccatcacccgggagctgctgtttgacctgcagcccagcacctag

SEQ ID NO: 171097 - DNA, 2169 bp, synthetic construct
  misc_feature 1..2169: note = Description of Artificial Sequence: Synthetic coding sequence
  source 1..2169: mol_type = other DNA
atgcccctgcaccagctgggggacaagcccctgaccttccccagccccaacagcgccatggagaatggcctggaccacaccccacccagcagaagagccagccctggcacccccctgagccctggcagcctgcggtctgctgcccacagccccctggacaccagcaagcagcccctgtgccagctgtgggccgagaagcatggagcccggggcacccatgaggtgcgctacgtgtctgctggccagagcgtggcctgtggctggtgggcctttgccccaccctgcctgcaggtgctgaacacccccaagggcatcctcttcttcctgtgtgccgccgccttcctgcagggcatgacagtgaatggcttcatcaacacagtcatcaccagcctggagaggagatatgacctgcacagctaccagagcggcctgattgccagcagctatgacattgctgcctgcctgtgcctgacctttgtgtcctactttggaggcagcggccacaagccccgctggctgggctggggcgtgctgctgatgggcaccggcagcctggtgtttgccctgccccacttcaccgctggccgctatgaggtggagctggatgctggggtgaggacctgcccagccaaccctggagctgtgtgtgccgacagcaccagcggcctgagccgctaccagctggtgttcatgctgggccagttcctgcatggagtgggcgccacccccctgtacaccctgggcgtgacctacctggatgaaaatgtgaagagcagctgcagccctgtgtacatcgccatcttctacacagctgccatcctgggccctgctgctggctacctgattggaggagccctgctgaacatctacacagagatgggcagaagaacagagctgaccacagagagccccctgtgggtgggcgcctggtgggtgggcttcctgggcagcggggccgccgccttcttcaccgctgtgcccatcctgggctacccccggcagctgcccggcagccagagatatgctgtgatgagagctgctgagatgcaccagctgaaggacagcagcagaggagaggccagcaacccagactttgggaagaccatccgggacctgcccctgagcatctggctgctgctgaagaaccccaccttcatcctgctgtgcctggccggggccacagaggccaccctcatcaccggcatgagcaccttcagccccaagttcctggagagccagttcagcctgagcgccagcgaggccgccaccctgtttggctacctggtggtgcctgctgggggcggcggcaccttcctgggcggcttctttgtgaacaagctgcggctgcggggcagcgctgtgatcaagttctgcctcttctgcaccgtggtgtccctgctgggcatcctggtgttcagcctgcactgccccagcgtgcccatggccggcgtgacagccagctatggaggcagcctgctgcctgagggccacctgaacctgacagccccctgcaatgctgcctgcagctgccagcctgagcactacagccctgtgtgtggcagtgatggcctgatgtacttcagcctgtgccacgccggctgcccagctgccacagagaccaacgtggatggccagaaggtgtacagagactgcagctgcatcccccagaacctgagcagcggcttcggccacgccacagctgggaagtgcaccagcacctgccagaggaagcccctgctgctggtgttcatctttgtggtgatcttcttcaccttcctgagcagcatcccagccctgacagccaccctgcgctgtgtgcgggacccccagaggagctttgccctgggcatccagtggatcgtggtgcgcatcctgggcggcatccctggccccatcgccttcggctgggtgattgacaaggcctgcctgctgtggcaggaccagtgtggccagcagggcagctgcctggtgtaccagaacagcgccatgagccgctacatcctgatcatgggcctgctgtacaaggtgctgggcgtgctcttctttgccatcgcctgcttcctgtacaagcccctgtctgagagcagtgatggcctggagacctgcctgcccagccagagcagcgccccagacagcgccacagacagccagctgcagagctctgtgtag

SEQ ID NO: 171098 - DNA, 2169 bp, synthetic construct
  misc_feature 1..2169: note = Description of Artificial Sequence: Synthetic coding sequence
  source 1..2169: mol_type = other DNA
atgcccctgcaccagctgggggacaagcccctgaccttccccagccccaacagcgccatggagaatggcctggaccacaccccacccagcagaagagccagccctggcacccccctgagccctggcagcctgcggtctgctgcccacagccccctggacaccagcaagcagcccctgtgccagctgtgggccgagaagcatggagcccggggcacccatgaggtgcgctacgtgtctgctggccagagcgtggcctgtggctggtgggcctttgccccaccctgcctgcaggtgctgaacacccccaagggcatcctcttcttcctgtgtgccgccgccttcctgcagggcatgacagtgaatggcttcatcaacacagtcatcaccagcctggagaggagatatgacctgcacagctaccagagcggcctgattgccagcagctatgacattgctgcctgcctgtgcctgacctttgtgtcctactttggaggcagcggccacaagccccgctggctgggctggggcgtgctgctgatgggcaccggcagcctggtgtttgccctgccccacttcaccgctggccgctatgaggtggagctggatgctggggtgaggacctgcccagccaaccctggagctgtgtgtgccgacagcaccagcggcctgagccgctaccagctggtgttcatgctgggccagttcctgcatggagtgggcgccacccccctgtacaccctgggcgtgacctacctggatgaaaatgtgaagagcagctgcagccctgtgtacatcgccatcttctacacagctgccatcctgggccctgctgctggctacctgattggaggagccctgctgaacatctacacagagatgggcagaagaacagagctgaccacagagagccccctgtgggtgggcgcctggtgggtgggcttcctgggcagcggggccgccgccttcttcaccgctgtgcccatcctgggctacccccggcagctgcccggcagccagagatatgctgtgatgagagctgctgagatgcaccagctgaaggacagcagcagaggagaggccagcaacccagactttgggaagaccatccgggacctgcccctgagcatctggctgctgctgaagaaccccaccttcatcctgctgtgcctggccggggccacagaggccaccctcatcaccggcatgagcaccttcagccccaagttcctggagagccagttcagcctgagcgccagcgaggccgccaccctgtttggctacctggtggtgcctgctgggggcggcggcaccttcctgggcggcttctttgtgaacaagctgcggctgcggggcagcgctgtgatcaagttctgcctcttctgcaccgtggtgtccctgctgggcatcctggtgttcagcctgcactgccccagcgtgcccatggccggcgtgacagccagctatggaggcagcctgctgcctgagggccacctgaacctgacagccccctgcaatgctgcctgcagctgccagcctgagcactacagccctgtgtgtggcagtgatggcctgatgtacttcagcctgtgccacgccggctgcccagctgccacagagaccaacgtggatggccagaaggtgtacagagactgcagctgcatcccccagaacctgagcagcggcttcggccacgccacagctgggaagtgcaccagcaccttcctgtacatcccccagcagcacagctgcaccaatggaaacagcaccaccggggccctgcaggagacccccaggagcaagagggcctgccgctgtgtgcgggacccccagaggagctttgccctgggcatccagtggatcgtggtgcgcatcctgggcggcatccctggccccatcgccttcggctgggtgattgacaaggcctgcctgctgtggcaggaccagtgtggccagcagggcagctgcctggtgtaccagaacagcgccatgagccgctacatcctgatcatgggcctgctgtacaaggtgctgggcgtgctcttctttgccatcgcctgcttcctgtacaagcccctgtctgagagcagtgatggcctggagacctgcctgcccagccagagcagcgccccagacagcgccacagacagccagctgcagagctctgtgtag

SEQ ID NO: 171099 - DNA, 456 bp, synthetic construct
  misc_feature 1..456: note = Description of Artificial Sequence: Synthetic coding sequence
  source 1..456: mol_type = other DNA
accacagccctgtgtgccgccaggacagccagctgcaccagccactgtgccacccagggcgccctgcagcccaggaggaggatgtggacagcccggcgctgtgtgcgggacccccagaggagctttgccctgggcatccagtggatcgtggtgcgcatcctgggcggcatccctggccccatcgccttcggctgggtgattgacaaggcctgcctgctgtggcaggaccagtgtggccagcagggcagctgcctggtgtaccagaacagcgccatgagccgctacatcctgatcatgggcctgctgtacaaggtgctgggcgtgctcttctttgccatcgcctgcttcctgtacaagcccctgtctgagagcagtgatggcctggagacctgcctgcccagccagagcagcgccccagattctgccacagacagccagctgcagagctctgtgtag

SEQ ID NO: 171100 - DNA, 1863 bp, synthetic construct
  misc_feature 1..1863: note = Description of Artificial Sequence: Synthetic coding sequence
  source 1..1863: mol_type = other DNA
atgcccctgcaccagctgggggacaagcccctgaccttccccagccccaacagcgccatggagaatggcctggaccacaccccacccagcagaagagccagccctggcacccccctgagccctggcagcctgcggtctgctgcccacagccccctggacaccagcaagcagcccctgtgccagctgtgggccgagaagcatggagcccggggcacccatgaggtgcgctacgtgtctgctggccagagcgtggcctgtggctggtgggcctttgccccaccctgcctgcaggtgctgaacacccccaagggcatcctcttcttcctgtgtgccgccgccttcctgcagggcatgacagtgaatggcttcatcaacacagtcatcaccagcctggagaggagatatgacctgcacagctaccagagcggcctgattgccagcagctatgacattgctgcctgcctgtgcctgacctttgtgtcctactttggaggcagcggccacaagccccgctggctgggctggggcgtgctgctgatgggcaccggcagcctggtgtttgccctgccccacttcaccgctggccgctatgaggtggagctggatgctggggtgaggacctgcccagccaaccctggagctgtgtgtgccgacagcaccagcggcctgagccgctaccagctggtgttcatgctgggccagttcctgcatggagtgggcgccacccccctgtacaccctgggcgtgacctacctggatgaaaatgtgaagagcagctgcagccctgtgtacatcgccatcttctacacagctgccatcctgggccctgctgctggctacctgattggaggagccctgctgaacatctacacagagatgggcagaagaacagagctgaccacagagagccccctgtgggtgggcgcctggtgggtgggcttcctgggcagcggggccgccgccttcttcaccgctgtgcccatcctgggctacccccggcagctgcccggcagccagagatatgctgtgatgagagctgctgagatgcaccagctgaaggacagcagcagaggagaggccagcaacccagactttgggaagaccatccgggacctgcccctgagcatctggctgctgctgaagaaccccaccttcatcctgctgtgcctggccggggccacagaggccaccctcatcaccggcatgagcaccttcagccccaagttcctggagagccagttcagcctgagcgccagcgaggccgccaccctgtttggctacctggtggtgcctgctgggggcggcggcaccttcctgggcggcttctttgtgaacaagctgcggctgcggggcagcgctgtgatcaagttctgcctcttctgcaccgtggtgtccctgctgggcatcctggtgttcagcctgcactgccccagcgtgcccatggccggcgtgacagccagctatggaggcagcctgctgcctgagggccacctgaacctgacagccccctgcaatgctgcctgcagctgccagcctgagcactacagccctgtgtgtggcagtgatggcctgatgtacttcagcctgtgccacgccggctgcccagctgccacagagaccaacgtggatggccagaaggtgtctggagctgctgcctaccggccctgcccccccctggaccctggaaaaggaccaccctgcctgcccctggtgattggagccatcgtgggcctgccccgctgcacagagaccgtggccgtgtccctgcgcatcttccccctggtgctggccatgcccctgcagggcaatgccctgcagctggtgcgggagagccccagcttctggttctcctacagcctgtag

SEQ ID NO: 171101 - DNA, 2160 bp, synthetic construct
  misc_feature 1..2160: note = Description of Artificial Sequence: Synthetic coding sequence
  source 1..2160: mol_type = other DNA
atgtttgtgggcgtggcccggcacagcggcagccaggatgaggtgtcccggggcgtggagcccctggaggccgcccgggcccagcctgccaaggacagaagagccaagggcacccccaagagcagcaagccaggcaagaagcaccgctacctgcggctgctgcctgaggccctgatccgctttggaggcttcaggaagaggaagaaggccaagagctctgtgtccaagaagccaggagaggtggatgacagcctggagcagccctgtggcctgggctgcctggtgtccacctgctgtgagtgctgcaacaacatccgctgcttcatgatcttctactgcatcctgctgatctgccagggcgtggtgtttggcctgattgatgtgtccatcggggacttccagaaggagtaccagctgaagaccatcgagaagctggccctggagaagagctatgacatcagcagcggcctggtggccatcttcatcgccttctatggagacaggaagaaggtgatctggtttgtggccagcagcttcctgattggcctgggcagcctgctgtgtgccttccccagcatcaatgaggagaacaagcagagcaaggtgggcatcgaggacatctgtgaggagatcaaggtggtgtctggctgccagagcagcggcatctccttccagagcaagtacctgtccttcttcatcctgggccagacagtgcagggcattgctggcatgcccctgtacatcctgggcatcaccttcattgatgaaaatgtggccacccacagcgctggcatctacctgggcattgctgaatgtacctccatgattggctacgccctgggctacgtgctgggcgcccccctggtgaaggtgcctgagaacaccaccagcgccaccaacaccaccgtgaacaacggcagccctgagtggctgtggacctggtggatcaacttcctgtttgctgctgtggtggcctggtgcaccctcatccccctgagctgcttccccaacaacatgcctggcagcacccgcatcaaggccaggaagaggaagcagctgcacttctttgacagccggctgaaggacctgaagctgggcaccaacatcaaggacctgtgtgccgccctgtggatcctgatgaagaaccctgtgctgatctgcctggccctgagcaaggccacagagtacctggtgatcatcggggccagcgagttcctgcccatctacctggagaaccagttcatcctgacccccaccgtggccaccaccctggccggcctggtgctgatccctggaggagccctgggccagctgctgggcggcgtgattgtgtccaccctggagatgagctgcaaggccctgatgaggttcatcatggtgaccagcgtcatcagcctcatcctgctggtgttcatcatctttgtgcgctgcaaccctgtgcagtttgctggcatcaatgaagattatgatggcaccgggaagctgggcaacctgacagccccctgcaatgaaaaatgtcgctgcagcagcagcatctacagcagcatctgtggcagagatgacatcgagtacttcagcccctgctttgctggctgcacctacagcaaggcccagaaccagaagaagatgtactacaactgcagctgcatcaaggagggcctcatcacagcagatgctgagggggacttcattgatgcccggcctggaaaatgtgatgccaagtgctacaagctgcccctcttcatcgccttcatcttcagcaccctcatcttcagcggcttctctggagtgcccatcgtgctggccatgaccagggtggtgcctgacaagctgcggagcctggccctgggcgtgtcctatgtgatcctgcgcatcttcggcaccatccctggccccagcatcttcaagatgtctggagagaccagctgcatcctgagagatgtgaacaagtgtggccacacaggccgctgctggatctacaacaagaccaagatggccttcctgctggtgggcatctgcttcctgtgcaagctgtgcaccatcatcttcaccaccatcgccttcttcatctacaagaggcggctgaatgaaaatacagacttcccagatgtgacagtgaagaaccccaaggtgaagaagaaggaggagacagacctgtag

SEQ ID NO: 171102 - DNA, 1401 bp, synthetic construct
  misc_feature 1..1401: note = Description of Artificial Sequence: Synthetic coding sequence
  source 1..1401: mol_type = other DNA
atgtttgtgggcgtggcccggcacagcggcagccaggatgaggtgtcccggggcgtggagcccctggaggccgcccgggcccagcctgccaaggacagaagagccaagggcacccccaagagcagcaagccaggcaagaagcaccgctacctgcggctgctgcctgaggccctgatccgctttggaggcttcaggaagaggaagaaggccaagagctctgtgtccaagaagccaggagaggtggatgacagcctggagcagccctgtggcctgggctgcctggtgtccacctgctgtgagtgctgcaacaacatccgctgcttcatgatcttctactgcatcctgctgatctgccagggcgtggtgtttggcctgattgatgtgtccatcggggacttccagaaggagtaccagctgaagaccatcgagaagctggccctggagaagagctatgacatcagcagcggcctggtggccatcttcatcgccttctatggagacaggaagaaggtgatctggtttgtggccagcagcttcctgattggcctgggcagcctgctgtgtgccttccccagcatcaatgaggagaacaagcagagcaaggtgggcatcgagggcattgctgaatgtacctccatgattggctacgccctgggctacgtgctgggcgcccccctggtgaaggtgcctgagaacaccaccagcgccaccaagacaggcaagctgggcaacctgacagccccctgcaatgagaagtgccgctgcagcagcagcatctacagcagcatctgtggcagagatgacatcgagtacttcagcccctgctttgctggctgcacctacagcaaggcccagaaccagaagaagatgtactacaactgcagctgcatcaaggagggcctcatcacagcagatgctgagggggacttcattgatgcccggcctggaaaatgtgatgccaagtgctacaagctgcccctcttcatcgccttcatcttcagcaccctcatcttcagcggcttcagcggcgtgcccatcgtgctggccatgaccagggtggtgcctgacaagctgcggagcctggccctgggcgtgtcctatgtgatcctgcgcatcttcggcaccatccctggccccagcatcttcaagatgtctggagagaccagctgcatcctgagagatgtgaacaagtgtggccacacaggccgctgctggatctacaacaagaccaagatggccttcctgctggtgggcatctgcttcctgtgcaagctgtgcaccatcatcttcaccaccatcgccttcttcatctacaagaggcggctgaatgaaaatacagacttcccagatgtgacagtgaagaaccccaaggtgaagaagaaggaggagacagacctgtag

SEQ ID NO: 171103 - DNA, 1974 bp, synthetic construct
  misc_feature 1..1974: note = Description of Artificial Sequence: Synthetic coding sequence
  source 1..1974: mol_type = other DNA
atgtttgtgggcgtggcccggcacagcggcagccaggatgaggtgtcccggggcgtggagcccctggaggccgcccgggcccagcctgccaaggacagaagagccaagggcacccccaagagcagcaagccaggcaagaagcaccgctacctgcggctgctgcctgaggccctgatccgctttggaggcttcaggaagaggaagaaggccaagagctctgtgtccaagaagccaggagaggtggatgacagcctggagcagccctgtggcctgggctgcctggtgtccacctgctgtgagtgctgcaacaacatccgctgcttcatgatcttctactgcatcctgctgatctgccagggcgtggtgtttggcctgattgatgtgtccatcggggacttccagaaggagtaccagctgaagaccatcgagaagctggccctggagaagagctatgacatcagcagcggcctggtggccatcttcatcgccttctatggagacaggaagaaggtgatctggtttgtggccagcagcttcctgattggcctgggcagcctgctgtgtgccttccccagcatcaatgaggagaacaagcagagcaaggtgggcatcgagggcattgctgaatgtacctccatgattggctacgccctgggctacgtgctgggcgcccccctggtgaaggtgcctgagaacaccaccagcgccaccaacaccaccgtgaacaacggcagccctgagtggctgtggacctggtggatcaacttcctgtttgctgctgtggtggcctggtgcaccctcatccccctgagctgcttccccaacaacatgcctggcagcacccgcatcaaggccaggaagaggaagcagctgcacttctttgacagccggctgaaggacctgaagctgggcaccaacatcaaggacctgtgtgccgccctgtggatcctgatgaagaaccctgtgctgatctgcctggccctgagcaaggccacagagtacctggtgatcatcggggccagcgagttcctgcccatctacctggagaaccagttcatcctgacccccaccgtggccaccaccctggccggcctggtgctgatccctggaggagccctgggccagctgctgggcggcgtgattgtgtccaccctggagatgagctgcaaggccctgatgaggttcatcatggtgaccagcgtcatcagcctcatcctgctggtgttcatcatctttgtgcgctgcaaccctgtgcagtttgctggcatcaatgaagattatgatggcaccgggaagctgggcaacctgacagccccctgcaatgaaaaatgtcgctgcagcagcagcatctacagcagcatctgtggcagagatgacatcgagtacttcagcccctgctttgctggctgcacctacagcaaggcccagaaccagaagaagatgtactacaactgcagctgcatcaaggagggcctcatcacagcagatgctgagggggacttcattgatgcccggcctggaaaatgtgatgccaagtgctacaagctgcccctcttcatcgccttcatcttcagcaccctcatcttcagcggcttctctggagtgcccatcgtgctggccatgaccagggtggtgcctgacaagctgcggagcctggccctgggcgtgtcctatgtgatcctgcgcatcttcggcaccatccctggccccagcatcttcaagatgtctggagagaccagctgcatcctgagagatgtgaacaagtgtggccacacaggccgctgctggatctacaacaagaccaagatggccttcctgctggtgggcatctgcttcctgtgcaagctgtgcaccatcatcttcaccaccatcgccttcttcatctacaagaggcggctgaatgaaaatacagacttcccagatgtgacagtgaagaaccccaaggtgaagaagaaggaggagacagacctgtag

SEQ ID NO: 171104 - DNA, 2160 bp, synthetic construct; identical to SEQ ID NO: 171101
  misc_feature 1..2160: note = Description of Artificial Sequence: Synthetic coding sequence
  source 1..2160: mol_type = other DNA

SEQ ID NO: 171105 - DNA, 78 bp, synthetic construct
  misc_feature 1..78: note = Description of Artificial Sequence: Synthetic coding sequence
  source 1..78: mol_type = other DNA
ctcaatgaaaatacagacttcccagatgtgacagtgaagaaccccaaggtgaagaagaaggaggagacagacctgtag

SEQ ID NO: 171106 - DNA, 1401 bp, synthetic construct; identical to SEQ ID NO: 171102
  misc_feature 1..1401: note = Description of Artificial Sequence: Synthetic coding sequence
  source 1..1401: mol_type = other DNA

SEQ ID NO: 171107 - DNA, 351 bp, synthetic construct
  misc_feature 1..351: note = Description of Artificial Sequence: Synthetic coding sequence
  source 1..351: mol_type = other DNA
atgctgagctgccgcctgcagtgtgccctggccgccctgagcatcgtgctggccctgggctgtgtgactggagcccccagcgacccccggctgcggcagttcctgcagaagagcctggccgctgctgctgggaagcaggagctggccaagtacttcctggccgagctgctgtctgagcccaaccagacagaaaatgatgccctggagcctgaggacctgagccaggccgctgagcaggatgagatgaggctggagctgcagaggtctgccaacagcaacccagccatggccccccgggagaggaaggccggctgcaagaacttcttctggaagaccttcaccagctgctag

SEQ ID NO: 171108 - DNA, 1176 bp, synthetic construct
  misc_feature 1..1176: note = Description of Artificial Sequence: Synthetic coding sequence
  source 1..1176: mol_type = other DNA
atgttccccaacggcacagccagcagccccagcagcagccccagccccagccctggcagctgtggggagggcggcggcagccggggccctggggccggggctgctgatggcatggaggagcctggaagaaatgccagccagaatggcaccctgtctgagggccagggcagcgccatcctgatctccttcatctacagcgtggtgtgcctggtgggcctgtgtggcaacagcatggtgatctacgtgatcctgcgctatgccaagatgaagacagccaccaacatctacatcctgaacctggccatcgcagatgagctgctgatgctgtctgtgcccttcctggtgaccagcaccctgctgcggcactggccctttggagccctgctgtgccgcctggtgctgtctgtggatgctgtgaacatgttcaccagcatctactgcctgactgtgctgtctgtggaccgctacgtggccgtggtgcaccccatcaaggccgcccgctacagaagacccaccgtggccaaggtggtgaacctgggcgtgtgggtgctgagcctgctggtgatcctgcccatcgtggtgttcagcaggacagctgccaacagtgatggcaccgtggcctgcaacatgctgatgcctgagcccgcccagcgctggctggtgggctttgtgctgtacaccttcctgatgggcttcctgctgcctgtgggcgccatctgcctgtgctacgtgctgatcatcgccaagatgaggatggtggccctgaaggccggctggcagcagaggaagaggtctgagaggaagatcaccctgatggtgatgatggtggtgatggtgtttgtgatctgctggatgcccttctacgtggtgcagctggtgaatgtgtttgctgagcaggatgatgccaccgtgtcccagctgagcgtcatcctgggctacgccaacagctgtgccaaccccatcctgtatggcttcctgagtgacaacttcaagaggagcttccagaggatcctgtgcctgtcctggatggacaatgctgctgaggagcctgtggactactatgccacagccctgaagagccgggcctacagcgtggaggacttccagcctgagaacctggagagcggaggagtcttcagaaatggcacctgcaccagccgcatcaccaccctgtag

SEQ ID NO: 171109 - DNA, 1257 bp, synthetic construct
  misc_feature 1..1257: note = Description of Artificial Sequence: Synthetic coding sequence
  source 1..1257: mol_type = other DNA
atggacatgctgcaccccagctctgtgtccaccaccagcgagccagaaaatgccagcagcgcctggcccccagatgccaccctgggcaatgtgtctgctggccccagccctgctggcctggccgtgtctggagtgctgatccccctggtgtacctggtggtgtgtgtggtgggcctgctgggcaacagcctggtgatctacgtggtgctgcggcacacagccagccccagcgtgaccaacgtgtacatcctgaacctggccctggctgatgagctgttcatgctgggcctgcccttcctggccgcccagaatgccctgagctactggcccttcggcagcctgatgtgccgcctggtgatggctgtggatggcatcaaccagttcaccagcatcttctgcctgactgtgatgtctgtggaccgctacctggccgtggtgcaccccaccaggtctgcccgctggaggacagcccctgtggccaggacagtgtctgctgctgtgtgggtggccagcgctgtggtggtgctgcctgtggtggtgttcagcggcgtgccccggggcatgagcacctgccacatgcagtggccagagcctgctgctgcctggagggctggcttcatcatctacacagctgccctgggcttcttcggccccctgctggtgatctgcctgtgctacctgctgattgtggtgaaggtgcgctctgctggccggcgggtgtgggcccccagctgccagaggagaagaagaagtgaaagaagagtgaccaggatggtggtggccgtggtggccctgtttgtgctgtgctggatgcccttctacgtgctgaacatcgtgaatgtggtgtgccccctgcctgaggagcccgccttcttcggcctgtacttcctggtggtggccctgccctatgccaacagctgtgccaaccccatcctgtatggcttcctgagctaccgcttcaagcagggcttcagaagagtgctgctgcggcccagcagaagagtgcgcagccaggagcccaccgtgggccccccagagaagacagaggaggaggatgaggaggaggaggatggagaggagagccgggagggcggcaagggcaaggagatgaatggccgggtgtcccagatcacccagcccggcaccagcggccaggagcggccccccagccgggtggccagcaaggagcagcagctgctgccccaggaggccagcactggagagaagagcagcaccatgaggatctcctacctgtag

SEQ ID NO: 171110 - DNA, 1257 bp, synthetic construct; identical to SEQ ID NO: 171109
  misc_feature 1..1257: note = Description of Artificial Sequence: Synthetic coding sequence
  source 1..1257: mol_type = other DNA

SEQ ID NO: 171111 - DNA, 1167 bp, synthetic construct
  misc_feature 1..1167: note = Description of Artificial Sequence: Synthetic coding sequence
  source 1..1167: mol_type = other DNA
atgtctgcccccagcaccctgcccccaggaggagaggagggcctgggcacagcctggcccagcgctgccaatgccagcagcgccccagctgaggccgaggaggccgtggccggccctggagatgcccgggctgctggcatggtggccatccagtgcatctatgccctggtgtgcctggtgggcctggtgggcaatgccctggtgatcttcgtcatcctgcgctatgccaagatgaagacagccaccaacatctacctgctgaacctggccgtggctgatgagctgttcatgctgtctgtgccctttgtggccagcagcgctgccctgcggcactggcccttcggctctgtgctgtgcagagctgtgctgtctgtggatggcctgaacatgttcacctctgtgttctgcctgactgtgctgtctgtggacagatatgtggccgtggtgcaccccctgcgggccgccacctaccgccggcccagcgtggccaagctgatcaacctgggcgtgtggctggccagcctgctggtgaccctgcccatcgccatctttgctgacaccaggcctgcccggggcggccaggccgtggcctgcaacctgcagtggccccacccagcctggagcgctgtgtttgtggtgtacaccttcctgctgggcttcctgctgcctgtgctggccatcggcctgtgctacctgctgattgtgggcaagatgagagctgtggccctgcgggccggctggcagcagaggagaagaagtgagaagaagatcacccggctggtgctgatggtggtggtggtgtttgtgctgtgctggatgcccttctacgtggtgcagctgctgaacctgtttgtgaccagcctggatgccaccgtgaaccacgtgtccctcatcctgtcctatgccaacagctgtgccaaccccatcctgtatggcttcctgagtgacaacttccgccgcttcttccagagggtgctgtgcctgcgctgctgcctgctggagggcgctgggggcgctgaggaggagcccctggactactatgccacagccctgaagagcaagggcggggccggctgcatgtgcccccccctgccctgccagcaggaggccctgcagcctgagcccggcaggaagaggatccccctgaccaggaccaccaccttctag

SEQ ID NO: 171112 - DNA, 1095 bp, synthetic construct
  misc_feature 1..1095: note = Description of Artificial Sequence: Synthetic coding sequence
  source 1..1095: mol_type = other DNA
atggagcccctcttccctgccagcacccccagctggaatgccagcagccctggagctgccagcggcggcggggacaacagaaccctggtgggccctgcccccagcgctggggcccgggctgtgctggtgcctgtgctgtacctgctggtgtgtgccgccggcctgggcggcaacaccctggtgatctacgtggtgctgcgctttgccaagatgaagacagtgaccaacatctacatcctgaacctggccgtggctgatgtgctgtacatgctgggcctgcccttcctggccacccagaatgctgccagcttctggccctttggacctgtgctgtgccgcctggtgatgaccctggatggagtgaaccagttcaccagcgtcttctgcctgactgtgatgtctgtggaccgctacctggccgtggtgcaccccctgagcagcgcccgctggaggcggccccgggtggccaagctggccagcgctgctgcctgggtgctgagcctgtgcatgagcctgcccctgctggtgtttgctgatgtgcaggagggcggcacctgcaatgcctcctggccagagcctgtgggcctgtggggcgctgtgttcatcatctacacagctgtgctgggcttctttgcccccctgctggtgatctgcctgtgctacctgctgattgtggtgaaggtgcgggctgctggggtgcgggtgggctgtgtgagaagaagaagtgagaggaaggtgaccaggatggtgctggtggtggtgctggtgtttgctggctgctggctgcccttcttcaccgtgaacatcgtgaacctggccgtggccctgccccaggagcccgccagcgctggcctgtacttctttgtggtgatcctgtcctatgccaacagctgtgccaaccctgtgctgtatggcttcctgagtgacaacttccggcagagcttccagaaggtgctgtgcctgaggaaaggaagtggggccaaggatgctgatgccacagagcccaggccagaccgcatccggcagcagcaggaggccaccccaccagcccacagagctgctgccaacggcctgatgcagaccagcaagctgtag

SEQ ID NO: 171113 - DNA, 1095 bp, synthetic construct; identical to SEQ ID NO: 171112
  misc_feature 1..1095: note = Description of Artificial Sequence: Synthetic coding sequence
  source 1..1095: mol_type = other DNA

SEQ ID NO: 171114 - DNA, 822 bp, synthetic construct
  misc_feature 1..822: note = Description of Artificial Sequence: Synthetic coding sequence
  source 1..822: mol_type = other DNA
atggagcccctcttccctgccagcacccccagctggaatgccagcagccctggagctgccagcggcggcggggacaacagaaccctggtgggccctgcccccagcgctggggcccgggctgtgctggtgcctgtgctgtacctgctggtgtgtgccgccggcctgggcggcaacaccctggtgatctacgtggtgctgcgctttgccaagatgaagacagtgaccaacatctacatcctgaacctggccgtggctgatgtgctgtacatgctgggcctgcccttcctggccacccagaatgctgccagcttctggccctttggacctgtgctgtgccgcctggtgatgaccctggatggagtgaaccagttcaccagcgtcttctgcctgactgtgatgtctgtggaccgctacctggccgtggtgcaccccctgagcagcgcccgctggaggcggccccgggtggccaagctggccagcgctgctgcctgggtgctgagcctgtgcatgagcctgcccctgctggtgtttgctgatgtgcaggagggcggcacctgcaatgcctcctggccagagcctgtgggcctgtggggcgctgtgttcatcatctacacagctgtgctgggcttctttgcccccctgctgcggggcagcggccgggctggagatgccaacggccggccctgggagagccggcggctgcccccacgcatcgtgctgcccccaccaccccagaccccagccttccctggggcccctggccctgagcggggcccccgggagccctgctggggcctgtggggcaccctggccctgctgtag

SEQ ID NO: 171115 - DNA, 6978 bp, synthetic construct
  misc_feature 1..6978: note = Description of Artificial Sequence: Synthetic coding sequence
  source 1..6978: mol_type = other DNA
atggccaccaacatcgagcagatcttccgcagctttgtggtgtccaagttccgggagatccagcaggagctgagcagcggcagaaatgaaggccagctgaatggagagaccaacacccccatcgagggcaaccaggccggagatgctgctgccagcgcccggagcctgcccaatgaggagatcgtgcagaagattgaggaggtgctgagcggcgtgctggacacagagctgcgctacaagccagacctgaaggagggcagcaggaagagccgctgtgtgtctgtgcagacagaccccacagatgagatccccaccaagaagagcaagaagcacaagaagcacaagaacaagaagaagaagaagaagaaggagaaggagaagaagtacaagaggcagcctgaggagagcgagagcaagaccaagagccatgatgatggcaacatcgacctggagagtgacagcttcctgaagtttgacagcgagcccagcgctgtggccctggagctgcccacccgggccttcggccccagcgagaccaatgaatctccagctgtggtgctggagccccctgtggtgtccatggaggtgtctgagccccacatcctggagaccctgaagccagccaccaagacagctgagctgtctgtggtgtccaccagcgtcatcagcgagcagagcgagcagagcgtggccgtgatgcctgagcccagcatgaccaagatcctggacagctttgctgctgcccctgtgcccaccaccaccctggtgctgaagagcagcgagcctgtggtgaccatgtctgtggagtaccagatgaagtctgtgctgaagtctgtggagagcaccagccctgagcccagcaagatcatgctggtggagccccctgtggccaaggtgctggagcccagcgagaccctggtggtgagcagcgagacccccacagaggtgtacccagagcccagcaccagcaccaccatggacttccctgagagcagcgccatcgaggccctgcggctgcctgagcagcctgtggatgtgcccagcgagattgctgacagctccatgacccggccccaggagctgcctgagctgcccaagaccacagccctggagctgcaggagagctctgtggccagcgccatggagctgcccggccccccagccacctccatgcctgagctgcagggcccccctgtgacccctgtgctggagctgcccggccccagcgccacccctgtgcctgagctgcccggccccctgagcacccctgtgcctgagctgcccggccccccagccacagctgtgcctgagctgcccggccccagcgtgacccctgtgccccagctgagccaggagctgcccggcctgcctgcccccagcatgggcctggagcccccccaggaggtgcctgagccccctgtgatggcccaggagctgcccggcctgcccctggtgacagctgctgtggagctgcctgagcagcctgctgtgacagtggccatggagctgacagagcagcctgtgaccaccacagagctggagcagcctgtgggcatgaccaccgtggagcaccctggccaccctgaggtgaccacagccaccggcctgctgggccagcctgaggccaccatggtgctggagctgcccggccagcctgtggccaccacagccctggagctgcccggccagcccagcgtgactggagtgcctgagctgcccggcctgcccagcgccacccgggccctggagctgagcggccagcctgtggccactggagccctggagctgcccggccccctgatggctgctggggccctggagttcagcggccagagcggggctgctggggccctggagctgctgggccagcccctggccactggagtgctggagctgcccggccagcccggggcccctgagctgcccggccagcctgtggccaccgtggccctggagatctctgtgcagagcgtggtgaccaccagcgagctgagcaccatgacagtgtcccagagcctggaggtgcccagcaccacagccctggagagctacaacacagtggcccaggagctgcccaccaccctggtgggggagacctctgtgacagtgggcgtggaccccctgatggcccctgagagccacatcctggccagcaacaccatggagacccacatcctggccagcaacaccatggacagccagatgctggccagcaacaccatggacagccagatgctggccagcaacaccatggacagccagatgctggccagcagcaccatggacagccagatgctggccaccagctccatggacagccagatgctggccaccagctccatggacagccagatgctggccaccagcaccatggacagccagatgctggccaccagctccatggacagccagatgctggccaccagctccatggacagccagatgctggccaccagctccatggacagccagatgctggccaccagctccatggacagccagatgctggccaccagcaccatggacagccagatgctggccaccagcaccatggacagccagatgctggccaccagctccatggacagccagatgctggccagcggcaccatggacagccagatgctggccagcggcaccatggatgcccagatgctggccagcggcaccatggatgcccagatgctggccagcagcacccaggacagcgccatgctgggcagcaagagcccagacccctaccgcctggcccaggacccctaccgcctggcccaggacccctaccgcctgggccatgacccctaccgcctgggccatgatgcctaccgcctgggccaggacccctaccgcctgggccatgacccctaccgcctgaccccagacccctacaggatgagcccccggccctaccgcatcgcccccaggagctacagaattgccccccggccctaccgcctggccccccggcccctgatgctggccagccgccgctccatgatgatgtcctatgctgctgagaggtccatgatgagcagctatgaaagatccatgatgtcctatgaaagatccatgatgagccccatggccgagaggtccatgatgtctgcctatgaaagatccatgatgtctgcctatgaaagatccatgatgagccccatggccgagaggtccatgatgtctgcctatgaaagatccatgatgtctgcctatgaaagatccatgatgagccccatggctgaccgctccatgatgtccatgggcgctgaccgctccatgatgagcagctacagcgctgctgaccgctccatgatgagcagctacagcgctgctgaccgctccatgatgagcagctacacagctgaccgctccatgatgtccatggctgctgacagctacacagacagctacacagacacctacacagaggcctacatggtgccccccctgcccccagaggagccccccaccatgccacccctgcccccagaggagccccccatgaccccacccctgcccccagaggagcccccagagggccctgccctgcccacagagcagagcgccctgacagctgagaacacctggcccacagaggtgcccagcagccccagcgaggagagcgtgtcccagcctgagccccctgtgtcccagagcgagatcagcgagcccagcgctgtgcccacagactacagcgtgtctgccagtgaccccagcgtgctggtgtctgaggccgctgtgacagtgcctgagcccccacctgagcctgagagcagcatcaccctgacccctgtggagagcgctgtggtggccgaggagcacgaggtggtgcctgagaggcctgtgacctgcatggtgtctgagaccccagccatgtctgctgagcccaccgtgctggccagcgagccccctgtgatgtctgaaacagctgagacctttgacagcatgagggccagcggccacgtggccagcgaggtgtccaccagcctgctggtgcctgctgtgaccacccctgtgctggccgagagcatcctggagcccccagccatggccgcccctgagagcagcgccatggctgtgctggagagcagcgctgtgacagtgctggagagcagcacagtgacagtgctggagagcagcacagtgacagtgctggagcccagcgtggtgacagtgcctgagccccctgtggtggccgagccagactatgtgaccatccctgtgcctgtggtgtctgccctggagcccagcgtgcctgtgctggagcctgctgtgtctgtgctgcagcccagcatgattgtgtctgagcccagcgtgtctgtgcaggagagcacagtgacagtgtctgagcctgctgtgacagtgtctgagcagacccaggtgatccccacagaggtggccatcgagagcacccccatgatcctggagagcagcatcatgagcagccacgtgatgaagggcatcaacctgagcagcggggaccagaacctggcccctgagatcggcatgcaggagatcgccctgcacagcggggaggagccccatgctgaggagcacctgaagggggacttctatgagagcgagcacggcatcaacatcgacctgaacatcaacaaccacctgattgccaaggagatggagcacaacacagtgtgtgccgccggcaccagccctgtgggggagattggagaggagaagatcctgcccaccagcgagaccaagcagaggacagtgctggacacctacccaggagtgtctgaggctgatgctggggagaccctgagcagcacaggcccctttgccctggagccagatgccaccggcaccagcaagggcatcgagttcaccacagccagcaccctgagcctggtgaacaagtatgatgtggacctgagcctgaccacccaggacacagaacatgacatggtgatcagcaccagccccagcggcggcagcgaggccgacatcgagggccccctgcctgccaaggacatccacctggacctgcccagcaacaacaacctggtgtccaaggacacagaggagcccctgcctgtgaaggagagtgaccagaccctggccgccctgctgagccccaaggagagcagcggcggggagaaggaggtgcccccaccacccaaggagaccctgcctgattctggcttcagcgccaacatcgaggacatcaatgaagctgacctggtgcggcccctgctgcccaaggacatggagcggctgaccagcctgcgggccggcatcgagggccccctgctggccagtgatgtgggccgggacagatctgctgccagccctgtggtgtcctccatgcctgagcgggccagcgagagcagcagcgaggagaaggatgattatgagatctttgtgaaggtgaaggacacccatgagaagagcaagaagaacaagaacagagacaagggggagaaggagaagaagagggacagcagcctgcggagccgcagcaagaggagcaagagcagcgagcacaagagcaggaagaggaccagcgagagccgcagccgggccaggaagaggagcagcaagagcaagagccacaggagccagaccaggagccgcagccgcagcagaagaagaagaagaagcagccgcagccgcagcaagagccggggcagaagatctgtgtccaaggagaagaggaagaggagccccaagcacaggagcaagagccgggagaggaagaggaagaggagcagcagccgggacaacaggaagacagtgcgggcccggagcaggacccccagcagaagaagccgcagccacacccccagcagaagaagaagaagccgctctgtgggcagaagaagaagcttcagcatcagccccagcagaagaagcaggacccccagccgccgcagcaggacccccagcagaagaagcaggacccccagccgccgcagcaggacccccagcagaagaagcaggacccccagccgccgcagcaggacccccagcagaagaagaagaagccgctctgtggtgagaagaagaagcttcagcatcagccctgtgcggctgcggcgcagcaggacccccctgcggcggcgcttcagccgcagccccatccggaggaagaggagccgcagcagcgagcggggccgcagccccaagaggctgacagacctggacaaggcccagctgctggagatcgccaaggccaatgctgctgccatgtgtgccaaggccggcgtgcccctgccccccaacctgaagccagcccccccacccaccatcgaggagaaggtggccaagaagtctggaggagccaccatcgaggagctgacagagaagtgcaagcagatcgcccagagcaaagaagatgatgatgtgattgtgaacaagccccacgtgtctgatgaggaggaggaggagccccccttctaccaccaccccttcaagctgtctgagcccaagcccatcttcttcaacctgaacattgctgctgccaagcccaccccacccaagagccaggtgaccctgaccaaggagttccctgtgagcagcggcagccagcacaggaagaaggaggccgacagcgtgtatggagagtgggtgcctgtggagaagaatggagaggagaacaaggatgatgacaacgtgttcagcagcaacctgcccagcgagcctgtggacatcagcacagccatgtctgagcgggccctggcccagaagaggctgtctgaaaatgcctttgacctggaggccatgtccatgctgaacagagcccaggagagaattgatgcctgggcccagctgaacagcatccctggccagttcaccggcagcactggagtgcaggtgctgacccaggagcagctggccaacacaggagcccaggcctggatcaagaagggccagatcctggtggccgtgttcctgcccaggtctgtgcctgctgtgctcttcaccaccctgctgctgccccggccccgcatcagcagctag

SEQ ID NO: 171116 - DNA, 6912 bp, synthetic construct
  misc_feature 1..6912: note = Description of Artificial Sequence: Synthetic coding sequence
  source 1..6912: mol_type = other DNA
atggccaccaacatcgagcagatcttccgcagctttgtggtgtccaagttccgggagatccagcaggagctgagcagcggcagaaatgaaggccagctgaatggagagaccaacacccccatcgagggcaaccaggccggagatgctgctgccagcgcccggagcctgcccaatgaggagatcgtgcagaagattgaggaggtgctgagcggcgtgctggacacagagctgcgctacaagccagacctgaaggagggcagcaggaagagccgctgtgtgtctgtgcagacagaccccacagatgagatccccaccaagaagagcaagaagcacaagaagcacaagaacaagaagaagaagaagaagaaggagaaggagaagaagtacaagaggcagcctgaggagagcgagagcaagaccaagagccatgatgatggcaacatcgacctggagagtgacagcttcctgaagtttgacagcgagcccagcgctgtggccctggagctgcccacccgggccttcggccccagcgagaccaatgaatctccagctgtggtgctggagccccctgtggtgtccatggaggtgtctgagccccacatcctggagaccctgaagccagccaccaagacagctgagctgtctgtggtgtccaccagcgtcatcagcgagcagagcgagcagagcgtggccgtgatgcctgagcccagcatgaccaagatcctggacagctttgctgctgcccctgtgcccaccaccaccctggtgctgaagagcagcgagcctgtggtgaccatgtctgtggagtaccagatgaagtctgtgctgaagtctgtggagagcaccagccctgagcccagcaagatcatgctggtggagccccctgtggccaaggtgctggagcccagcgagaccctggtggtgagcagcgagacccccacagaggtgtacccagagcccagcaccagcaccaccatggacttccctgagagcagcgccatcgaggccctgcggctgcctgagcagcctgtggatgtgcccagcgagattgctgacagctccatgacccggccccaggagctgcctgagctgcccaagaccacagccctggagctgcaggagagctctgtggccagcgccatggagctgcccggccccccagccacctccatgcctgagctgcagggcccccctgtgacccctgtgctggagctgcccggccccagcgccacccctgtgcctgagctgcccggccccctgagcacccctgtgcctgagctgcccggccccccagccacagctgtgcctgagctgcccggccccagcgtgacccctgtgccccagctgagccaggagctgcccggcctgcctgcccccagcatgggcctggagcccccccaggaggtgcctgagccccctgtgatggcccaggagctgcccggcctgcccctggtgacagctgctgtggagctgcctgagcagcctgctgtgacagtggccatggagctgacagagcagcctgtgaccaccacagagctggagcagcctgtgggcatgaccaccgtggagcaccctggccaccctgaggtgaccacagccaccggcctgctgggccagcctgaggccaccatggtgctggagctgcccggccagcctgtggccaccacagccctggagctgcccggccagcccagcgtgactggagtgcctgagctgcccggcctgcccagcgccacccgggccctggagctgagcggccagcctgtggccactggagccctggagctgcccggccccctgatggctgctggggccctggagttcagcggccagagcggggctgctggggccctggagctgctgggccagcccctggccactggagtgctggagctgcccggccagcccggggcccctgagctgcccggccagcctgtggccaccgtggccctggagatctctgtgcagagcgtggtgaccaccagcgagctgagcaccatgacagtgtcccagagcctggaggtgcccagcaccacagccctggagagctacaacacagtggcccaggagctgcccaccaccctggtgggggagacctctgtgacagtgggcgtggaccccctgatggcccctgagagccacatcctggccagcaacaccatggagacccacatcctggccagcaacaccatggacagccagatgctggccagcaacaccatggacagccagatgctggccagcaacaccatggacagccagatgctggccagcagcaccatggacagccagatgctggccaccagctccatggacagccagatgctggccaccagctccatggacagccagatgctggccaccagcaccatggacagccagatgctggccaccagctccatggacagccagatgctggccaccagctccatggacagccagatgctggccaccagctccatggacagccagatgctggccaccagctccatggacagccagatgctggccaccagcaccatggacagccagatgctggccaccagcaccatggacagccagatgctggccaccagctccatggacagccagatgctggccagcggcaccatggacagccagatgctggccagcggcaccatggatgcccagatgctggccagcggcaccatggatgcccagatgctggccagcagcacccaggacagcgccatgctgggcagcaagagcccagacccctaccgcctggcccaggacccctaccgcctggcccaggacccctaccgcctgggccatgacccctaccgcctgggccatgatgcctaccgcctgggccaggacccctaccgcctgggccatgacccctaccgcctgaccccagacccctacaggatgagcccccggccctaccgcatcgcccccaggagctacagaattgccccccggccctaccgcctggccccccggcccctgatgctggccagccgccgctccatgatgatgtcctatgctgctgagaggtccatgatgagcagctatgaaagatccatgatgtcctatgaaagatccatgatgagccccatggccgagaggtccatgatgtctgcctatgaaagatccatgatgtctgcctatgaaagatccatgatgagccccatggccgagaggtccatgatgtctgcctatgaaagatccatgatgtctgcctatgaaagatccatgatgagccccatggctgaccgctccatgatgtccatgggcgctgaccgctccatgatgagcagctacagcgctgctgaccgctccatgatgagcagctacagcgctgctgaccgctccatgatgagcagctacacagctgaccgctccatgatgtccatggctgctgacagctacacagacagctacacagacacctacacagaggcctacatggtgccccccctgcccccagaggagccccccaccatgccacccctgcccccagaggagccccccatgaccccacccctgcccccagaggagcccccagagggccctgccctgcccacagagcagagcgccctgacagctgagaacacctggcccacagaggtgcccagcagccccagcgaggagagcgtgtcccagcctgagccccctgtgtcccagagcgagatcagcgagcccagcgctgtgcccacagactacagcgtgtctgccagtgaccccagcgtgctggtgtctgaggccgctgtgacagtgcctgagcccccacctgagcctgagagcagcatcaccctgacccctgtggagagcgctgtggtggccgaggagcacgaggtggtgcctgagaggcctgtgacctgcatggtgtctgagaccccagccatgtctgctgagcccaccgtgctggccagcgagccccctgtgatgtctgaaacagctgagacctttgacagcatgagggccagcggccacgtggccagcgaggtgtccaccagcctgctggtgcctgctgtgaccacccctgtgctggccgagagcatcctggagcccccagccatggccgcccctgagagcagcgccatggctgtgctggagagcagcgctgtgacagtgctggagagcagcacagtgacagtgctggagagcagcacagtgacagtgctggagcccagcgtggtgacagtgcctgagccccctgtggtggccgagccagactatgtgaccatccctgtgcctgtggtgtctgccctggagcccagcgtgcctgtgctggagcctgctgtgtctgtgctgcagcccagcatgattgtgtctgagcccagcgtgtctgtgcaggagagcacagtgacagtgtctgagcctgctgtgacagtgtctgagcagacccaggtgatccccacagaggtggccatcgagagcacccccatgatcctggagagcagcatcatgagcagccacgtgatgaagggcatcaacctgagcagcggggaccagaacctggcccctgagatcggcatgcaggagatcgccctgcacagcggggaggagccccatgctgaggagcacctgaagggggacttctatgagagcgagcacggcatcaacatcgacctgaacatcaacaaccacctgattgccaaggagatggagcacaacacagtgtgtgccgccggcaccagccctgtgggggagattggagaggagaagatcctgcccaccagcgagaccaagcagaggacagtgctggacacctacccaggagtgtctgaggctgatgctggggagaccctgagcagcacaggcccctttgccctggagccagatgccaccggcaccagcaagggcatcgagttcaccacagccagcaccctgagcctggtgaacaagtatgatgtggacctgagcctgaccacccaggacacagaacatgacatggtgatcagcaccagccccagcggcggcagcgaggccgacatcgagggccccctgcctgccaaggacatccacctggacctgcccagcaacaacaacctggtgtccaaggacacagaggagcccctgcctgtgaaggagagtgaccagaccctggccgccctgctgagccccaaggagagcagcggcggggagaaggaggtgcccccaccacccaaggagaccctgcctgattctggcttcagcgccaacatcgaggacatcaatgaagctgacctggtgcggcccctgctgcccaaggacatggagcggctgaccagcctgcgggccggcatcgagggccccctgctggccagtgatgtgggccgggacagatctgctgccagccctgtggtgtcctccatgcctgagcgggccagcgagagcagcagcgaggagaaggatgattatgagatctttgtgaaggtgaaggacacccatgagaagagcaagaagaacaagaacagagacaagggggagaaggagaagaagagggacagcagcctgcggagccgcagcaagaggagcaagagcagcgagcacaagagcaggaagaggaccagcgagagccgcagccgggccaggaagaggagcagcaagagcaagagccacaggagccagaccaggagccgcagccgcagcagaagaagaagaagaagcagccgcagccgcagcaagagccggggcagaagatctgtgtccaaggagaagaggaagaggagccccaagcacaggagcaagagccgggagaggaagaggaagaggagcagcagccgggacaacaggaagacagtgcgggcccggagcaggacccccagcagaagaagccgcagccacacccccagcagaagaagaagaagccgctctgtgggcagaagaagaagcttcagcatcagccccagcagaagaagcaggacccccagccgccgcagcaggacccccagcagaagaagcaggacccccagccgccgcagcaggacccccagcagaagaagcaggacccccagccgccgcagcaggacccccagcagaagaagaagaagccgctctgtggtgagaagaagaagcttcagcatcagccctgtgcggctgcggcgcagcaggacccccctgcggcggcgcttcagccgcagccccatccggaggaagaggagccgcagcagcgagcggggccgcagccccaagaggctgacagacctggacaaggcccagctgctggagatcgccaaggccaatgctgctgccatgtgtgccaaggccggcgtgcccctgccccccaacctgaagccagcccccccacccaccatcgaggagaaggtggccaagaagtctggaggagccaccatcgaggagctgacagagaagtgcaagcagatcgcccagagcaaagaagatgatgatgtgattgtgaacaagccccacgtgtctgatgaggaggaggaggagccccccttctaccaccaccccttcaagctgtctgagcccaagcccatcttcttcaacctgaacattgctgctgccaagcccaccccacccaagagccaggtgaccctgaccaaggagttccctgtgagcagcggcagccagcacaggaagaaggaggccgacagcgtgtatggagagtgggtgcctgtggagaagaatggagaggagaacaaggatgatgacaacgtgttcagcagcaacctgcccagcgagggccgggtgaagaggcagggccgggtgcggcggcagatgaagcagcctgctgccagccacctgactgtgacccgctgcaacagcctgtgtggcaccaagccccagagcgagaagcacagaattgctgagaacagcgtcatcaccagcctgcccaacatcggccccagcctgcacctgtgggagggcagcccccgctacaactacctggccagcagatttgccagccggctgtacagcagccgcttctggtggtag

SEQ ID NO: 171117 - DNA, 7281 bp, synthetic construct
  misc_feature 1..7281: note = Description of Artificial Sequence: Synthetic coding sequence
  source 1..7281: mol_type = other DNA
atggccaccaacatcgagcagatcttccgcagctttgtggtgtccaagttccgggagatccagcaggagctgagcagcggcagaaatgaaggccagctgaatggagagaccaacacccccatcgagggcaaccaggccggagatgctgctgccagcgcccggagcctgcccaatgaggagatcgtgcagaagattgaggaggtgctgagcggcgtgctggacacagagctgcgctacaagccagacctgaaggagggcagcaggaagagccgctgtgtgtctgtgcagacagaccccacagatgagatccccaccaagaagagcaagaagcacaagaagcacaagaacaagaagaagaagaagaagaaggagaaggagaagaagtacaagaggcagcctgaggagagcgagagcaagaccaagagccatgatgatggcaacatcgacctggagagtgacagcttcctgaagtttgacagcgagcccagcgctgtggccctggagctgcccacccgggccttcggccccagcgagaccaatgaatctccagctgtggtgctggagccccctgtggtgtccatggaggtgtctgagccccacatcctggagaccctgaagccagccaccaagacagctgagctgtctgtggtgtccaccagcgtcatcagcgagcagagcgagcagagcgtggccgtgatgcctgagcccagcatgaccaagatcctggacagctttgctgctgcccctgtgcccaccaccaccctggtgctgaagagcagcgagcctgtggtgaccatgtctgtggagtaccagatgaagtctgtgctgaagtctgtggagagcaccagccctgagcccagcaagatcatgctggtggagccccctgtggccaaggtgctggagcccagcgagaccctggtggtgagcagcgagacccccacagaggtgtacccagagcccagcaccagcaccaccatggacttccctgagagcagcgccatcgaggccctgcggctgcctgagcagcctgtggatgtgcccagcgagattgctgacagctccatgacccggccccaggagctgcctgagctgcccaagaccacagccctggagctgcaggagagctctgtggccagcgccatggagctgcccggccccccagccacctccatgcctgagctgcagggcccccctgtgacccctgtgctggagctgcccggccccagcgccacccctgtgcctgagctgcccggccccctgagcacccctgtgcctgagctgcccggccccccagccacagctgtgcctgagctgcccggccccagcgtgacccctgtgccccagctgagccaggagctgcccggcctgcctgcccccagcatgggcctggagcccccccaggaggtgcctgagccccctgtgatggcccaggagctgcccggcctgcccctggtgacagctgctgtggagctgcctgagcagcctgctgtgacagtggccatggagctgacagagcagcctgtgaccaccacagagctggagcagcctgtgggcatgaccaccgtggagcaccctggccaccctgaggtgaccacagccaccggcctgctgggccagcctgaggccaccatggtgctggagctgcccggccagcctgtggccaccacagccctggagctgcccggccagcccagcgtgactggagtgcctgagctgcccggcctgcccagcgccacccgggccctggagctgagcggccagcctgtggccactggagccctggagctgcccggccccctgatggctgctggggccctggagttcagcggccagagcggggctgctggggccctggagctgctgggccagcccctggccactggagtgctggagctgcccggccagcccggggcccctgagctgcccggccagcctgtggccaccgtggccctggagatctctgtgcagagcgtggtgaccaccagcgagctgagcaccatgacagtgtcccagagcctggaggtgcccagcaccacagccctggagagctacaacacagtggcccaggagctgcccaccaccctggtgggggagacctctgtgacagtgggcgtggaccccctgatggcccctgagagccacatcctggccagcaacaccatggagacccacatcctggccagcaacaccatggacagccagatgctggccagcaacaccatggacagccagatgctggccagcaacaccatggacagccagatgctggccagcagcaccatggacagccagatgctggccaccagctccatggacagccagatgctggccaccagctccatggacagccagatgctggccaccagcaccatggacagccagatgctggccaccagctccatggacagccagatgctggccaccagctccatggacagccagatgctggccaccagctccatggacagccagatgctggccaccagctccatggacagccagatgctggccaccagcaccatggacagccagatgctggccaccagcaccatggacagccagatgctggccaccagctccatggacagccagatgctggccagcggcaccatggacagccagatgctggccagcggcaccatggatgcccagatgctggccagcggcaccatggatgcccagatgctggccagcagcacccaggacagcgccatgctgggcagcaagagcccagacccctaccgcctggcccaggacccctaccgcctggcccaggacccctaccgcctgggccatgacccctaccgcctgggccatgatgcctaccgcctgggccaggacccctaccgcctgggccatgacccctaccgcctgaccccagacccctacaggatgagcccccggccctaccgcatcgcccccaggagctacagaattgccccccggccctaccgcctggccccccggcccctgatgctggccagccgccgctccatgatgatgtcctatgctgctgagaggtccatgatgagcagctatgaaagatccatgatgtcctatgaaagatccatgatgagccccatggccgagaggtccatgatgtctgcctatgaaagatccatgatgtctgcctatgaaagatccatgatgagccccatggccgagaggtccatgatgtctgcctatgaaagatccatgatgtctgcctatgaaagatccatgatgagccccatggctgaccgctccatgatgtccatgggcgctgaccgctccatgatgagcagctacagcgctgctgaccgctccatgatgagcagctacagcgctgctgaccgctccatgatgagcagctacacagctgaccgctccatgatgtccatggctgctgacagctacacagacagctacacagacacctacacagaggcctacatggtgccccccctgcccccagaggagccccccaccatgccacccctgcccccagaggagccccccatgaccccacccctgcccccagaggagcccccagagggccctgccctgcccacagagcagagcgccctgacagctgagaacacctggcccacagaggtgcccagcagccccagcgaggagagcgtgtcccagcctgagccccctgtgtcccagagcgagatcagcgagcccagcgctgtgcccacagactacagcgtgtctgccagtgaccccagcgtgctggtgtctgaggccgctgtgacagtgcctgagcccccacctgagcctgagagcagcatcaccctgacccctgtggagagcgctgtggtggccgaggagcacgaggtggtgcctgagaggcctgtgacctgcatggtgtctgagaccccagccatgtctgctgagcccaccgtgctggccagcgagccccctgtgatgtctgaaacagctgagacctttgacagcatgagggccagcggccacgtggccagcgaggtgtccaccagcctgctggtgcctgctgtgaccacccctgtgctggccgagagcatcctggagcccccagccatggccgcccctgagagcagcgccatggctgtgctggagagcagcgctgtgacagtgctggagagcagcacagtgacagtgctggagagcagcacagtgacagtgctggagcccagcgtggtgacagtgcctgagccccctgtggtggccgagccagactatgtgaccatccctgtgcctgtggtgtctgccctggagcccagcgtgcctgtgctggagcctgctgtgtctgtgctgcagcccagcatgattgtgtctgagcccagcgtgtctgtgcaggagagcacagtgacagtgtctgagcctgctgtgacagtgtctgagcagacccaggtgatccccacagaggtggccatcgagagcacccccatgatcctggagagcagcatcatgagcagccacgtgatgaagggcatcaacctgagcagcggggaccagaacctggcccctgagatcggcatgcaggagatcgccctgcacagcggggaggagccccatgctgaggagcacctgaagggggacttctatgagagcgagcacggcatcaacatcgacctgaacatcaacaaccacctgattgccaaggagatggagcacaacacagtgtgtgccgccggcaccagccctgtgggggagattggagaggagaagatcctgcccaccagcgagaccaagcagaggacagtgctggacacctacccaggagtgtctgaggctgatgctggggagaccctgagcagcacaggcccctttgccctggagccagatgccaccggcaccagcaagggcatcgagttcaccacagccagcaccctgagcctggtgaacaagtatgatgtggacctgagcctgaccacccaggacacagaacatgacatggtgatcagcaccagccccagcggcggcagcgaggccgacatcgagggccccctgcctgccaaggacatccacctggacctgcccagcaacaacaacctggtgtccaaggacacagaggagcccctgcctgtgaaggagagtgaccagaccctggccgccctgctgagccccaaggagagcagcggcggggagaaggaggtgcccccaccacccaaggagaccctgcctgattctggcttcagcgccaacatcgaggacatcaatgaagctgacctggtgcggcccctgctgcccaaggacatggagcggctgaccagcctgcgggccggcatcgagggccccctgctggccagtgatgtgggccgggacagatctgctgccagccctgtggtgtcctccatgcctgagcgggccagcgagagcagcagcgaggagaaggatgattatgagatctttgtgaaggtgaaggacacccatgagaagagcaagaagaacaagaacagagacaagggggagaaggagaagaagagggacagcagcctgcggagccgcagcaagaggagcaagagcagcgagcacaagagcaggaagaggaccagcgagagccgcagccgggccaggaagaggagcagcaagagcaagagccacaggagccagaccaggagccgcagccgcagcagaagaagaagaagaagcagccgcagccgcagcaagagccggggcagaagatctgtgtccaaggagaagaggaagaggagccccaagcacaggagcaagagccgggagaggaagaggaagaggagcagcagccgggacaacaggaagacagtgcgggcccggagcaggacccccagcagaagaagccgcagccacacccccagcagaagaagaagaagccgctctgtgggcagaagaagaagcttcagcatcagccccagcagaagaagcaggacccccagccgccgcagcaggacccccagcagaagaagcaggacccccagccgccgcagcaggacccccagcagaagaagcaggacccccagccgccgcagcaggacccccagcagaagaagaagaagccgctctgtggtgagaagaagaagcttcagcatcagccctgtgcggctgcggcgcagcaggacccccctgcggcggcgcttcagccgcagccccatccggaggaagaggagccgcagcagcgagcggggccgcagccccaagaggctgacagacctggacaaggcccagctgctggagatcgccaaggccaatgctgctgccatgtgtgccaaggccggcgtgcccctgccccccaacctgaagccagcccccccacccaccatcgaggagaaggtggccaagaagtctggaggagccaccatcgaggagctgacagagaagtgcaagcagatcgcccagagcaaagaagatgatgatgtgattgtgaacaagccccacgtgtctgatgaggaggaggaggagccccccttctaccaccaccccttcaagctgtctgagcccaagcccatcttcttcaacctgaacattgctgctgccaagcccaccccacccaagagccaggtgaccctgaccaaggagttccctgtgagcagcggcagccagcacaggaagaaggaggccgacagcgtgtatggagagtgggtgcctgtggagaagaatggagaggagaacaaggatgatgacaacgtgttcagcagcaacctgcccagcgagcctgtggacatcagcacagccatgtctgagcgggccctggcccagaagaggctgtctgaaaatgcctttgacctggaggccatgtccatgctgaacagagcccaggagagaattgatgcctgggcccagctgaacagcatccctggccagttcaccggcagcactggagtgcaggtgctgacccaggagcagctggccaacacaggagcccaggcctggatcaagaaggaccagttcctgcgggccgcccctgtgactggaggcatgggcgctgtgctgatgaggaagatgggctggagggagggggagggcctgggcaagaacaaggagggcaacaaggagcccatcctggtggacttcaagacagacaggaagggcctggtggccgtgggggagcgggcccagaagaggagcggcaacttctctgctgccatgaaggacctgagcggcaagcaccctgtgtctgccctgatggagatctgcaacaagaggcgctggcagcccccagagttcctgctggtgcatgacagcggccctgaccacaggaagcacttcctgttccgggtgctgagaaatggagccctgacccggcccaactgcatgttcttcctgaaccgctactag

SEQ ID NO: 171118 - DNA, 1584 bp, synthetic construct
  misc_feature 1..1584: note = Description of Artificial Sequence: Synthetic coding sequence
  source 1..1584: mol_type = other DNA
atggcccctgagcggctgcggagccgggccctgagcgccttcaagctgcggggcctgctgctgcggggggaggccatcaagtacctgacagaggccctgcagagcatcagcgagctggagctggaggacaagctggagaagatcatcaatgctgtggagaagcagcccctgagcagcaacatgattgaaagatctgtggtggaggccgctgtgcaggagtgcagccagagcgtggatgagaccatcgagcacgtgttcaacatcattggagcctttgacatccccaggtttgtgtacaacagcgagaggaagaagttcctgcccctgctgatgaccaaccacccagcccccaacctgtttggcaccccccgggacaaggccgagatgttccgggagcgctacaccatcctgcaccagaggacccacagacatgagctgttcaccccacctgtgattggcagccacccagatgaaagtggcagcaagttccagctgaagaccatcgagaccctgctgggcagcaccaccaagattggagatgccatcgtgctgggcatgatcacccagctgaaggagggcaagttcttcctggaggaccccactggaacagtgcagctggacctgagcaaggcccagttccacagcggcctgtacacagaggcctgctttgtgctggccgagggctggtttgaggaccaggtgttccacgtgaatgccttcggcttccccccaacagagcccagcagcaccacccgggcctactacggcaacatcaacttctttggaggccccagcaacacctctgtgaagaccagcgccaagctgaagcagctggaggaggagaacaaggatgccatgtttgtgttcctgagtgatgtgtggctggaccaggtggaggtgctggagaagctgcgcatcatgtttgctggctacagccctgccccacccacctgcttcatcctgtgtggcaacttcagcagcgccccctacggcaagaaccaggtgcaggccctgaaggacagcctgaagaccctggccgacatcatctgtgagtacccagacatccaccagagcagcagatttgtgtttgtgcccggccctgaggaccccggcttcggcagcatcctgcccaggcctcccctggccgagagcatcaccaatgagttccggcagagggtgcccttcagcgtcttcaccaccaacccctgccgcatccagtactgcacccaggagatcaccgtcttccgggaggacctggtgaacaagatgtgcaggaactgtgtgcgcttccccagcagcaacctggccatccccaaccactttgtgaagaccatcctgagccagggccacctgacccccctgcccctgtatgtgtgccctgtgtactgggcctatgactatgccctgcgggtgtaccctgtgcctgacctgctggtgattgctgacaagtatgaccccttcaccaccaccaacacagaatgtctgtgcatcaaccctggcagcttccccaggagcggcttctccttcaaggtgttctaccccagcaacaagacagtggaggacagcaagctgcagggcttctag

SEQ ID NO: 171119 - DNA, 3900 bp, synthetic construct
  misc_feature 1..3900: note = Description of Artificial Sequence: Synthetic coding sequence
  source 1..3900: mol_type = other DNA
atgcagcaggccccccagccctatgagttcttcagcgaggagaacagccccaagtggaggggcctgctggtgtctgccctgaggaaggtgcaggagcaggtgcaccccaccctgagcgccaatgaggagagcctgtactacatcgaggagctgatcttccagctgctgaacaagctgtgcatggcccagcccaggacagtgcaggatgtggaggagcgggtgcagaagaccttcccccaccccatcgacaagtgggccatcgcagatgcccagagcgccatcgagaagaggaagagaagaaaccccctgctgctgcctgtggacaagatccaccccagcctgaaggaggtgctgggctacaaggtggactaccacgtgtccctgtacatcgtggccgtgctggagtacatctctgctgacatcctgaagctggccggcaactacgtgttcaacatccgccactatgagatcagccagcaggacatcaaggtgtccatgtgtgccgacaaggtgctgatggacatgtttgaccaggatgacatcggcctggtgtccctgtgtgaagatgagcccagcagcagcggggagctgaactactatgacctggtgaggacagaaattgctgaggagcggcagtacctgcgggagctgaacatgatcatcaaggtgttccgggaggccttcctgagtgacaggaagctgttcaagcccagcgacatcgagaagatcttcagcaacatcagtgacatccacgagctgactgtgaagctgctgggcctgattgaggacacagtggagatgacagatgagagcagcccccaccccctggccggcagctgctttgaggacctggccgaggagcaggcctttgacccctatgagaccctgagccaggacatcctgagccctgagttccacgagcacttcaacaagctgatggcccggcctgctgtggccctgcacttccagcagctgaaggcctgcagcgaggagcaggaggaccgggagtgcctgaaccaggccatcacagccctgatgaacctgcagggctccatggaccgcatctacaagcagtacagccccaggagaagacctggggaccctgtgtgccccttctacagccaccagctgcggagcaagcacctggccatcaagaagatgaatgagatccagaagaacattgatggctgggagggcaaggacatcggccagtgctgcaatgagttcatcatggagggccccctgacccgcatcggggccaagcatgagcggcacatcttcctgtttgatggcctgatgatcagctgcaagcccaaccacggccagacccggctgcccggctacagcagcgctgagtaccgcctgaaggagaagtttgtgatgaggaagatccagatctgtgacaaggaggacacctgtgagcacaagcacgcctttgagctggtgtccaaggatgagaacagcatcatctttgctgccaagtctgctgaggagaagaacaactggatggccgccctgatcagcctgcactaccgcagcaccctggacaggatgctggacagcgtgctgctgaaggaggagaatgagcagcccctgcggctgcccagccctgaggtgtacagatttgtggtgaaggacagtgaagaaaatattgtgtttgaggacaacctgcagagccgcagcggcatccccatcatcaagggcggcaccgtggtgaagctgattgagcggctgacctaccacatgtatgctgaccccaactttgtgaggaccttcctgaccacctaccgctccttctgcaagccccaggagctgctgagcctgctgattgaaagatttgagatccctgagcctgagcccacagatgctgacaagctggccatcgagaagggggagcagcccatctctgctgacctgaagcgcttcaggaaggagtatgtgcagcctgtgcagctgcgcatcctgaatgtgttccgccactgggtggagcaccacttctatgactttgagcgggacctggagctgctggagcggctggagagcttcatcagctctgtgcggggcaaggccatgaagaagtgggtggagagcatcgccaagatcatccggaggaagaagcaggcccaggccaatggagtgagccacaacatcacctttgagagccccccaccacccatcgagtggcacatcagcaagccaggccagtttgagacctttgacctgatgaccctgcaccccattgaaattgcccggcagctgaccctgctggagagtgacctgtacaggaaggtgcagcccagcgagctggtgggctctgtgtggaccaaggaggacaaggagatcaacagccccaacctgctgaagatgatccgccacaccaccaacctgaccctgtggtttgagaagtgcatcgtggaggccgagaactttgaggagcgggtggccgtgctgagccgcatcatcgagatcctgcaggtgttccaggacctgaacaacttcaacggggtgctggagatcgtgtctgctgtgaacagcgtgtctgtgtaccgcctggaccacacctttgaggccctgcaggagaggaagaggaagatcctggatgaagctgtggagctgagccaggaccacttcaagaagtacctggtgaagctgaagagcatcaaccccccctgtgtgcccttcttcggcatctacctgaccaacatcctgaagacagaggagggcaacaatgacttcctgaagaagaagggcaaggacctgatcaacttcagcaagaggaggaaggtggccgagatcactggagagatccagcagtaccagaaccagccctactgcctgcgcatcgagccagacatgaggcgcttctttgagaacctgaaccccatgggcagcgccagcgagaaggagttcacagactacctgttcaacaagagcctggagattgagcccaggaactgcaagcagcccccacgcttccccaggaagagcaccttcagcctgaagagccctggcatccggcccaacacaggccgccacggcagcaccagcggcaccctgcggggccaccccacccccctggagcgggagccctgcaagatctccttcagcagaattgctgagacagagctggagagcacagtgtctgcccccaccagccccaacacccccagcaccccacctgtgtctgccagcagtgacctgagcgtcttcctggatgtggacctgaacagcagctgtggcagcaacagcatctttgcccctgtgctgctgccccacagcaagagcttcttcagcagctgtggcagcctgcacaagctgtctgaggagcccctcatccccccacccctgccccccaggaagaagtttgaccatgatgccagcaacagcaagggcaacatgaagagtgatgatgatcctccagccatccccccccggcagcccccaccacccaaggtgaagccccgggtgcctgtgcccaccggggcctttgatggccccctgcacagccccccacctcctccaccccgggaccccctgcctgacaccccacctcctgtgcccctgcggcccccagagcacttcatcaactgccccttcaacctgcagcccccacccctgggccacctgcaccgggacagcgactggctgcgggacatcagcacctgccccaacagccccagcaccccacccagcacccccagcccccgggtgccccggcgctgctacgtgctgagcagcagccagaacaacctggcccaccccccagcccctcctgtgcccccccggcagaacagcagcccccacctgcccaagctgccccccaagacctacaagcgggagctgagccacccccccctgtaccgcctgcccctgctggagaatgctgagaccccccagtag

SEQ ID NO: 171120 - DNA, 1389 bp, synthetic construct
  misc_feature 1..1389: note = Description of Artificial Sequence: Synthetic coding sequence
  source 1..1389: mol_type = other DNA
atgctgctgctggcccgctgcctgctgctggtgctggtgagcagcctgctggtgtgcagcggcctggcctgtggccctggccggggctttgggaagagaagacaccccaagaagctgacccccctggcctacaagcagttcatccccaacgtggccgagaagaccctgggcgccagcggccgctatgagggcaagatcagcaggaacagcgagcgcttcaaggagctgacccccaactacaacccagacatcatcttcaaggatgaggagaacacaggagctgaccggctgatgacccagcgctgcaaggacaagctgaatgccctggccatctctgtgatgaaccagtggccaggagtgaagctgcgggtgacagagggctgggatgaagatggccaccacagcgaggagagcctgcactatgagggccgggctgtggacatcaccaccagtgaccgggacaggagcaaatatggcatgctggcccggctggccgtggaggccggctttgactgggtgtactatgagagcaaggcccacatccactgcagcgtgaaggccgagaacagcgtggccgccaagagcggcggctgcttccctggcagcgccaccgtgcacctggagcagggcggcaccaagctggtgaaggacctgagccctggggacagagtgctggccgcagatgaccagggccgcctgctgtacagcgacttcctgaccttcctggacagagatgatggagccaagaaggtgttctacgtgattgagacccgggagccccgggagcggctgctgctgacagctgcccacctgctgtttgtggccccccacaatgacagcgccaccggggagcctgaggccagcagcggcagcggccccccatctggaggagccctgggcccccgggccctgtttgccagccgggtgcggcccggccagagggtgtatgtggtggccgagagagatggagaccggcggctgctgcctgctgctgtgcacagcgtgaccctgtctgaggaggccgccggggcctatgcccccctgacagcccagggcaccatcctgatcaacagagtgctggccagctgctatgctgtgattgaggagcacagctgggcccaccgggcctttgcccccttccggctggcccacgccctgctggccgccctggccccagccaggacagaccggggcggggacagcggcggcggggacagaggaggcggcggcggccgggtggccctgacagcccctggagctgctgatgcccctggggccggggccacagctggcatccactggtacagccagctgctgtaccagatcggcacctggctgctggacagcgaggccctgcaccccctgggcatggctgtgaagagcagctag

SEQ ID NO: 171121 - DNA, 3456 bp, synthetic construct
  misc_feature 1..3456: note = Description of Artificial Sequence: Synthetic coding sequence
  source 1..3456: mol_type = other DNA
atgagcagtgaatgtgatggcggcagcaaggctgtgatgaatggcctggcccctggcagcaatggccaggacaaggccacagctgaccccctgcgggcccggagcatctctgctgtgaagatcatccctgtgaagacagtgaagaatgccagcggcctggtgctgcccacagacatggacctgaccaagatctgcacaggaaaaggagctgtgaccctgcgggccagcagcagctaccgggagacccccagcagcagccctgccagcccccaggagacccggcagcacgagagcaagccaggcctggagcctgagcccagcagcgcagatgagtggaggctgagcagcagcgcagatgccaatggaaatgcccagcccagcagcctggccgccaagggctacagatctgtgcaccccaacctgcccagcgacaagagccaggatgccaccagcagcagcgctgcccagcctgaggtgattgtggtgcccctgtacctggtgaacacagaccggggccaggagggcacagcccggccccccacccccctgggccccctgggctgtgtgcccaccatcccagccacagccagcgctgccagccccctgaccttccccaccctggatgacttcatccccccccacctgcagcgctggccccaccacagccagcctgcccgggccagcggcagctttgcccccatcagccagaccccacccagcttcagccccccaccacccctggtgcccccagcccctgaggacctgcggcgggtgtctgagccagacctgaccggggctgtgagcagcacagacagcagccccctgctgaatgaggtgagcagcagcctcatcggcacagacagccaggccttccccagcgtgtccaagcccagcagcgcctaccccagcaccaccatcgtgaaccccaccatcgtgctgctgcagcacaaccgggagcagcagaagaggctgagcagcctgagtgaccctgtgtctgagcggcgggtgggggagcaggacagcgcccccacccaggagaagcccaccagccctgggaaggccatcgagaagagggccaaggatgacagccggcgggtggtgaagagcacccaggacctgagtgatgtgtccatggatgaggtgggcatccccctgaggaacacagagaggagcaaggactggtacaagaccatgttcaagcagatccacaagctgaacagagacaccccagaggagaacccctacttccccacctacaagtttcctgagctgcctgagatccagcagaccagcgaggagaccaagagctgcagcgtgatgagcccccggctggagtgcagcggcaccgtgattgcccactgcagcctgaagctgctggacagcagcaacccccccaccagcgccagccaggtggccggcacagcagatgatgacagcgacctgtacagcccccgctacagcttcagcgaggacaccaagagccccctgtctgtgcccaggagcaagtctgagatgagctacattgatggagagaaggtggtgaagaggtctgccaccctgcccctgcctgcccggagcagcagcctgaagagcagcagcgagagaaatgactgggagcccccagacaagaaggtggacaccaggaagtacagagctgagcccaagagcatctatgagtaccagcccgggaagagctctgtgctgaccaatgagaagatgagccgggacatcagccctgaggagattgacctgaagaatgagccctggtacaagttcttcagcgagctggagtttgggaagcccccacccaagaagatctgggactacacccctggggactgcagcatcctgccccgggaggacaggaagaccaacctggacaaggacctgagcctgtgccagacagagctggaggccgacctggagaagatggagaccctgaacaaggcccccagcgccaacgtgccccagagcagcgccatcagccccaccccagagatcagcagcgagaccccaggctacatctacagcagcaacttccacgctgtgaagcgggagagtgatggagcccctggggacctgaccagcctggagaatgaaaggcagatctacaagtctgtgctggagggcggggacatccccctgcagggcctgagcggcctgaagaggcccagcagcagcgccagcaccaaggacagcgagagccccaggcacttcatcccagctgactacctggagagcacagaggagttcatcagaagaagacatgatgacaaggagaagctgctggccgaccagaggcggctgaagcgggagcaggaggaggccgacattgctgcccggcggcacactggagtcatccccacccaccaccagttcatcaccaatgaaagatttggagacctgctgaacattgatgacacagccaagaggaagagcggcagcgagatgaggcctgcccgggccaagtttgacttcaaggcccagaccctgaaggagctgcccctgcagaagggggacatcgtgtacatctacaagcagattgaccagaactggtatgaaggagagcaccacggccgggtgggcatcttccccaggacctacatcgagctgctgcccccagctgagaaggcccagcccaagaagctgacccctgtgcaggtgctggagtatggagaggccatcgccaagttcaacttcaatggagacacccaggtggagatgtccttcaggaagggggagcgcatcaccctgctgcggcaggtggatgagaactggtatgagggccgcatccctggcaccagccggcagggcatcttccccatcacctacgtggatgtgatcaagaggcccctggtgaagaaccctgtggactacatggacctgcccttcagcagcagccccagccgcagcgccacagccagcccccagccctggagggaggagagcggccagtatgaaaggaaggccgagcggggggccggggagcggggccctgggggccccaagatcagcaagaagagctgcctgaagcccagtgatgtggtgcgctgcctgagcacagagcagaggctgagtgacctgaacaccccagaggagagcaggcctgggaagcccctgggcagcgccttccctggcagcgaggccgagcagacagagcggcacagaggaggagagcaggccggcaggaaggccgccaggagaggaggcagccagcagccccaggcccagcagaggagagtgaccccagacaggagccagaccagccaggacctcttctcctaccaggccctgtacagctacatcccccagaatgatgatgagctggagctgagagatggagacatcgtggatgtgatggagaagtgtgatgatggctggtttgtgggcaccagcaggaggaccaagcagtttggcaccttccctggcaactacgtgaagcccctgtacctgtag

SEQ ID NO: 171122 - DNA, 2346 bp, synthetic construct
  misc_feature 1..2346: note = Description of Artificial Sequence: Synthetic coding sequence
  source 1..2346: mol_type = other DNA
atgagcagtgaatgtgatggcggcagcaaggctgtgatgaatggcctggcccctggcagcaatggccaggacaaggccacagctgaccccctgcgggcccggagcatctctgctgtgaagatcatccctgtgaagacagtgaagaatgccagcggcctggtgctgcccacagacatggacctgaccaagatctgcacaggaaaaggagctgtgaccctgcgggccagcagcagctaccgggagacccccagcagcagccctgccagcccccaggagacccggcagcacgagagcaagccaggcctggagcctgagcccagcagcgcagatgagtggaggctgagcagcagcgcagatgccaatggaaatgcccagcccagcagcctggccgccaagggctacagatctgtgcaccccaacctgcccagcgacaagagccaggacagcagccccctgctgaatgaggtgagcagcagcctgattggaacagacagccaggccttccccagcgtgtccaagcccagcagcgcctaccccagcaccaccatcgtgaaccccaccatcgtgctgctgcagcacaaccgggagcagcagaagaggctgagcagcctgagtgaccctgtgtctgaaagaagagtgggggagcaggacagcgcccccacccaggagaagcccaccagccctgggaaggccatcgagaagagggccaaggatgacagcagaagagtggtgaagagcacccaggacctgagtgatgtgtccatggatgaggtgggcatccccctgaggaacacagagaggagcaaggactggtacaagaccatgttcaagcagatccacaagctgaacagagatgatgacagcgacctgtacagcccccgctacagcttcagcgaggacaccaagagccccctgtctgtgcccaggagcaagtctgagatgagctacattgatggagagaaggtggtgaagaggtctgccaccctgcccctgcctgcccggagcagcagcctgaagagcagcagcgagagaaatgactgggagcccccagacaagaaggtggacaccaggaagtacagagctgagcccaagagcatctatgagtaccagcccgggaagagctctgtgctgaccaatgagaagatgagcagcgccatcagccccaccccagagatcagcagcgagaccccaggctacatctacagcagcaacttccacgctgtgaagcgggagagtgatggagcccctggggacctgaccagcctggagaatgaaaggcagatctacaagtctgtgctggagggcggggacatccccctgcagggcctgagcggcctgaagaggcccagcagcagcgccagcaccaaggacagcgagagccccaggcacttcatcccagctgactacctggagagcacagaggagttcatcagaagaagacatgatgacaaggagaagctgctggccgaccagaggcggctgaagcgggagcaggaggaggccgacattgctgcccggcggcacactggagtcatccccacccaccaccagttcatcaccaatgaaagatttggagacctgctgaacattgatgacacagccaagaggaagagcggcagcgagatgaggcctgcccgggccaagtttgacttcaaggcccagaccctgaaggagctgcccctgcagaagggggacatcgtgtacatctacaagcagattgaccagaactggtatgaaggagagcaccacggccgggtgggcatcttccccaggacctacatcgagctgctgcccccagctgagaaggcccagcccaagaagctgacccctgtgcaggtgctggagtatggagaggccatcgccaagttcaacttcaacggggacacccaggtggagatgtccttcagaaaaggagagcgcatcaccctgctgcggcaggtggatgagaactggtatgagggccgcatccctggcaccagccggcagggcatcttccccatcacctacgtggatgtgatcaagaggcccctggtgaagaaccctgtggactacatggacctgcccttcagcagcagccccagccgcagcgccacagccagcccccagcagccccaggcccagcagaggagagtgaccccagacaggagccagaccagccaggacctcttctcctaccaggccctgtacagctacatcccccagaatgatgatgagctggagctgagagatggagacatcgtggatgtgatggagaagtgtgatgatggctggtttgtgggcaccagcaggaggaccaagcagtttggcaccttccctggcaactacgtgaagcccctgtacctgtag

SEQ ID NO: 171123 - DNA, 2541 bp, synthetic construct
  misc_feature 1..2541: note = Description of Artificial Sequence: Synthetic coding sequence
  source 1..2541: mol_type = other DNA
atgagcagtgaatgtgatggcggcagcaaggctgtgatgaatggcctggcccctggcagcaatggccaggacaaggccacagctgaccccctgcgggcccggagcatctctgctgtgaagatcatccctgtgaagacagtgaagaatgccagcggcctggtgctgcccacagacatggacctgaccaagatctgcacaggaaaaggagctgtgaccctgcgggccagcagcagctaccgggagacccccagcagcagccctgccagcccccaggagacccggcagcacgagagcaagccagatgagtggaggctgagcagcagcgcagatgccaatggaaatgcccagcccagcagcctggccgccaagggctacagatctgtgcaccccaacctgcccagcgacaagagccaggacagcagccccctgctgaatgaggtgagcagcagcctcatcggcacagacagccaggccttccccagcgtgtccaagcccagcagcgcctaccccagcaccaccatcgtgaaccccaccatcgtgctgctgcagcacaaccgggagcagcagaagaggctgagcagcctgagtgaccctgtgtctgagcggcgggtgggggagcaggacagcgcccccacccaggagaagcccaccagccctgggaaggccatcgagaagagggccaaggatgacagccggcgggtggtgaagagcacccaggacctgagtgatgtgtccatggatgaggtgggcatccccctgaggaacacagagaggagcaaggactggtacaagaccatgttcaagcagatccacaagctgaacagagacaccccagaggagaacccctacttccccacctacaagtttcctgagctgcctgagatccagcagaccagcgaggaggacaacccctacacccccacctaccagtttcctgccagcacccccagccccaagtcagaagatgatgacagcgacctgtacagcccccgctacagcttcagcgaggacaccaagagccccctgtctgtgcccaggagcaagtctgagatgagctacattgatggagagaaggtggtgaagaggtctgccaccctgcccctgcctgcccggagcagcagcctgaagagcagcagcgagagaaatgactgggagcccccagacaagaaggtggacaccaggaagtacagagctgagcccaagagcatctatgagtaccagcccgggaagagctctgtgctgaccaatgagaagatgagccgggacatcagccctgaggagattgacctgaagaatgagccctggtacaagttcttcagcgagctggagtttgggaagcccagcagcgccatcagccccaccccagagatcagcagcgagaccccaggctacatctacagcagcaacttccacgctgtgaagcgggagagtgatggagcccctggggacctgaccagcctggagaatgaaaggcagatctacaagtctgtgctggagggcggggacatccccctgcagggcctgagcggcctgaagaggcccagcagcagcgccagcaccaaggacagcgagagccccaggcacttcatcccagctgactacctggagagcacagaggagttcatcagaagaagacatgatgacaaggagaagctgctggccgaccagaggcggctgaagcgggagcaggaggaggccgacattgctgcccggcggcacactggagtcatccccacccaccaccagttcatcaccaatgaaagatttggagacctgctgaacattgatgacacagccaagaggaagagcggcagcgagatgaggcctgcccgggccaagtttgacttcaaggcccagaccctgaaggagctgcccctgcagaagggggacatcgtgtacatctacaagcagattgaccagaactggtatgaaggagagcaccacggccgggtgggcatcttccccaggacctacatcgagctgctgcccccagctgagaaggcccagcccaagaagctgacccctgtgcaggtgctggagtatggagaggccatcgccaagttcaacttcaatggagacacccaggtggagatgtccttcaggaagggggagcgcatcaccctgctgcggcaggtggatgagaactggtatgagggccgcatccctggcaccagccggcagggcatcttccccatcacctacgtggatgtgatcaagaggcccctggtgaagaaccctgtggactacatggacctgcccttcagcagcagccccagccgcagcgccacagccagcccccagcagccccaggcccagcagaggagagtgaccccagacaggagccagaccagccaggacctcttctcctaccaggccctgtacagctacatcccccagaatgatgatgagctggagctgagagatggagacatcgtggatgtgatggagaagtgtgatgatggctggtttgtgggcaccagcaggaggaccaagcagtttggcaccttccctggcaactacgtgaagcccctgtacctgtag

SEQ ID NO: 171124 - DNA, 2718 bp, synthetic construct
  misc_feature 1..2718: note = Description of Artificial Sequence: Synthetic coding sequence
  source 1..2718: mol_type = other DNA
atgagcagtgaatgtgatggcggcagcaaggctgtgatgaatggcctggcccctggcagcaatggccaggacaaggccacagctgaccccctgcgggcccggagcatctctgctgtgaagatcatccctgtgaagacagtgaagaatgccagcggcctggtgctgcccacagacatggacctgaccaagatctgcacaggaaaaggagctgtgaccctgcgggccagcagcagctaccgggagacccccagcagcagccctgccagcccccaggagacccggcagcacgagagcaagccaggcctggagcctgagcccagcagcgcagatgagtggaggctgagcagcagcgcagatgccaatggaaatgcccagcccagcagcctggccgccaagggctacagatctgtgcaccccaacctgcccagcgacaagagccagcgctggccccaccacagccagcctgcccgggccagcggcagctttgcccccatcagccagaccccacccagcttcagccccccaccacccctggtgcccccagcccctgaggacctgcggcgggtgtctgagccagacctgactggagctgtgagcagcacagacagcagccccctgctgaatgaggtgagcagcagcctgattggaacagacagccaggccttccccagcgtgtccaagcccagcagcgcctaccccagcaccaccatcgtgaaccccaccatcgtgctgctgcagcacaaccgggagcagcagaagaggctgagcagcctgagtgaccctgtgtctgaaagaagagtgggggagcaggacagcgcccccacccaggagaagcccaccagccctgggaaggccatcgagaagagggccaaggatgacagcagaagagtggtgaagagcacccaggacctgagtgatgtgtccatggatgaggtgggcatccccctgaggaacacagagaggagcaaggactggtacaagaccatgttcaagcagatccacaagctgaacagagatgatgacagcgacctgtacagcccccgctacagcttcagcgaggacaccaagagccccctgtctgtgcccaggagcaagtctgagatgagctacattgatggagagaaggtggtgaagaggtctgccaccctgcccctgcctgcccggagcagcagcctgaagagcagcagcgagagaaatgactgggagcccccagacaagaaggtggacaccaggaagtacagagctgagcccaagagcatctatgagtaccagcccgggaagagctctgtgctgaccaatgagaagatgagccgggacatcagccctgaggagattgacctgaagaatgagccctggtacaagttcttcagcgagctggagtttgggaagcccccacccaagaagatctgggactacacccctggggactgcagcatcctgccccgggaggacaggaagagcagcgccatcagccccaccccagagatcagcagcgagaccccaggctacatctacagcagcaacttccacgctgtgaagcgggagagtgatggagcccctggggacctgaccagcctggagaatgaaaggcagatctacaagtctgtgctggagggcggggacatccccctgcagggcctgagcggcctgaagaggcccagcagcagcgccagcaccaaggacagcgagagccccaggcacttcatcccagctgactacctggagagcacagaggagttcatcagaagaagacatgatgacaaggagaagctgctggccgaccagaggcggctgaagcgggagcaggaggaggccgacattgctgcccggcggcacactggagtcatccccacccaccaccagttcatcaccaatgaaagatttggagacctgctgaacattgatgacacagccaagaggaagagcggcagcgagatgaggcctgcccgggccaagtttgacttcaaggcccagaccctgaaggagctgcccctgcagaagggggacatcgtgtacatctacaagcagattgaccagaactggtatgaaggagagcaccacggccgggtgggcatcttccccaggacctacatcgagctgctgcccccagctgagaaggcccagcccaagaagctgacccctgtgcaggtgctggagtatggagaggccatcgccaagttcaacttcaacggggacacccaggtggagatgtccttcagaaaaggagagcgcatcaccctgctgcggcaggtggatgagaactggtatgagggccgcatccctggcaccagccggcagggcatcttccccatcacctacgtggatgtgatcaagaggcccctggtgaagaaccctgtggactacatggacctgcccttcagcagcagccccagccgcagcgccacagccagcccccagctgagccaccacagcctgcgggccggccctgacctgacagaaagtgagaagagctatgtgcagccccaggcccagcagaggagagtgaccccagacaggagccagaccagccaggacctcttctcctaccaggccctgtacagctacatcccccagaatgatgatgagctggagctgagagatggagacatcgtggatgtgatggagaagtgtgatgatggctggtttgtgggcaccagcaggaggaccaagcagtttggcaccttccctggcaactacgtgaagcccctgtacctgtag

SEQ ID NO: 171125 - DNA, 3015 bp, synthetic construct
  misc_feature 1..3015: note = Description of Artificial Sequence: Synthetic coding sequence
  source 1..3015: mol_type = other DNA
atgagcagtgaatgtgatggcggcagcaaggctgtgatgaatggcctggcccctggcagcaatggccaggacaaggccacagctgaccccctgcgggcccggagcatctctgctgtgaagatcatccctgtgaagacagtgaagaatgccagcggcctggtgctgcccacagacatggacctgaccaagatctgcacaggaaaaggagctgtgaccctgcgggccagcagcagctaccgggagacccccagcagcagccctgccagcccccaggagacccggcagcacgagagcaagccagatgagtggaggctgagcagcagcgcagatgccaatggaaatgcccagcccagcagcctggccgccaagggctacagatctgtgcaccccaacctgcccagcgacaagagccaggatgccaccagcagcagcgctgcccagcctgaggtgattgtggtgcccctgtacctggtgaacacagaccggggccaggagggcacagcccggccccccacccccctgggccccctgggctgtgtgcccaccatcccagccacagccagcgctgccagccccctgaccttccccaccctggatgacttcatccccccccacctgcagcgctggccccaccacagccagcctgcccgggccagcggcagctttgcccccatcagccagaccccacccagcttcagccccccaccacccctggtgcccccagcccctgaggacctgcggcgggtgtctgagccagacctgactggagctgtgagcagcacagacagcagccccctgctgaatgaggtgagcagcagcctgattggaacagacagccaggccttccccagcgtgtccaagcccagcagcgcctaccccagcaccaccatcgtgaaccccaccatcgtgctgctgcagcacaaccgggagcagcagaagaggctgagcagcctgagtgaccctgtgtctgaaagaagagtgggggagcaggacagcgcccccacccaggagaagcccaccagccctgggaaggccatcgagaagagggccaaggatgacagcagaagagtggtgaagagcacccaggacctgagtgatgtgtccatggatgaggtgggcatccccctgaggaacacagagaggagcaaggactggtacaagaccatgttcaagcagatccacaagctgaacagagacaccccagaggagaacccctacttccccacctacaagtttcctgagctgcctgagatccagcagaccagtgaagatgatgacagcgacctgtacagcccccgctacagcttcagcgaggacaccaagagccccctgtctgtgcccaggagcaagtctgagatgagctacattgatggagagaaggtggtgaagaggtctgccaccctgcccctgcctgcccggagcagcagcctgaagagcagcagcgagagaaatgactgggagcccccagacaagaaggtggacaccaggaagtacagagctgagcccaagagcatctatgagtaccagcccgggaagagctctgtgctgaccaatgagaagatgagccgggacatcagccctgaggagattgacctgaagaatgagccctggtacaagttcttcagcgagctggagtttgggaagcccccacccaagaagatctgggactacacccctggggactgcagcatcctgccccgggaggacaggaagaccaacctggacaaggacctgagcctgtgccagacagagctggaggccgacctggagaagatggagaccctgaacaaggcccccagcgccaacgtgccccagagcagcgccatcagccccaccccagagatcagcagcgagaccccaggctacatctacagcagcaacttccacgctgtgaagcgggagagtgatggagcccctggggacctgaccagcctggagaatgaaaggcagatctacaagtctgtgctggagggcggggacatccccctgcagggcctgagcggcctgaagaggcccagcagcagcgccagcaccaaggacagcgagagccccaggcacttcatcccagctgactacctggagagcacagaggagttcatcagaagaagacatgatgacaaggagaagctgctggccgaccagaggcggctgaagcgggagcaggaggaggccgacattgctgcccggcggcacactggagtcatccccacccaccaccagttcatcaccaatgaaagatttggagacctgctgaacattgatgacacagccaagaggaagagcggcagcgagatgaggcctgcccgggccaagtttgacttcaaggcccagaccctgaaggagctgcccctgcagaagggggacatcgtgtacatctacaagcagattgaccagaactggtatgaaggagagcaccacggccgggtgggcatcttccccaggacctacatcgagctgctgcccccagctgagaaggcccagcccaagaagctgacccctgtgcaggtgctggagtatggagaggccatcgccaagttcaacttcaatggagacacccaggtggagatgtccttcaggaagggggagcgcatcaccctgctgcggcaggtggatgagaactggtatgagggccgcatccctggcaccagccggcagggcatcttccccatcacctacgtggatgtgatcaagaggcccctggtgaagaaccctgtggactacatggacctgcccttcagcagcagccccagccgcagcgccacagccagcccccagcagccccaggcccagcagaggagagtgaccccagacaggagccagaccagccaggacctcttctcctaccaggccctgtacagctacatcccccagaatgatgatgagctggagctgagagatggagacatcgtggatgtgatggagaagtgtgatgatggctggtttgtgggcaccagcaggaggaccaagcagtttggcaccttccctggcaactacgtgaagcccctgtacctgtag

SEQ ID NO: 171126 - DNA, 3879 bp, synthetic construct
  misc_feature 1..3879: note = Description of Artificial Sequence: Synthetic coding sequence
  source 1..3879: mol_type = other DNA
atgagcagtgaatgtgatggcggcagcaaggctgtgatgaatggcctggcccctggcagcaatggccaggacaaggccacagctgaccccctgcgggcccggagcatctctgctgtgaagatcatccctgtgaagacagtgaagaatgccagcggcctggtgctgcccacagacatggacctgaccaagatctgcacaggaaaaggagctgtgaccctgcgggccagcagcagctaccgggagacccccagcagcagccctgccagcccccaggagacccggcagcacgagagcaagccaggcctggagcctgagcccagcagcgcagatgagtggaggctgagcagcagcgcagatgccaatggaaatgcccagcccagcagcctggccgccaagggctacagatctgtgcaccccaacctgcccagcgacaagagccaggatgccaccagcagcagcgctgcccagcctgaggtgattgtggtgcccctgtacctggtgaacacagaccggggccaggagggcacagcccggccccccacccccctgggccccctgggctgtgtgcccaccatcccagccacagccagcgctgccagccccctgaccttccccaccctggatgacttcatccccccccacctgcagcgctggccccaccacagccagcctgcccgggccagcggcagctttgcccccatcagccagaccccacccagcttcagccccccaccacccctggtgcccccagcccctgaggacctgcggcgggtgtctgagccagacctgaccggggctgtgagcagcacagacagcagccccctgctgaatgaggtgagcagcagcctcatcggcacagacagccaggccttccccagcgtgtccaagcccagcagcgcctaccccagcaccaccatcgtgaaccccaccatcgtgctgctgcagcacaaccgggagcagcagaagaggctgagcagcctgagtgaccctgtgtctgagcggcgggtgggggagcaggacagcgcccccacccaggagaagcccaccagccctgggaaggccatcgagaagagggccaaggatgacagccggcgggtggtgaagagcacccaggacctgagtgatgtgtccatggatgaggtgggcatccccctgaggaacacagagaggagcaaggactggtacaagaccatgttcaagcagatccacaagctgaacagagacaccccagaggagaacccctacttccccacctacaagtttcctgagctgcctgagatccagcagaccagcgaggaggacaacccctacacccccacctaccagtttcctgccagcacccccagccccaagtcagaagatgatgacagcgacctgtacagcccccgctacagcttcagcgaggacaccaagagccccctgtctgtgcccaggagcaagtctgagatgagctacattgatggagagaaggtggtgaagaggtctgccaccctgcccctgcctgcccggagcagcagcctgaagagcagcagcgagagaaatgactgggagcccccagacaagaaggtggacaccaggaagtacagagctgagcccaagagcatctatgagtaccagcccgggaagagctctgtgctgaccaatgagaagatgagccgggacatcagccctgaggagattgacctgaagaatgagccctggtacaagttcttcagcgagctggagtttgggaagcccccacccaagaagatctgggactacacccctggggactgcagcatcctgccccgggaggacaggaagaccaacctggacaaggacctgagcctgtgccagacagagctggaggccgacctggagaagatggagaccctgaacaaggcccccagcgccaacgtgccccagagcagcgccatcagccccaccccagagatcagcagcgagaccccaggctacatctacagcagcaacttccacgctgtgaagcgggagagtgatggagcccctggggacctgaccagcctggagaatgaaaggcagatctacaagtctgtgctggagggcggggacatccccctgcagggcctgagcggcctgaagaggcccagcagcagcgccagcaccaaggacagcgagagccccaggcacttcatcccagctgactacctggagagcacagaggagttcatcagaagaagacatgatgacaaggagaagctgctggccgaccagaggcggctgaagcgggagcaggaggaggccgacattgctgcccggcggcacactggagtcatccccacccaccaccagttcatcaccaatgaaagatttggagacctgctgaacattgatgacacagccaagaggaagagcggcagcgagatgaggcctgcccgggccaagtttgacttcaaggcccagaccctgaaggagctgcccctgcagaagggggacatcgtgtacatctacaagcagattgaccagaactggtatgaaggagagcaccacggccgggtgggcatcttccccaggacctacatcgagctgctgcccccagctgagaaggcccagcccaagaagctgacccctgtgcaggtgctggagtatggagaggccatcgccaagttcaacttcaatggagacacccaggtggagatgtccttcaggaagggggagcgcatcaccctgctgcggcaggtggatgagaactggtatgagggccgcatccctggcaccagccggcagggcatcttccccatcacctacgtggatgtgatcaagaggcccctggtgaagaaccctgtggactacatggacctgcccttcagcagcagccccagccgcagcgccacagccagcccccagttcagcagccacagcaagctgatcaccccagcccccagcagcctgccccacagccggcgggccctgagccctgagatgcatgctgtgaccagcgagtggatcagcctgactgtgggcgtgcccggccgccgcagcctggccctgaccccacccctgccccccctgcctgaggccagcatctacaacacagaccacctggccctgagcccccgggccagccccagcctgagcctgagcctgccccacctgtcctggagcgaccggcccacccccaggtctgtggccagccccctggccctgcccagcccccacaagacctacagcctggcccccaccagccaggccagcctgcacatgaatggagatggaggagtgcacacccccagcagcggcatccaccaggacagcttcctgcagctgcccctgggcagcagtgacagcgtcatcagccagctgagtgatgccttcagcagccagagcaagaggcagccctggagggaggagagcggccagtatgaaaggaaggccgagagaggagctggggagcggggccctgggggccccaagatcagcaagaagagctgcctgaagcccagtgatgtggtgcgctgcctgagcacagagcagaggctgagtgacctgaacaccccagaggagagcaggcctgggaagcccctgggcagcgccttccctggcagcgaggccgagcagacagagcggcaccggggcggggagcaggccggcaggaaggccgcccggcggggcggcagccagcagccccaggcccagcagaggagagtgaccccagacaggagccagaccagccaggacctcttctcctaccaggccctgtacagctacatcccccagaatgatgatgagctggagctgagagatggagacatcgtggatgtgatggagaagtgtgatgatggctggtttgtgggcaccagcaggaggaccaagcagtttggcaccttccctggcaactacgtgaagcccctgtacctgtag

SEQ ID NO: 171127 - DNA, 3801 bp, synthetic construct
  misc_feature 1..3801: note = Description of Artificial Sequence: Synthetic coding sequence
  source 1..3801: mol_type = other DNA
atgagcagtgaatgtgatggcggcagcaaggctgtgatgaatggcctggcccctggcagcaatggccaggacaaggccacagctgaccccctgcgggcccggagcatctctgctgtgaagatcatccctgtgaagacagtgaagaatgccagcggcctggtgctgcccacagacatggacctgaccaagatctgcacaggaaaaggagctgtgaccctgcgggccagcagcagctaccgggagacccccagcagcagccctgccagcccccaggagacccggcagcacgagagcaagccaggcctggagcctgagcccagcagcgcagatgagtggaggctgagcagcagcgcagatgccaatggaaatgcccagcccagcagcctggccgccaagggctacagatctgtgcaccccaacctgcccagcgacaagagccaggatgccaccagcagcagcgctgcccagcctgaggtgattgtggtgcccctgtacctggtgaacacagaccggggccaggagggcacagcccggccccccacccccctgggccccctgggctgtgtgcccaccatcccagccacagccagcgctgccagccccctgaccttccccaccctggatgacttcatccccccccacctgcagcgctggccccaccacagccagcctgcccgggccagcggcagctttgcccccatcagccagaccccacccagcttcagccccccaccacccctggtgcccccagcccctgaggacctgcggcgggtgtctgagccagacctgaccggggctgtgagcagcacagacagcagccccctgctgaatgaggtgagcagcagcctcatcggcacagacagccaggccttccccagcgtgtccaagcccagcagcgcctaccccagcaccaccatcgtgaaccccaccatcgtgctgctgcagcacaaccgggagcagcagaagaggctgagcagcctgagtgaccctgtgtctgagcggcgggtgggggagcaggacagcgcccccacccaggagaagcccaccagccctgggaaggccatcgagaagagggccaaggatgacagccggcgggtggtgaagagcacccaggacctgagtgatgtgtccatggatgaggtgggcatccccctgaggaacacagagaggagcaaggactggtacaagaccatgttcaagcagatccacaagctgaacagagatgatgacagcgacctgtacagcccccgctacagcttcagcgaggacaccaagagccccctgtctgtgcccaggagcaagtctgagatgagctacattgatggagagaaggtggtgaagaggtctgccaccctgcccctgcctgcccggagcagcagcctgaagagcagcagcgagagaaatgactgggagcccccagacaagaaggtggacaccaggaagtacagagctgagcccaagagcatctatgagtaccagcccgggaagagctctgtgctgaccaatgagaagatgagccgggacatcagccctgaggagattgacctgaagaatgagccctggtacaagttcttcagcgagctggagtttgggaagcccccacccaagaagatctgggactacacccctggggactgcagcatcctgccccgggaggacaggaagaccaacctggacaaggacctgagcctgtgccagacagagctggaggccgacctggagaagatggagaccctgaacaaggcccccagcgccaacgtgccccagagcagcgccatcagccccaccccagagatcagcagcgagaccccaggctacatctacagcagcaacttccacgctgtgaagcgggagagtgatggagcccctggggacctgaccagcctggagaatgaaaggcagatctacaagtctgtgctggagggcggggacatccccctgcagggcctgagcggcctgaagaggcccagcagcagcgccagcaccaaggacagcgagagccccaggcacttcatcccagctgactacctggagagcacagaggagttcatcagaagaagacatgatgacaaggagaagctgctggccgaccagaggcggctgaagcgggagcaggaggaggccgacattgctgcccggcggcacactggagtcatccccacccaccaccagttcatcaccaatgaaagatttggagacctgctgaacattgatgacacagccaagaggaagagcggcagcgagatgaggcctgcccgggccaagtttgacttcaaggcccagaccctgaaggagctgcccctgcagaagggggacatcgtgtacatctacaagcagattgaccagaactggtatgaaggagagcaccacggccgggtgggcatcttccccaggacctacatcgagctgctgcccccagctgagaaggcccagcccaagaagctgacccctgtgcaggtgctggagtatggagaggccatcgccaagttcaacttcaatggagacacccaggtggagatgtccttcaggaagggggagcgcatcaccctgctgcggcaggtggatgagaactggtatgagggccgcatccctggcaccagccggcagggcatcttccccatcacctacgtggatgtgatcaagaggcccctggtgaagaaccctgtggactacatggacctgcccttcagcagcagccccagccgcagcgccacagccagcccccagttcagcagccacagcaagctgatcaccccagcccccagcagcctgccccacagccggcgggccctgagccctgagatgcatgctgtgaccagcgagtggatcagcctgactgtgggcgtgcccggccgccgcagcctggccctgaccccacccctgccccccctgcctgaggccagcatctacaacacagaccacctggccctgagcccccgggccagccccagcctgagcctgagcctgccccacctgtcctggagcgaccggcccacccccaggtctgtggccagccccctggccctgcccagcccccacaagacctacagcctggcccccaccagccaggccagcctgcacatgaatggagatggaggagtgcacacccccagcagcggcatccaccaggacagcttcctgcagctgcccctgggcagcagtgacagcgtcatcagccagctgagtgatgccttcagcagccagagcaagaggcagccctggagggaggagagcggccagtatgaaaggaaggccgagagaggagctggggagcggggccctgggggccccaagatcagcaagaagagctgcctgaagcccagtgatgtggtgcgctgcctgagcacagagcagaggctgagtgacctgaacaccccagaggagagcaggcctgggaagcccctgggcagcgccttccctggcagcgaggccgagcagacagagcggcaccggggcggggagcaggccggcaggaaggccgcccggcggggcggcagccagctgagccaccacagcctgcgggccggccctgacctgacagagagcgagaagagctatgtgcagccccaggcccagcagaggagagtgaccccagacaggagccagaccagccaggacctcttctcctaccaggccctgtacagctacatcccccagaatgatgatgagctggagctgagagatggagacatcgtggatgtgatggagaagtgtgatgatggctggtttgtgggcaccagcaggaggaccaagcagtttggcaccttccctggcaactacgtgaagcccctgtacctgtag

SEQ ID NO: 171128 - DNA, 2436 bp, synthetic construct
  misc_feature 1..2436: note = Description of Artificial Sequence: Synthetic coding sequence
  source 1..2436: mol_type = other DNA
atgagcagtgaatgtgatggcggcagcaaggctgtgatgaatggcctggcccctggcagcaatggccaggacaaggacatggacctgaccaagatctgcacaggaaaaggagctgtgaccctgcgggccagcagcagctaccgggagacccccagcagcagccctgccagcccccaggagacccggcagcacgagagcaagccaggcctggagcctgagcccagcagcgcagatgagtggaggctgagcagcagcgcagatgccaatggaaatgcccagcccagcagcctggccgccaagggctacagatctgtgcaccccaacctgcccagcgacaagagccaggacagcagccccctgctgaatgaggtgagcagcagcctgattggaacagacagccaggccttccccagcgtgtccaagcccagcagcgcctaccccagcaccaccatcgtgaaccccaccatcgtgctgctgcagcacaaccgggagcagcagaagaggctgagcagcctgagtgaccctgtgtctgaaagaagagtgggggagcaggacagcgcccccacccaggagaagcccaccagccctgggaaggccatcgagaagagggccaaggatgacagcagaagagtggtgaagagcacccaggacctgagtgatgtgtccatggatgaggtgggcatccccctgaggaacacagagaggagcaaggactggtacaagaccatgttcaagcagatccacaagctgaacagagatgatgacagcgacctgtacagcccccgctacagcttcagcgaggacaccaagagccccctgtctgtgcccaggagcaagtctgagatgagctacattgatggagagaaggtggtgaagaggtctgccaccctgcccctgcctgcccggagcagcagcctgaagagcagcagcgagagaaatgactgggagcccccagacaagaaggtggacaccaggaagtacagagctgagcccaagagcatctatgagtaccagcccgggaagagctctgtgctgaccaatgagaagatgagccgggacatcagccctgaggagattgacctgaagaatgagccctggtacaagttcttcagcgagctggagtttgggaagcccaccaacctggacaaggacctgagcctgtgccagacagagctggaggccgacctggagaagatggagaccctgaacaaggcccccagcgccaacgtgccccagagcagcgccatcagccccaccccagagatcagcagcgagaccccaggctacatctacagcagcaacttccacgctgtgaagcgggagagtgatggagcccctggggacctgaccagcctggagaatgaaaggcagatctacaagtctgtgctggagggcggggacatccccctgcagggcctgagcggcctgaagaggcccagcagcagcgccagcaccaaggacagcgagagccccaggcacttcatcccagctgactacctggagagcacagaggagttcatcagaagaagacatgatgacaaggagaagctgctggccgaccagaggcggctgaagcgggagcaggaggaggccgacattgctgcccggcggcacactggagtcatccccacccaccaccagttcatcaccaatgaaagatttggagacctgctgaacattgatgacacagccaagaggaagagcggcagcgagatgaggcctgcccgggccaagtttgacttcaaggcccagaccctgaaggagctgcccctgcagaagggggacatcgtgtacatctacaagcagattgaccagaactggtatgaaggagagcaccacggccgggtgggcatcttccccaggacctacatcgagctgctgcccccagctgagaaggcccagcccaagaagctgacccctgtgcaggtgctggagtatggagaggccatcgccaagttcaacttcaacggggacacccaggtggagatgtccttcagaaaaggagagcgcatcaccctgctgcggcaggtggatgagaactggtatgagggccgcatccctggcaccagccggcagggcatcttccccatcacctacgtggatgtgatcaagaggcccctggtgaagaaccctgtggactacatggacctgcccttcagcagcagccccagccgcagcgccacagccagcccccagcagccccaggcccagcagaggagagtgaccccagacaggagccagaccagccaggacctcttctcctaccaggccctgtacagctacatcccccagaatgatgatgagctggagctgagagatggagacatcgtggatgtgatggagaagtgtgatgatggctggtttgtgggcaccagcaggaggaccaagcagtttggcaccttccctggcaactacgtgaagcccctgtacctgtag

SEQ ID NO: 171129 - DNA, 2055 bp, synthetic construct
  misc_feature 1..2055: note = Description of Artificial Sequence: Synthetic coding sequence
  source 1..2055: mol_type = other DNA
atgagcagtgaatgtgatggcggcagcaaggctgtgatgaatggcctggcccctggcagcaatggccaggacaaggacatggacctgaccaagatctgcacaggaaaaggagctgtgaccctgcgggccagcagcagctaccgggagacccccagcagcagccctgccagcccccaggagacccggcagcacgagagcaagccagatgagtggaggctgagcagcagcgcagatgccaatggaaatgcccagcccagcagcctggccgccaagggctacagatctgtgcaccccaacctgcccagcgacaagagccaggacagcagccccctgctgaatgaggtgagcagcagcctcatcggcacagacagccaggccttccccagcgtgtccaagcccagcagcgcctaccccagcaccaccatcgtgaaccccaccatcgtgctgctgcagcacaaccgggagcagcagaagaggctgagcagcctgagtgaccctgtgtctgagcggcgggtgggggagcaggacagcgcccccacccaggagaagcccaccagccctgggaaggccatcgagaagagggccaaggatgacagccggcgggtggtgaagagcacccaggacctgagtgatgtgtccatggatgaggtgggcatccccctgaggaacacagagaggagcaaggactggtacaagaccatgttcaagcagatccacaagctgaacagagatgatgacagcgacctgtacagcccccgctacagcttcagcgaggacaccaagagccccctgtctgtgcccaggagcaagtctgagatgagctacattgatggagagaaggtggtgaagaggtctgccaccctgcccctgcctgcccggagcagcagcctgaagagcagcagcgagagaaatgactgggagcccccagacaagaaggtggacaccaggaagtacagagctgagcccaagagcatctatgagtaccagcccgggaagagctctgtgctgaccaatgagaagatgagcagcgccatcagccccaccccagagatcagcagcgagaccccaggctacatctacagcagcaacttccacgctgtgaagcgggagagtgatggagcccctggggacctgaccagcctggagaatgaaaggcagatctacaagtctgtgctggagggcggggacatccccctgcagggcctgagcggcctgaagaggcccagcagcagcgccagcaccaaggacagcgagagccccaggcacttcatcccagctgactacctggagagcacagaggagttcatcagaagaagacatgatgacaaggagatgaggcctgcccgggccaagtttgacttcaaggcccagaccctgaaggagctgcccctgcagaagggggacatcgtgtacatctacaagcagattgaccagaactggtatgaaggagagcaccacggccgggtgggcatcttccccaggacctacatcgagctgctgcccccagctgagaaggcccagcccaagaagctgacccctgtgcaggtgctggagtatggagaggccatcgccaagttcaacttcaatggagacacccaggtggagatgtccttcaggaagggggagcgcatcaccctgctgcggcaggtggatgagaactggtatgagggccgcatccctggcaccagccggcagggcatcttccccatcacctacgtggatgtgatcaagaggcccctggtgaagaaccctgtggactacatggacctgcccttcagcagcagccccagccgcagcgccacagccagcccccagcagccccaggcccagcagaggagagtgaccccagacaggagccagaccagccaggacctcttctcctaccaggccctgtacagctacatcccccagaatgatgatgagctggagctgagagatggagacatcgtggatgtgatggagaagtgtgatgatggctggtttgtgggcaccagcaggaggaccaagcagtttggcaccttccctggcaactacgtgaagcccctgtacctgtag

SEQ ID NO: 171130 - DNA, 2718 bp, synthetic construct; identical to SEQ ID NO: 171124
  misc_feature 1..2718: note = Description of Artificial Sequence: Synthetic coding sequence
  source 1..2718: mol_type = other DNA

SEQ ID NO: 171131 - DNA, 3456 bp, synthetic construct; identical to SEQ ID NO: 171121
  misc_feature 1..3456: note = Description of Artificial Sequence: Synthetic coding sequence
  source 1..3456: mol_type = other DNA

SEQ ID NO: 171132 - DNA, 3879 bp, synthetic construct; identical to SEQ ID NO: 171126
  misc_feature 1..3879: note = Description of Artificial Sequence: Synthetic coding sequence
  source 1..3879: mol_type = other DNA

SEQ ID NO: 171133 - DNA, 2451 bp, synthetic construct
  misc_feature 1..2451: note = Description of Artificial Sequence: Synthetic coding sequence
  source 1..2451: mol_type = other DNA
atgagcagtgaatgtgatggcggcagcaaggctgtgatgaatggcctggcccctggcagcaatggccaggacaaggacatggacctgaccaagatctgcacaggaaaaggagctgtgaccctgcgggccagcagcagctaccgggagacccccagcagcagccctgccagcccccaggagacccggcagcacgagagcaagccaggcctggagcctgagcccagcagcgcagatgagtggaggctgagcagcagcgcagatgccaatggaaatgcccagcccagcagcctggccgccaagggctacagatctgtgcaccccaacctgcccagcgacaagagccaggatgccaccagcagcagcgctgcccagcctgaggtgattgtggtgcccctgtacctggtgaacacagaccggggccaggagggcacagcccggccccccacccccctgggccccctgggctgtgtgcccaccatcccagccacagccagcgctgccagccccctgaccttccccaccctggatgacttcatccccccccacctgcagcgctggccccaccacagccagcctgcccgggccagcggcagctttgcccccatcagccagaccccacccagcttcagccccccaccacccctggtgcccccagcccctgaggacctgcggcgggtgtctgagccagacctgaccggggctgtgagcagcacagacagcagccccctgctgaatgaggtgagcagcagcctcatcggcacagacagccaggccttccccagcgtgtccaagcccagcagcgcctaccccagcaccaccatcgtgaaccccaccatcgtgctgctgcagcacaaccgggagcagcagaagaggctgagcagcctgagtgaccctgtgtctgagcggcgggtgggggagcaggacagcgcccccacccaggagaagcccaccagccctgggaaggccatcgagaagagggccaaggatgacagccggcgggtggtgaagagcacccaggacctgagtgatgtgtccatggatgaggtgggcatccccctgaggaacacagagaggagcaaggactggtacaagaccatgttcaagcagatccacaagctgaacagagatgatgacagcgacctgtacagcccccgctacagcttcagcgaggacaccaagagccccctgtctgtgcccaggagcaagtctgagatgagctacattgatggagagaaggtggtgaagaggtctgccaccctgcccctgcctgcccggagcagcagcctgaagagcagcagcgagagaaatgactgggagcccccagacaagaaggtggacaccaggaagtacagagctgagcccaagagcatctatgagtaccagcccgggaagagctctgtgctgaccaatgagaagatgagcagcgccatcagccccaccccagagatcagcagcgagaccccaggctacatctacagcagcaacttccacgctgtgaagcgggagagtgatggagcccctggggacctgaccagcctggagaatgaaaggcagatctacaagtctgtgctggagggcggggacatccccctgcagggcctgagcggcctgaagaggcccagcagcagcgccagcaccaaggacagcgagagccccaggcacttcatcccagctgactacctggagagcacagaggagttcatcagaagaagacatgatgacaaggagatgaggcctgcccgggccaagtttgacttcaaggcccagaccctgaaggagctgcccctgcagaagggggacatcgtgtacatctacaagcagattgaccagaactggtatgaaggagagcaccacggccgggtgggcatcttccccaggacctacatcgagctgctgcccccagctgagaaggcccagcccaagaagctgacccctgtgcaggtgctggagtatggagaggccatcgccaagttcaacttcaatggagacacccaggtggagatgtccttcaggaagggggagcgcatcaccctgctgcggcaggtggatgagaactggtatgagggccgcatccctggcaccagccggcagggcatcttccccatcacctacgtggatgtgatcaagaggcccctggtgaagaaccctgtggactacatggacctgcccttcagcagcagccccagccgcagcgccacagccagcccccagcagccccaggcccagcagaggagagtgaccccagacaggagccagaccagccaggacctcttctcctaccaggccctgtacagctacatcccccagaatgatgatgagctggagctgagagatggagacatcgtggatgtgatggagaagtgtgatgatggctggtttgtgggcaccagcaggaggaccaagcagtttggcaccttccctggcaactacgtgaagcccctgtacctgtag

SEQ ID NO: 171134 - DNA, 3015 bp, synthetic construct; identical to SEQ ID NO: 171125
  misc_feature 1..3015: note = Description of Artificial Sequence: Synthetic coding sequence
  source 1..3015: mol_type = other DNA

SEQ ID NO: 171135 - DNA, 2016 bp, synthetic construct
  misc_feature 1..2016: note = Description of Artificial Sequence: Synthetic coding sequence
  source 1..2016: mol_type = other DNA
atgcagggcccccccaggagcctgcgggccggcctgagcctggatgacttcatccctggccacctgcagagccacatcggcagcagcagccggggcaccagggtgcctgtgatcagaaatggaggcagcaacaccctgaacttccagttccatgaccctgcccccaggacagtgtgcaatggaggctacacccccaggagagatgccagccagcacccagaccctgcctggtaccagacctggccaggccctggcagcaagcccagcgccagcaccaagatcccagccagccagcacacccagaactggagcgccacctggaccaaggacagcaagagaagagacaagcgctgggtgaagtatgagggcatcggccctgtggatgagagcggcatgcccatcgcccccaggagctctgtggaccggccccgggactggtacagaaggatgttccagcagatccacaggaagatgccagacctgcagctggactggacctttgaggagcccccccgggaccccaggcacctgggcgcccagcagaggcctgcccacaggcctggccctgccaccagcagcagcggccgctcctgggaccacagcgaggagctgcccaggagcaccttcaactacagacctggggccttcagcacagtgctgcagcccagcaaccaggtgctgcggcggcgggagaaggtggacaacgtgtggacagaggagagctggaaccagttcctgcaggagctggagaccggccagaggcccaagaagcccctggtggatgatcctggagagaagcccagccagcccatcgaggtgctgctggagcgggagctggccgagctgtctgctgagctggacaaggacctgcgggccatcgagacccggctgcccagccccaagagcagccctgccccccggcgggcccctgagcagaggcccccagctggccctgccagcgcctggagcagcagctacccccacgccccctacctgggcagcgcccggagcctgagcccccacaagatggctgatggcggcagccccttcctgggcagaagagactttgtgtaccccagcagcacccgggaccccagcgccagcaatggaggcggcagccctgcccggcgggaggagaagaagaggaaggccgcccggctgaagtttgacttccaggcccagagccccaaggagctgaccctgcagaagggggacatcgtgtacatccacaaggaggtggacaagaactggctggagggggagcaccacggccgcctgggcatcttccctgccaactacgtggaggtgctgcctgcagatgagatccccaagcccatcaagccacccacctaccaggtgctggagtatggagaggccgtggcccagtacaccttcaagggggacctggaggtggagctgtccttcagaaaaggagagcacatctgcctgatcaggaaggtgaatgaaaactggtatgagggccgcatcactggaacaggccggcagggcatcttccctgccagctatgtgcaggtgtcccgggagccccggctgcggctgtgtgatgatggcccccagctgcccaccagcccccggctgacagctgctgcccggagcgcccggcaccccagcagccccagcgccctgcggagccctgctgaccccatcgacctgggcggccagaccagccccaggagaacaggcttctccttccccacccaggagccccggccccagacccagaacctgggcaccccaggccctgccctgagccacagccggggccccagccaccccctggacctgggcaccagcagccccaacaccagccagatccactggaccccctaccgggccatgtaccagtaccggccccagaatgaagatgagctggagctgcgggagggggacagagtggatgtgatgcagcagtgtgatgatggctggtttgtgggcgtgtccaggaggacccagaagtttggcaccttccctggcaactacgtggcccctgtgtag

SEQ ID NO: 171136 - DNA, 990 bp, synthetic construct
  misc_feature 1..990: note = Description of Artificial Sequence: Synthetic coding sequence
  source 1..990: mol_type = other DNA
atggctgatggcggcagccccttcctgggcagaagagactttgtgtaccccagcagcacccgggaccccagcgccagcaatggaggcggcagccctgcccggcgggaggagaagaagaggaaggccgcccggctgaagtttgacttccaggcccagagccccaaggagctgaccctgcagaagggggacatcgtgtacatccacaaggaggtggacaagaactggctggagggggagcaccacggccgcctgggcatcttccctgccaactacgtggaggtgctgcctgcagatgagatccccaagcccatcaagccacccacctaccaggtgctggagtatggagaggccgtggcccagtacaccttcaagggggacctggaggtggagctgtccttcagaaaaggagagcacatctgcctgatcaggaaggtgaatgaaaactggtatgagggccgcatcactggaacaggccggcagggcatcttccctgccagctatgtgcaggtgtcccgggagccccggctgcggctgtgtgatgatggcccccagctgcccaccagcccccggctgacagctgctgcccggagcgcccggcaccccagcagccccagcgccctgcggagccctgctgaccccatcgacctgggcggccagaccagccccaggagaacaggcttctccttccccacccaggagccccggccccagacccagaacctgggcaccccaggccctgccctgagccacagccggggccccagccaccccctggacctgggcaccagcagccccaacaccagccagatccactggaccccctaccgggccatgtaccagtaccggccccagaatgaagatgagctggagctgcgggagggggacagagtggatgtgatgcagcagtgtgatgatggctggtttgtgggcgtgtccaggaggacccagaagtttggcaccttccctggcaactacgtggcccctgtgtag

SEQ ID NO: 171137 - DNA, 1074 bp, synthetic construct
  misc_feature 1..1074: note = Description of Artificial Sequence: Synthetic coding sequence
  source 1..1074: mol_type = other DNA
atggctgctgctgccaagcccaacaacctgagcctggtggtgcacggccctggggacctgcggctggagaactaccccatccctgagcccggccccaatgaggtgctgctgaggatgcacagcgtgggcatctgtggcagtgatgtgcactactgggagtatggaagaattggcaacttcatcgtgaagaagcccatggtgctgggccacgaggccagcggcaccgtggagaaggtgggcagctctgtgaagcacctgaagccaggggacagagtggccatcgagcccggggcccccagagaaaatgatgagttctgcaagatgggccgctacaacctgagccccagcatcttcttctgtgccaccccaccagatgatggcaacctgtgccgcttctacaagcacaatgctgccttctgctacaagctgcctgacaacgtgacctttgaggagggcgccctgattgagcccctgtctgtgggcatccacgcctgccggcggggcggcgtgaccctgggccacaaggtgctggtgtgtggggccggccccatcggcatggtgaccctgctggtggccaaggccatgggcgccgcccaggtggtggtgacagacctgagcgccacccggctgagcaaggccaaggagatcggggctgacctggtgctgcagatcagcaaggagagcccccaggagatcgccaggaaggtggagggccagctgggctgcaagccagaggtgaccattgaatgtactggagctgaggccagcatccaggccggcatctatgccaccaggtctgggggcaacctggtgctggtgggcctgggcagcgagatgaccaccgtgcccctgctgcatgctgccatccgggaggtggacatcaagggcgtcttccgctactgcaacacctggcctgtggccatctccatgctggccagcaagtctgtgaatgtgaagcccctggtgacccaccgcttccccctggagaaggccctggaggcctttgagaccttcaagaagggcctgggcctgaagatcatgctgaagtgtgaccccagcgaccagaacccctag

SEQ ID NO: 171138 - DNA, 597 bp, synthetic construct
  misc_feature 1..597: note = Description of Artificial Sequence: Synthetic coding sequence
  source 1..597: mol_type = other DNA
atggcctacccaggccaccctggagctgggggcggctactacccaggcggctacggcggggcccctgggggccctgccttccctggccagacccaggaccccctgtatggctactttgctgctgtggccggccaggacggccagattgatgctgatgagctgcagcgctgcctgacccagagcggcattgctgggggctacaagcccttcaacctggagacctgccgcctgatggtgtccatgctggaccgggacatgagcggcaccatgggcttcaatgagttcaaggagctgtgggccgtgctgaatggctggaggcagcacttcatcagctttgacacagacagaagtggcaccgtggacccccaggagctgcagaaggccctgaccaccatgggcttccggctgagcccccaggccgtgaacagcatcgccaagcgctacagcaccaacgggaagatcacctttgatgactacatcgcctgctgcgtgaagctgcgggccctgacagacagcttcagaagaagagacacagcccagcagggcgtggtgaacttcccctatgatgacttcatccagtgtgtgatgtctgtgtag

SEQ ID NO: 171139 - DNA, 552 bp, synthetic construct
  misc_feature 1..552: note = Description of Artificial Sequence: Synthetic coding sequence
  source 1..552: mol_type = other DNA
atgcagtatggaggagcccctgggggccctgccttccctggccagacccaggaccccctgtatggctactttgctgctgtggccggccaggacggccagattgatgctgatgagctgcagcgctgcctgacccagagcggcattgctgggggctacaagcccttcaacctggagacctgccgcctgatggtgtccatgctggaccgggacatgagcggcaccatgggcttcaatgagttcaaggagctgtgggccgtgctgaatggctggaggcagcacttcatcagctttgacacagacaggagcggcaccgtggacccccaggagctgcagaaggccctgaccaccatgggcttccggctgagcccccaggccgtgaacagcatcgccaagcgctacagcaccaacgggaagatcacctttgatgactacatcgcctgctgcgtgaagctgcgggccctgacagacagcttcagaagaagagacacagcccagcagggcgtggtgaacttcccctatgatgacttcatccagtgtgtgatgtctgtgtag

SEQ ID NO: 171140 - DNA, 543 bp, synthetic construct
  misc_feature 1..543: note = Description of Artificial Sequence: Synthetic coding sequence
  source 1..543: mol_type = other DNA
atgcagtatggaggagcccctgggggccctgccttccctggccagacccaggaccccctgtatggctactttgctgctgtggccggccaggacggccagattgatgctgatgagctgcagcgctgcctgacccagagcggcattgctgggggctacaagcccttcaacctggagacctgccgcctgatggtgtccatgctggaccgggacatgagcggcaccatgggcttcaatgagttcaaggagctgtgggccgtgctgaatggctggaggcagcacttcatcagctttgacacagacaggagcggcaccgtggacccccaggagctgcagaaggccctgaccaccatgggcttccggctgagcccccaggccgtgaacagcatcgccaagcgctacagcaccaacgggaagatcacctttgatgactacatcgcctgctgcgtgaagctgcgggccctgacagacagcttcagaagaagagacacagcccagcagggcgtggtgaacttcccctatgatgatgtgtccctgagaaattag

SEQ ID NO: 171141 - DNA, 6645 bp, synthetic construct
  misc_feature 1..6645: note = Description of Artificial Sequence: Synthetic coding sequence
  source 1..6645: mol_type = other DNA
atggccaccaggagcagcagaagagagagccggctgcccttcctgttcaccctggtggccctgctgcccccaggggccctgtgtgaggtgtggacccagaggctgcacggcggcagcgcccccctgccccaggaccggggcttcctggtggtgcagggcgacccccgggagctgcggctgtgggcccggggagatgcccggggggccagcagagcagatgagaagcccctgcggaggaagaggtctgctgccctgcagcctgagcccatcaaggtgtatggccaggtgtccctgaatgacagccacaaccagatggtggtgcactgggccggggagaagagcaatgtgattgtggccctggcccgggacagcctggccctggcccggcccaagagcagtgatgtgtatgtgtcctatgactatggcaagagcttcaagaagatcagtgacaagctgaactttggcctgggcaacagaagtgaggccgtcatcgcccagttctaccacagccctgctgacaacaagcgctacatctttgctgatgcctatgcccagtacctgtggatcacctttgacttctgcaacaccctgcagggcttcagcatccccttccgggctgctgacctgctgctgcacagcaaggccagcaacctgctgctgggctttgacaggagccaccccaacaagcagctgtggaagagtgatgactttggccagacctggatcatgatccaggagcacgtgaagagcttctcctggggcatcgacccctatgacaagcccaacaccatctacatcgagagacatgagcccagcggctacagcaccgtcttccgcagcacagacttcttccagagccgggagaaccaggaggtgatcctggaggaggtgcgggacttccagctgcgggacaagtacatgtttgccaccaaggtggtgcacctgctgggcagcgagcagcagagctctgtgcagctgtgggtgtcctttggaaggaagcccatgagagctgcccagtttgtgaccaggcaccccatcaatgagtactacatcgcagatgccagcgaggaccaggtgtttgtgtgtgtgagccacagcaacaacagaaccaacctgtacatcagcgaggccgagggcctgaagttcagcctgagcctggagaatgtgctgtactacagccctgggggcgccggcagtgacaccctggtgcgctactttgccaatgagccctttgctgacttccaccgggtggagggcctgcagggcgtgtacatcgccaccctcatcaatggctccatgaatgaggagaacatgaggagcgtcatcacctttgacaagggcggcacctgggagttcctgcaggccccagccttcaccggctatggagagaagatcaactgtgagctgagccagggctgcagcctgcacctggcccagaggctgagccagctgctgaacctgcagctgcggaggatgcccatcctgagcaaggagagcgcccctggcctcatcatcgccactggatctgtgggcaagaacctggccagcaagaccaacgtgtacatcagcagcagcgctggggcccgctggagggaggccctgcccggcccccactactacacctggggagaccatggaggcatcatcacagccatcgcccagggcatggagaccaatgagctgaagtacagcaccaatgaaggagagacctggaagaccttcatcttcagcgagaagcctgtgtttgtgtatggcctgctgacagagcccggggagaagagcacagtgttcaccatcttcggcagcaacaaggaaaatgtgcacagctggctgatcctgcaggtgaatgccacagatgccctgggcgtgccctgcacagaaaatgactacaagctgtggagccccagtgatgaaagaggaaatgaatgtctgctgggccacaagacagtgttcaagaggaggacccctcatgccacctgcttcaacggggaggactttgacaggcctgtggtggtgagcaactgcagctgcacccgggaggactatgaatgtgactttggcttcaagatgtctgaggacctgagcctggaggtgtgtgtgcctgaccctgagttcagcggcaagagctacagcccccctgtgccctgccctgtgggcagcacctacagaaggacccggggctacaggaagatcagcggggacacctgcagcggaggagatgtggaggcccggctggagggggagctggtgccctgccccctggccgaggagaatgagttcatcctgtatgctgtgaggaagagcatctaccgctatgacctggccagcggggccacagagcagctgcccctgaccggcctgcgggctgctgtggccctggactttgattatgagcacaactgcctgtactggagcgacctggccctggatgtgatccagaggctgtgcctgaatggcagcacaggccaggaggtgatcatcaacagcggcctggagaccgtggaggccctggcctttgagcccctgagccagctgctgtactgggtggatgctggcttcaagaagattgaggtggccaacccagatggagacttccggctgaccatcgtgaacagctctgtgctggaccggccccgggccctggtgctggtgccccaggagggcgtgatgttctggacagactggggagacctgaagccaggcatctaccgcagcaacatggatggcagcgctgcctaccacctggtgtctgaagatgtgaagtggcccaacggcatctctgtggatgaccagtggatctactggacagatgcctacctggagtgcatcgagcgcatcaccttcagcggccagcagaggagcgtcatcctggacaacctgccccacccctatgccatcgctgtgttcaagaatgagatctactgggatgactggagccagctgagcatcttccgggccagcaagtacagcggcagccagatggagatcctggccaaccagctgaccggcctgatggacatgaagatcttctacaagggcaagaacacaggcagcaatgcctgtgtgccccggccctgcagcctgctgtgcctgcccaaggccaacaacagccgcagctgccgctgcccagaagatgtgagcagctctgtgctgcccagcggggacctgatgtgtgactgcccccagggctaccagctgaagaacaacacctgtgtgaagcaggagaacacctgcctgaggaaccagtaccgctgcagcaatggaaactgcatcaacagcatctggtggtgtgactttgacaatgactgtggggacatgtctgatgagaggaactgccccaccaccatctgtgacctggacacccagttccgctgccaggagagcggcacctgcatccccctgagctacaagtgtgacctggaggatgactgtggggacaacagtgatgagagccactgtgagatgcaccagtgccgcagtgatgagtacaactgcagcagcggcatgtgcatccgcagctcctgggtgtgtgatggagacaatgactgccgggactggagcgatgaggccaactgcacagccatctaccacacctgtgaggccagcaacttccagtgcagaaatggccactgcatcccccagcgctgggcctgtgatggagacacagactgccaggacggcagtgatgaggaccctgtgaactgtgagaagaagtgcaatggcttccgctgccccaacggcacctgcatccccagcagcaagcactgtgatggcctgcgggactgcagtgatggcagtgatgagcagcactgtgagcccctgtgcacccacttcatggactttgtgtgcaagaaccggcagcagtgcctcttccacagcatggtgtgtgatggcatcatccagtgcagagatggcagtgatgaagatgctgcctttgctggctgcagccaggaccctgagttccacaaggtgtgtgatgaatttggcttccagtgccagaatggagtgtgcatcagcctcatctggaagtgtgatggcatggatgactgtggggactacagtgatgaggccaactgtgagaaccccacagaggcccccaactgcagccgctacttccagttccgctgtgaaaatggccactgcatccccaaccgctggaagtgtgacagagaaaatgactgtggggactggagcgatgagaaggactgtggggacagccacatcctgcccttcagcaccccaggccccagcacctgcctgcccaactactaccgctgcagcagcggcacctgtgtgatggacacctgggtgtgtgatggctacagagactgtgctgatggcagtgatgaggaggcctgccccctgctggccaacgtgacagctgccagcacccccacccagctgggccgctgtgacagatttgaatttgagtgccaccagcccaagacctgcatccccaactggaagagatgtgatggccaccaggactgccaggacggcagagatgaggccaactgccccacccacagcaccctgacctgcatgagccgggagttccagtgtgaagatggagaggcctgcatcgtgctgtctgagcgctgtgatggcttcctggactgcagtgatgaaagtgatgagaaggcctgcagtgatgagctgactgtgtacaaggtgcagaacctgcagtggacagctgacttctctggagatgtgaccctgacctggatgaggcccaagaagatgcccagcgccagctgtgtgtacaacgtgtactacagagtggtgggggagagcatctggaagaccctggagacccacagcaacaagaccaacacagtgctgaaggtgctgaagccagacaccacctaccaggtgaaggtgcaggtgcagtgcctgagcaaggcccacaacaccaatgactttgtgaccctgcggaccccagagggcctgcctgatgcccccaggaacctgcagctgagcctgccccgggaggccgagggcgtgattgtgggccactgggccccacccatccacacccacggcctcatccgggagtacatcgtggagtacagccgcagcggcagcaagatgtgggccagccagagagctgccagcaacttcacagagatcaagaacctgctggtgaacaccctgtacacagtgcgggtggccgctgtgaccagccggggcatcggcaactggagcgacagcaagagcatcaccaccatcaagggcaaggtgattcctcctccagacatccacatcgacagctatggagagaactacctgtccttcaccctgaccatggagagtgacatcaaggtgaatggctacgtggtgaacctcttctgggcctttgacacccacaagcaggagaggaggaccctgaacttccggggcagcatcctgagccacaaggtgggcaacctgacagcccacaccagctatgagatcagcgcctgggccaagacagacctgggggacagccccctggcctttgaacatgtgatgacccggggcgtgcggcccccagcccccagcctgaaggccaaggccatcaaccagacagctgtggagtgcacctggacaggccccagaaatgtggtgtatggcatcttctacgccaccagcttcctggacctgtacagaaaccccaagagcctgaccaccagcctgcacaacaagacagtcatcgtgtccaaggatgagcagtacctgttcctggtgcgggtggtggtgccctaccagggccccagcagtgactatgtggtggtgaagatgatcccagacagccggctgccccccaggcacctgcacgtggtgcacacaggcaagacctctgtggtgatcaagtgggagagcccctatgacagcccagaccaggacctgctgtatgctgtggccgtgaaggacctgatcaggaagacagacaggagctacaaggtgaagagcaggaacagcacagtggagtacaccctgaacaagctggagcccggcggcaagtaccacatcatcgtgcagctgggcaacatgagcaaggacagcagcatcaagatcaccaccgtgtccctgagcgccccagatgccctgaagatcatcacagaaaatgaccacgtgctgctcttctggaagagcctggccctgaaggagaagcacttcaatgaaagccggggctatgagatccacatgtttgacagcgccatgaacatcacagcctacctgggcaacaccacagacaacttcttcaagatcagcaacctgaagatgggccacaactacaccttcaccgtgcaggcccgctgcctgtttggaaaccagatctgtggggagcccgccatcctgctgtatgatgagctgggcagcggggctgatgccagcgccacccaggccgcccggagcacagatgtggccgctgtggtggtgcccatcctcttcctgatcctgctgagcctgggcgtgggctttgccatcctgtacaccaagcaccggcggctgcagagcagcttcaccgcctttgccaacagccactacagcagccggctgggcagcgccatcttcagcagtggagatgacctgggggaggatgatgaagatgcccccatgatcaccggcttcagtgatgatgtgcccatggtgattgcctag

SEQ ID NO: 171142 - DNA, 3507 bp, synthetic construct
  misc_feature 1..3507: note = Description of Artificial Sequence: Synthetic coding sequence
  source 1..3507: mol_type = other DNA
atgggcaaggtgggcgctgggggcggcagccaggcccggctgagcgccctgctggccggggccggcctgctgatcctgtgtgcccctggggtgtgtggcggcggcagctgctgccccagcccccaccccagcagcgcccccaggtctgccagcaccccccggggcttcagccaccagggccggcccggccgggccccagccacccccctgcccctggtggtgcggcccctcttctctgtggcccctggggaccgggccctgagcctggagcgggcccggggcactggagcctccatggctgtggccgcccggtctggaagaagaagaagaagtggagctgaccaggagaaggccgagcggggggagggcgccagccgcagcccccggggcgtgctgagagatggcggccagcaggagcccggcacccgggagcgggaccctgacaaggccacccgcttcaggatggaggagctgcggctgaccagcaccacctttgccctgaccggggacagcgcccacaaccaggccatggtgcactggagcggccacaacagcagcgtcatcctgatcctgaccaagctgtatgactacaacctgggcagcatcacagagagcagcctgtggaggagcacagattatggcaccacctatgagaagctgaatgacaaggtgggcctgaagaccatcctgagctacctgtatgtgtgccccaccaacaagaggaagatcatgctgctgacagatcctgagattgagagcagcctgctgatcagcagtgatgagggcgccacctaccagaagtaccgcctgaacttctacatccagagcctgctcttccaccccaagcaggaggactggatcctggcctacagccaggaccagaagctgtacagcagcgctgagtttggccgccgctggcagctgatccaggagggcgtggtgcccaaccgcttctactggagcgtgatgggcagcaacaaggagccagacctggtgcacctggaggccaggacagtggatggccacagccactacctgacctgcaggatgcagaactgcacagaggccaacagaaaccagcccttccctggctacatcgaccctgacagcctcatcgtgcaggaccactacgtgtttgtgcagctgaccagcggcggccggccccactactacgtgtcctacagaagaaatgcctttgcccagatgaagctgcccaagtatgccctgcccaaggacatgcacgtgatcagcacagatgagaaccaggtgtttgctgctgtgcaggagtggaaccagaatgacacctacaacctgtacatcagtgacacccggggcgtgtacttcaccctggccctggagaatgtgcagagcagccggggccctgagggcaacatcatgattgacctgtatgaggtggccggcatcaagggcatgttcctggccaacaagaagattgacaaccaggtgaagaccttcatcacctacaacaagggccgggactggaggctgctgcaggccccagacacagacctgcggggggaccctgtgcactgcctgctgccctactgcagcctgcacctgcacctgaaggtgtctgagaacccctacaccagcggcatcatcgccagcaaggacacagcccccagcatcatcgtggccagcggcaacatcggcagcgagctgagtgacacagacatctccatgtttgtgtccagtgatgctggcaacacctggaggcagatctttgaggaggagcacagcgtgctgtacctggaccagggcggcgtgctggtggccatgaagcacaccagcctgcccatccgccacctgtggctgagctttgatgagggccgctcctggagcaagtacagcttcaccagcatccccctgtttgtggatggagtgctgggggagcctggagaggagaccctcatcatgacagtgtttggccacttcagccacaggtctgagtggcagctggtgaaggtggactacaagagcatctttgacagaagatgtgccgaggaggactaccggccctggcagctgcacagccagggcgaggcctgcatcatgggcgccaagaggatctacaagaagaggaagtctgagaggaagtgcatgcagggcaagtatgctggggccatggagagcgagccctgtgtgtgcacagaggccgactttgactgtgactatggctatgaaagacacagcaatggccagtgcctgcctgccttctggttcaaccccagcagcctgagcaaggactgcagcctgggccagagctacctgaacagcacaggctacaggaaggtggtgagcaacaactgcacagatggagtgcgggagcagtacacagccaagccccagaagtgccctgggaaggccccccggggcctgcgcatcgtgacagcagatggcaagctgacagctgagcagggccacaacgtgaccctgatggtgcagctggaggagggagatgtgcagaggaccctcatccaggtggactttggagatggcattgctgtgtcctatgtgaacctgagctccatggaggatggcatcaagcacgtgtaccagaatgtgggcatcttccgggtgacagtgcaggtggacaacagcctgggcagtgacagcgctgtgctgtacctgcacgtgacctgccccctggagcacgtgcacctgagcctgccctttgtgaccaccaagaacaaggaggtgaatgccacagctgtgctgtggcccagccaggtgggcaccctgacctacgtgtggtggtacggcaacaacacagagcccctcatcaccctggagggcagcatctccttccgcttcaccagcgagggcatgaacaccatcaccgtgcaggtgtctgctggaaatgccatcctgcaggacaccaagaccatcgctgtgtatgaggagttccgcagcctgcggctgtccttcagccccaacctggatgactacaacccagacatccctgagtggaggcgggacatcggccgggtcatcaagaagagcctggtggaggccactggagtgcccggccagcacatcctggtggccgtgctgcccggcctgcccaccacagctgagctgtttgtgctgccctaccaggaccctgctggggagaacaagaggagcacagatgacctggagcagatcagcgagctgctgatccacaccctgaaccagaacagcgtgcactttgagctgaagccaggagtgcgggtgctggtgcatgctgcccacctgacagctgcccccctggtggacctgacccccacccacagcggcagcgccatgctgatgctgctgtctgtggtgtttgtgggcctggccgtgtttgtgatctacaagttcaagagaagagtggccctgcccagcccccccagccccagcacccagcccggggacagcagcctgcggctgcagagggcccggcatgccaccccacccagcacccccaagaggggcagcgctggggcccagtatgccatctag

SEQ ID NO: 171143 - DNA, 3597 bp, synthetic construct
  misc_feature 1..3597: note = Description of Artificial Sequence: Synthetic coding sequence
  source 1..3597: mol_type = other DNA
atgggcaaggtgggcgctgggggcggcagccaggcccggctgagcgccctgctggccggggccggcctgctgatcctgtgtgcccctggggtgtgtggcggcggcagctgctgccccagcccccaccccagcagcgcccccaggtctgccagcaccccccggggcttcagccaccagggccggcccggccgggccccagccacccccctgcccctggtggtgcggcccctcttctctgtggcccctggggaccgggccctgagcctggagcgggcccggggcactggagcctccatggctgtggccgcccggtctggaagaagaagaagaagtggagctgaccaggagaaggccgagcggggggagggcgccagccgcagcccccggggcgtgctgagagatggcggccagcaggagcccggcacccgggagcgggaccctgacaaggccacccgcttcaggatggaggagctgcggctgaccagcaccacctttgccctgaccggggacagcgcccacaaccaggccatggtgcactggagcggccacaacagcagcgtcatcctgatcctgaccaagctgtatgactacaacctgggcagcatcacagagagcagcctgtggaggagcacagattatggcaccacctatgagaagctgaatgacaaggtgggcctgaagaccatcctgagctacctgtatgtgtgccccaccaacaagaggaagatcatgctgctgacagatcctgagattgagagcagcctgctgatcagcagtgatgagggcgccacctaccagaagtaccgcctgaacttctacatccagagcctgctcttccaccccaagcaggaggactggatcctggcctacagccaggaccagaagctgtacagcagcgctgagtttggccgccgctggcagctgatccaggagggcgtggtgcccaaccgcttctactggagcgtgatgggcagcaacaaggagccagacctggtgcacctggaggccaggacagtggatggccacagccactacctgacctgcaggatgcagaactgcacagaggccaacagaaaccagcccttccctggctacatcgaccctgacagcctcatcgtgcaggaccactacgtgtttgtgcagctgaccagcggcggccggccccactactacgtgtcctacagaagaaatgcctttgcccagatgaagctgcccaagtatgccctgcccaaggacatgcacgtgatcagcacagatgagaaccaggtgtttgctgctgtgcaggagtggaaccagaatgacacctacaacctgtacatcagtgacacccggggcgtgtacttcaccctggccctggagaatgtgcagagcagccggggccctgagggcaacatcatgattgacctgtatgaggtggccggcatcaagggcatgttcctggccaacaagaagattgacaaccaggtgaagaccttcatcacctacaacaagggccgggactggaggctgctgcaggccccagacacagacctgcggggggaccctgtgcactgcctgctgccctactgcagcctgcacctgcacctgaaggtgtctgagaacccctacaccagcggcatcatcgccagcaaggacacagcccccagcatcatcgtggccagcggcaacatcggcagcgagctgagtgacacagacatctccatgtttgtgtccagtgatgctggcaacacctggaggcagatctttgaggaggagcacagcgtgctgtacctggaccagggcggcgtgctggtggccatgaagcacaccagcctgcccatccgccacctgtggctgagctttgatgagggccgctcctggagcaagtacagcttcaccagcatccccctgtttgtggatggagtgctgggggagcctggagaggagaccctcatcatgacagtgtttggccacttcagccacaggtctgagtggcagctggtgaaggtggactacaagagcatctttgacagaagatgtgccgaggaggactaccggccctggcagctgcacagccagggcgaggcctgcatcatgggcgccaagaggatctacaagaagaggaagtctgagaggaagtgcatgcagggcaagtatgctggggccatggagagcgagccctgtgtgtgcacagaggccgactttgactgtgactatggctatgaaagacacagcaatggccagtgcctgcctgccttctggttcaaccccagcagcctgagcaaggactgcagcctgggccagagctacctgaacagcacaggctacaggaaggtggtgagcaacaactgcacagatggagtgcgggagcagtacacagccaagccccagaagtgccctgggaaggccccccggggcctgcgcatcgtgacagcagatggcaagctgacagctgagcagggccacaacgtgaccctgatggtgcagctggaggagggagatgtgcagaggaccctcatccaggtggactttggagatggcattgctgtgtcctatgtgaacctgagctccatggaggatggcatcaagcacgtgtaccagaatgtgggcatcttccgggtgacagtgcaggtggacaacagcctgggcagtgacagcgctgtgctgtacctgcacgtgacctgccccctggagcacgtgcacctgagcctgccctttgtgaccaccaagaacaaggaggtgaatgccacagctgtgctgtggcccagccaggtgggcaccctgacctacgtgtggtggtacggcaacaacacagagcccctcatcaccctggagggcagcatctccttccgcttcaccagcgagggcatgaacaccatcaccgtgcaggtgtctgctggaaatgccatcctgcaggacaccaagaccatcgctgtgtatgaggagttccgcagcctgcggctgtccttcagccccaacctggatgactacaacccagacatccctgagtggaggcgggacatcggccgggtcatcaagaagagcctggtggaggccactggagtgcccggccagcacatcctggtggccgtgctgcccggcctgcccaccacagctgagctgtttgtgctgccctaccaggaccctgctggggagaacaagaggagcacagatgacctggagcagatcagcgagctgctgatccacaccctgaaccagaacagcgtgcactttgagctgaagccaggagtgcgggtgctggtgcatgctgcccacctgacagctgcccccctggtggacctgacccccacccacagcggcagcgccatgctgatgctgctgtctgtggtgtttgtgggcctggccgtgtttgtgatctacaagttcaagaggaagatccctggcatcaacgtgtatgcccagatgcagaatgagaaggagcaggagatgatcagccctgtgagccacagcgagagccggcccaacgtgccccagacagagctgcggcggcccggccagctgattgatgagaaggtggagagccagctgattggcagcatcagcatcgtggccgagaaccagagcaccaaggagatccccacctacgtgaatgtgtag

SEQ ID NO: 171144 - DNA, 2145 bp, synthetic construct
  misc_feature 1..2145: note = Description of Artificial Sequence: Synthetic coding sequence
  source 1..2145: mol_type = other DNA
atgattgacctgtatgaggtggccggcatcaagggcatgttcctggccaacaagaagattgacaaccaggtgaagaccttcatcacctacaacaagggccgggactggaggctgctgcaggccccagacacagacctgcggggggaccctgtgcactgcctgctgccctactgcagcctgcacctgcacctgaaggtgtctgagaacccctacaccagcggcatcatcgccagcaaggacacagcccccagcatcatcgtggccagcggcaacatcggcagcgagctgagtgacacagacatctccatgtttgtgtccagtgatgctggcaacacctggaggcagatctttgaggaggagcacagcgtgctgtacctggaccagggcggcgtgctggtggccatgaagcacaccagcctgcccatccgccacctgtggctgagctttgatgagggccgctcctggagcaagtacagcttcaccagcatccccctgtttgtggatggagtgctgggggagcccggggaggagaccctcatcatgacagtgtttggccacttcagccacaggtctgagtggcagctggtgaaggtggactacaagagcatctttgaccggcgctgtgccgaggaggactaccggccctggcagctgcacagccagggcgaggcctgcatcatgggcgccaagaggatctacaagaagaggaagtctgagaggaagtgcatgcagggcaagtatgctggggccatggagagcgagccctgtgtgtgcacagaagctgactttgactgtgactatggctatgagcggcacagcaatggccagtgcctgcctgccttctggttcaaccccagcagcctgagcaaggactgcagcctgggccagagctacctgaacagcacaggctacaggaaggtggtgagcaacaactgcacagatggagtgcgggagcagtacacagccaagccccagaagtgccctgggaaggccccccggggcctgagaattgtgacagcagatggcaagctgacagctgagcagggccacaacgtgaccctgatggtgcagctggaggagggagatgtgcagaggaccctcatccaggtggactttggagatggcattgctgtgtcctatgtgaacctgagctccatggaggatggcatcaagcacgtgtaccagaatgtgggcatcttccgggtgacagtgcaggtggacaacagcctgggcagtgacagcgctgtgctgtacctgcacgtgacctgccccctggagcacgtgcacctgagcctgccctttgtgaccaccaagaacaaggaggtgaatgccacagctgtgctgtggcccagccaggtgggcaccctgacctacgtgtggtggtacggcaacaacacagagcccctcatcaccctggagggcagcatctccttccgcttcaccagcgagggcatgaacaccatcaccgtgcaggtgtctgctggaaatgccatcctgcaggacaccaagaccatcgctgtgtatgaggagttccgcagcctgcggctgtccttcagccccaacctggatgactacaacccagacatccctgagtggaggcgggacatcggccgggtcatcaagaagagcctggtggaggccaccggggtgcccggccagcacatcctggtggccgtgctgcccggcctgcccaccacagctgagctgtttgtgctgccctaccaggaccctgctggggagaacaagaggagcacagatgacctggagcagatcagcgagctgctgatccacaccctgaaccagaacagcgtgcactttgagctgaagccaggagtgcgggtgctggtgcacgccgcccacctgacagctgcccccctggtggacctgacccccacccacagcggcagcgccatgctgatgctgctgtctgtggtgtttgtgggcctggccgtgtttgtgatctacaagttcaagaggaagatccctggcatcaacgtgtatgcccagatgcagaatgagaaggagcaggagatgatcagccctgtgagccacagcgagagccggcccaacgtgccccagacagagctgcggcggcccggccagctgattgatgagaaggtggagagccagctgattggagagtag

SEQ ID NO: 171145 - DNA, 642 bp, synthetic construct
  misc_feature 1..642: note = Description of Artificial Sequence: Synthetic coding sequence
  source 1..642: mol_type = other DNA
tgactggatgactacaacccagacatccctgagtggaggcgggacatcggccgggtcatcaagaagagcctggtggaggccaccggggtgcccggccagcacatcctggtggccgtgctgcccggcctgcccaccacagctgagctgtttgtgctgccctaccaggaccctgctggggagaacaagaggagcacagatgacctggagcagatcagcgagctgctgatccacaccctgaaccagaacagcgtgcactttgagctgaagccaggagtgcgggtgctggtgcacgccgcccacctgacagctgcccccctggtggacctgacccccacccacagcggcagcgccatgctgatgctgctgtctgtggtgtttgtgggcctggccgtgtttgtgatctacaagttcaagaggaagatccctggcatcaacgtgtatgcccagatgcagaatgagaaggagcaggagatgatcagccctgtgagccacagcgagagccggcccaacgtgccccagacagagctgcggcggcccggccagctgattgatgagaaggtggagagccagctgattggcagcatcagcatcgtggccgagaaccagagcaccaaggagatccccacctacgtgaatgtgtag

SEQ ID NO: 171146 - DNA, 3009 bp, synthetic construct
  misc_feature 1..3009: note = Description of Artificial Sequence: Synthetic coding sequence
  source 1..3009: mol_type = other DNA
atgggcaaggtgctggagagcagcctgtggaggagcagtgactttggcaccagctacaccaagctgaccctgcagcccggggtgaccaccgtcatcgacaacttctacatctgccccaccaacaagaggaaggtgatcctggtgagcagcagcctgagtgaccgggaccagagcctcttcctgtctgcagatgagggcgccaccttccagaagcagcccatccccttctttgtggagaccctcatcttccaccccaaggaggaggacaaggtgctggcctacaccaaggagagcaagctgtatgtgtccagtgacctgggcaagaagtggaccctgctgcaggagcgggtgaccaaggaccacgtgttctggagcgtgtctggagtggatgctgaccctgacctggtgcacgtggaggcccaggacctgggcggggacttccgctacgtgacctgtgccatccacaactgcagcgagaagatgctgacagccccctttgctggccccatcgaccacggcagcctgactgtgcaggatgactacatcttcttcaaggccaccagcgccaaccagaccaagtactacgtgtcctacagaagaaatgaatttgtgctgatgaagctgcccaagtatgccctgcccaaggacctgcagatcatcagcacagatgagagccaggtgtttgtggccgtgcaggagtggtaccagatggacacctacaacctgtaccagagcgacccccggggcgtgcgctatgccctggtgctgcaggatgtgcgcagcagccggcaggccgaggagagcgtgctgattgacatcctggaggtgcggggcgtgaagggcgtcttcctggccaaccagaagattgatggcaaggtgatgaccctcatcacctacaacaagggccgggactgggactacctgcggccccccagcatggacatgaatggcaagcccaccaactgcaagcccccagactgccacctgcacctgcacctgcgctgggccgacaacccctacgtgtctggcaccgtgcacaccaaggacacagcccctggcctcatcatgggcgccggcaacctgggcagccagctggtggagtacaaggaggagatgtacatcaccagtgactgtggccacacctggaggcaggtgtttgaggaggagcaccacatcctgtacctggaccatggaggagtgattgtggccatcaaggacaccagcatccccctgaagatcctgaagttctctgtggatgagggcctgacctggagcacccacaacttcaccagcacctctgtgtttgtggatggcctgctgtctgagcctggagatgagaccctggtgatgacagtgtttggccacatctccttcagaagtgactgggagctggtgaaggtggacttccggcccagcttcagccggcagtgtggggaggaggactacagctcctgggagctgagcaacctgcagggcgaccgctgcatcatgggccagcagaggagcttcaggaagaggaagagcacctcctggtgcatcaagggccgctccttcaccagcgccctgaccagccgggtgtgtgagtgccgggacagcgacttcctgtgtgactatggctttgagaggagcagcagcagcgagagcagcaccaacaagtgcagcgccaacttctggttcaaccccctgagccccccagatgactgtgccctgggccagacctacaccagcagcctgggctacaggaaggtggtgtccaatgtgtgtgagggcggcgtggacatgcagcagagccaggtgcagctgcagtgccccctgaccccaccccggggcctgcaggtgtccatccagggcgaggccgtggccgtgcggcctggagaagatgtgctgtttgtggtgcggcaggagcagggagatgtgctgaccaccaagtaccaggtggacctgggagatggcttcaaggccatgtatgtgaacctgaccctgaccggggagcccatccgccacagatatgagagccctggcatctacagagtgtctgtgcgggcagaaaatacagctggccatgatgaagctgtgctgtttgtgcaggtgaacagccccctgcaggccctgtacctggaggtggtgcctgtgattggcctgaaccaggaggtgaacctgacagctgtgctgctgcccctgaaccccaacctgaccgtcttctactggtggattggccacagcctgcagcccctgctgagcctggacaacagcgtgaccacccgcttcagtgacacaggagatgtgcgggtgacagtgcaggccgcctgtggcaacagcgtgctgcaggacagccgggtgctgcgggtgctggaccagttccaggtgatgcccctgcagttcagcaaggagctggatgcctacaaccccaacaccccagagtggagagaagatgtgggcctggtggtgacccggctgctgagcaaggagacctctgtgccccaggagctgctggtgacagtggtgaagccaggcctgcccaccctggccgacctgtatgtgctgctgcccccaccccggcccaccaggaagaggagcctgagcagtgacaagaggctggccgccatccagcaggtgctgaatgcccagaagatctccttcctgctgcggggcggcgtgcgggtgctggtggccctgcgggacacaggaactggagctgagcagctgggcggcggcggcggctactgggccgtggtggtgctgtttgtgattggcctgtttgctgctggggccttcatcctgtacaagttcaagagcaggaagaggcctggccgcacagtgtatgcccagatgcacaatgagaaggagcaggagatgaccagccctgtgagccacagtgaagatgtgcagggcgctgtgcagggcgaggagttcattgatgatgacctggacagccagaccctgggcaaccacagcggcgtggtgctgagcatcaacagccgggagatgcacagctacctggtgtcctag

SEQ ID NO: 171147 - DNA, 3480 bp, synthetic construct
  misc_feature 1..3480: note = Description of Artificial Sequence: Synthetic coding sequence
  source 1..3480: mol_type = other DNA
atggcccaccggggccccagccgggccagcaaaggacctggccccacagcccgggcccccagccctggggcccctcctccacccaggagccccaggagccggcccctgctgctgctgctgctgctgctgggcgcctgtggggctgctggccgcagccctgagcccggccgcctgggcccccacgcccagctgaccagggtgcccaggagccccccagctggccgggcagagcccggcggcggggaggaccggcaggcccggggcacagagcccggggcccctggccccagccctggccctgcccctggccctggagaagatggagccccagctgctggctaccgccgctgggagcgggccgcccccctggccggcgtggccagccgggcccaggtgtccctcatcagcaccagctttgtgctgaagggagatgccacccacaaccaggccatggtgcactggacaggagagaacagcagcgtcatcctgatcctgaccaagtactaccacgccgacatgggcaaggtgctggagagcagcctgtggaggagcagtgactttggcaccagctacaccaagctgaccctgcagcccggggtgaccaccgtcatcgacaacttctacatctgccccaccaacaagaggaaggtgatcctggtgagcagcagcctgagtgaccgggaccagagcctcttcctgtctgcagatgagggcgccaccttccagaagcagcccatccccttctttgtggagaccctcatcttccaccccaaggaggaggacaaggtgctggcctacaccaaggagagcaagctgtatgtgtccagtgacctgggcaagaagtggaccctgctgcaggagcgggtgaccaaggaccacgtgttctggagcgtgtctggagtggatgctgaccctgacctggtgcacgtggaggcccaggacctgggcggggacttccgctacgtgacctgtgccatccacaactgcagcgagaagatgctgacagccccctttgctggccccatcgaccacggcagcctgactgtgcaggatgactacatcttcttcaaggccaccagcgccaaccagaccaagtactacgtgtcctacagaagaaatgaatttgtgctgatgaagctgcccaagtatgccctgcccaaggacctgcagatcatcagcacagatgagagccaggtgtttgtggccgtgcaggagtggtaccagatggacacctacaacctgtaccagagcgacccccggggcgtgcgctatgccctggtgctgcaggatgtgcgcagcagccggcaggccgaggagagcgtgctgattgacatcctggaggtgcggggcgtgaagggcgtcttcctggccaaccagaagattgatggcaaggtgatgaccctcatcacctacaacaagggccgggactgggactacctgcggccccccagcatggacatgaatggcaagcccaccaactgcaagcccccagactgccacctgcacctgcacctgcgctgggccgacaacccctacgtgtctggcaccgtgcacaccaaggacacagcccctggcctcatcatgggcgccggcaacctgggcagccagctggtggagtacaaggaggagatgtacatcaccagtgactgtggccacacctggaggcaggtgtttgaggaggagcaccacatcctgtacctggaccatggaggagtgattgtggccatcaaggacaccagcatccccctgaagatcctgaagttctctgtggatgagggcctgacctggagcacccacaacttcaccagcacctctgtgtttgtggatggcctgctgtctgagcctggagatgagaccctggtgatgacagtgtttggccacatctccttcagaagtgactgggagctggtgaaggtggacttccggcccagcttcagccggcagtgtggggaggaggactacagctcctgggagctgagcaacctgcagggcgaccgctgcatcatgggccagcagaggagcttcaggaagaggaagagcacctcctggtgcatcaagggccgctccttcaccagcgccctgaccagccgggtgtgtgagtgccgggacagcgacttcctgtgtgactatggctttgagaggagcagcagcagcgagagcagcaccaacaagtgcagcgccaacttctggttcaaccccctgagccccccagatgactgtgccctgggccagacctacaccagcagcctgggctacaggaaggtggtgtccaatgtgtgtgagggcggcgtggacatgcagcagagccaggtgcagctgcagtgccccctgaccccaccccggggcctgcaggtgtccatccagggcgaggccgtggccgtgcggcctggagaagatgtgctgtttgtggtgcggcaggagcagggagatgtgctgaccaccaagtaccaggtggacctgggagatggcttcaaggccatgtatgtgaacctgaccctgaccggggagcccatccgccacagatatgagagccctggcatctacagagtgtctgtgcgggcagaaaatacagctggccatgatgaagctgtgctgtttgtgcaggtgaacagccccctgcaggccctgtacctggaggtggtgcctgtgattggcctgaaccaggaggtgaacctgacagctgtgctgctgcccctgaaccccaacctgaccgtcttctactggtggattggccacagcctgcagcccctgctgagcctggacaacagcgtgaccacccgcttcagtgacacaggagatgtgcgggtgacagtgcaggccgcctgtggcaacagcgtgctgcaggacagccgggtgctgcgggtgctggaccagttccaggtgatgcccctgcagttcagcaaggagctggatgcctacaaccccaacaccccagagtggagagaagatgtgggcctggtggtgacccggctgctgagcaaggagacctctgtgccccaggagctgctggtgacagtggtgaagccaggcctgcccaccctggccgacctgtatgtgctgctgcccccaccccggcccaccaggaagaggagcctgagcagtgacaagaggctggccgccatccagcaggtgctgaatgcccagaagatctccttcctgctgcggggcggcgtgcgggtgctggtggccctgcgggacacaggaactggagctgagcagctgggcggcggcggcggctactgggccgtggtggtgctgtttgtgattggcctgtttgctgctggggccttcatcctgtacaagttcaagaggaagaggcctggccgcacagtgtatgcccagatgcacaatgagaaggagcaggagatgaccagccctgtgagccacagtgaagatgtgcagggcgctgtgcagggcaaccacagcggcgtggtgctgagcatcaacagccgggagatgcacagctacctggtgtcctag

SEQ ID NO: 171148 - DNA, 594 bp, synthetic construct
  misc_feature 1..594: note = Description of Artificial Sequence: Synthetic coding sequence
  source 1..594: mol_type = other DNA
atgggagagaggaagatcttcaagaagaggaagccaggggcccagtgtgccctgggccgggaccacagcggctctgtggtgtctgagccctgtgtgtgtgccaactgggactttgaatgtgactatggctatgaaagacatggagagagccagtgtgtgcctgccttctggtacaacccagccagccccagcaaggactgcagcctgggccagagctacctgaacagcacaggctaccgccgcatcgtgagcaacaactgcacagatggcctgcgggagaagtacacagccaaggcccagatgtgccctgggaaggccccccggggcctgcacgtggtgaccacagatggccgcctggtggccgagcagggccacaatgccaccttcatcatcctgatggaggagggggacctgcagaggaccaacatccagctggactttggagatggcattgctgtgtcctatgccaacttcagccccattgaagatggcatcaagcacgtgtacaagtctgctggcatcttccaggtgacagcctatgcagagaacaacctgggcagtgacacagctgtgctcttcctgcacgtggtgtag

SEQ ID NO: 171149 - DNA, 3669 bp, synthetic construct
  misc_feature 1..3669: note = Description of Artificial Sequence: Synthetic coding sequence
  source 1..3669: mol_type = other DNA
atggaggccgccaggacagagaggcctgctggccggcctggggcccccctggtgaggacaggcctgctgctgctgagcacctgggtgctggccggggctgagatcacctgggatgccaccggcggccctggccggcctgctgccccagccagccggcccccagccctgagccccctgagccccagggctgtggccagccagtggccagaggagctggccagcgcccggcgggctgctgtgctgggcagaagagctggccctgagctgctgccccagcagggcggcggccggggcggggagatgcaggtggaggccggcggcaccagccctgctggggagcggcggggccggggcatcccagccccagccaagctgggcggggcccggcgcagccggcgggcccagccccccatcacccaggagagaggagatgcctgggccacagccccagcagatggcagccggggcagccggcccctggccaagggcagccgggaggaggtgaaggcccccagggctgggggcagcgctgctgaggacctgcggctgcccagcaccagctttgccctgactggagacagcgcccacaaccaggccatggtgcactggagcggccacaacagcagcgtcatcctgatcctgaccaagctgtatgacttcaacctgggctctgtgacagagagcagcctgtggaggagcacagattatggcaccacctatgagaagctgaatgacaaggtgggcctgaagacagtgctgagctacctgtatgtgaaccccaccaacaagaggaagatcatgctgctgagtgaccctgagatggagagcagcatcctgatcagcagtgatgaaggagccacctaccagaagtaccgcctgaccttctacatccagagcctgctcttccaccccaagcaggaggactgggtgctggcctacagcctggaccagaagctgtacagctccatggactttggaagacgctggcagctgatgcatgagcgcatcacccccaaccgcttctactggagcgtggccggcctggacaaggaggccgacctggtgcacatggaggtgaggaccacagatggctacgcccactacctgacctgccgcatccaggagtgtgccgagaccaccaggagcggcccctttgcccggagcattgacatcagcagcctggtggtgcaggatgagtacatcttcatccaggtgaccaccagcggccgggccagctactacgtgtcctaccgccgggaggcctttgcccagatcaagctgcccaagtacagcctgcccaaggacatgcacatcatcagcacagatgagaaccaggtgtttgctgctgtgcaggagtggaaccagaatgacacctacaacctgtacatcagtgacacccggggcatctacttcaccctggccatggagaacatcaagagcagccggggcctgatgggcaacatcatcatcgagctgtatgaggtggccggcatcaagggcatcttcctggccaacaagaaggtggatgaccaggtgaagacctacatcacctacaacaagggccgggactggaggctgctgcaggccccagatgtggacctgcggggcagccctgtgcactgcctgctgcccttctgcagcctgcacctgcacctgcagctgtctgagaacccctacagcagcggccgcatcagcagcaaggagacagcccctggcctggtggtggccactggaaacatcggccctgagctgagctacacagacattggagtcttcatcagcagtgatggcggcaacacctggaggcagatctttgatgaggagtacaacgtgtggttcctggactggggcggggccctggtggccatgaagcacacccccctgcctgtgcgccacctgtgggtgtcctttgatgagggccacagctgggacaagtatggcttcacctctgtgcccctgtttgtggatggagccctggtggaggccggcatggagacccacatcatgacagtgtttggccacttcagcctgcggtctgagtggcagctggtgaaggtggactacaagagcatcttcagccgccactgcaccaaggaggactaccagacctggcacctgctgaaccagggcgagccctgtgtgatgggagagaggaagatcttcaagaagaggaagccaggggcccagtgtgccctgggccgggaccacagcggctctgtggtgtctgagccctgtgtgtgtgccaactgggactttgaatgtgactatggctatgaaagacatggagagagccagtgtgtgcctgccttctggtacaacccagccagccccagcaaggactgcagcctgggccagagctacctgaacagcacaggctaccgccgcatcgtgagcaacaactgcacagatggcctgcgggagaagtacacagccaaggcccagatgtgccctgggaaggccccccggggcctgcacgtggtgaccacagatggccgcctggtggccgagcagggccacaatgccaccttcatcatcctgatggaggagggggacctgcagaggaccaacatccagctggactttggagatggcattgctgtgtcctatgccaacttcagccccattgaagatggcatcaagcacgtgtacaagtctgctggcatcttccaggtgacagcctatgcagagaacaacctgggcagtgacacagctgtgctcttcctgcacgtggtgtgccctgtggagcacgtgcacctgcgggtgccctttgtggccatccggaacaaggaggtgaacatctctgctgtggtgtggcccagccagctgggcaccctgacctacttctggtggtttggaaacagcaccaagcccctcatcaccctggacagcagcatctccttcaccttcctggccgagggcacagacaccatcaccgtgcaggtggccgctggaaatgccctgatccaggacaccaaggagattgctgtgcatgagtacttccagagccagctgctgtccttcagccccaacctggactaccacaacccagacatccctgagtggaggaaggacattggaaatgtcatcaagagggccctggtgaaggtgacctctgtgcctgaggaccagatcctgattgctgtgtttcctggcctgcccaccagcgctgagctgttcatcctgccccccaagaacctgacagaaagaagaaaaggaaatgaaggagacctggagcagatcgtggagaccctcttcaatgccctgaaccagaacctggtgcagtttgagctgaagccaggagtgcaggtgattgtgtatgtgacccagctgaccctggcccccctggtggacagcagcgctggccacagcagcagcgccatgctgatgctgctgtctgtggtgtttgtgggcctggccgtgttcctgatctacaagttcaagaggaagatcccctggatcaacatctatgcccaggtgcagcacgacaaggagcaggagatgattggctctgtgtcccagagtgaaaatgcccccaagatcaccctgagtgacttcacagagcctgaggagctgctggacaaggagctggacaccagggtgattggaggcatcgccaccatcgccaacagcgagagcaccaaggagatccccaactgcacctctgtgtag

SEQ ID NO: 171150 - DNA, 462 bp, synthetic construct
  misc_feature 1..462: note = Description of Artificial Sequence: Synthetic coding sequence
  source 1..462: mol_type = other DNA
gaaaacccctacagcagcggccgcatcagcagcaaggagacagcccctggcctggtggtggccaccggcaacatcggccctgagctgagctacacagacatcggggtcttcatcagcagtgatggcggcaacacctggaggcagatctttgatgaggagtacaacgtgtggttcctggactggggcggggccctggtggccatgaagcacacccccctgcctgtgcgccacctgtgggtgtcctttgatgagggccacagctgggacaagtatggcttcacctctgtgcccctgtttgtggatggagccctggtggaggccggcatggagacccacatcatgacagattatggctatgagcggcacggggagagccagtgtgtgcctgccttctggtacaacccagccagccccagcaaggactgcagcctgggccagagctacctgaacagcactggatag

SEQ ID NO: 171151 - DNA, 1410 bp, synthetic construct
  misc_feature 1..1410: note = Description of Artificial Sequence: Synthetic coding sequence
  source 1..1410: mol_type = other DNA
atgggcaccgtgcacgcccggagcctggagcccctgcccagcagcggccctgactttggaggcctgggggaggaggccgagtttgtggaggtggagcctgaggccaagcaggagatcctggagaacaaggatgtggtggtgcagcacgtgcactttgatggcctgggccgcaccaaggatgacatcatcatctgtgaaattggagatgtgttcaaggccaagaacctgattgaggtgatgaggaagagccatgaggcccgggagaagctgctgcggctgggcatcttccggcaggtggatgtgctgattgacacctgccagggagatgatgccctgcccaacggcctggatgtgacctttgaggtgacagagctgcggcggctgaccggcagctacaacaccatggtgggcaacaatgaaggctccatggtgctgggcctgaagctgcccaacctgctgggccgggcagagaaggtgaccttccagttctcctatggcaccaaggagaccagctatggcctgtccttcttcaagcccaggcctggcaactttgagaggaacttctctgtgaacctgtacaaggtgacaggccagttcccctggagcagcctgcgggagacagaccggggcatgtctgctgagtacagcttccccatctggaagaccagccacacagtgaagtgggagggcgtgtggagggagctgggctgcctgagcaggacagccagctttgctgtgaggaaggagagcggccacagcctgaagagcagcctgagccacgccatggtgattgacagcaggaacagcagcatcctgccccggcggggggccctgctgaaggtgaaccaggagctggccggctacacaggaggagatgtgtccttcatcaaggaggactttgagctgcagctgaacaagcagctgatctttgacagcgtcttcagcgccagcttctggggcggcatgctggtgcccatcggggacaagcccagcagcattgctgaccgcttctacctgggcggccccaccagcatccggggcttctccatgcacagcatcggcccccagagcgagggggactacctgggcggggaggcctactgggccggcggcctgcacctgtacacccccctgcccttccggcccggccagggcggctttggagagctgttccgcacccacttcttcctgaatgccggcaacctgtgcaacctgaactatggagagggccccaaggcccacatcaggaagctggccgagtgcatccgctggagctatggagctggcatcgtgctgcggctgggcaacatcgcccggctggagctgaactactgtgtgcccatgggcgtgcagacaggagaccgcatctgtgatggagtgcagtttggagctggcatccgcttcctgtag

SEQ ID NO: 171152 - DNA, 780 bp, synthetic construct
  misc_feature 1..780: note = Description of Artificial Sequence: Synthetic coding sequence
  source 1..780: mol_type = other DNA
atgtctgctgagtacagcttccccatctggaagaccagccacacagtgaagtgggagggcgtgtggagggagctgggctgcctgagcaggacagccagctttgctgtgaggaaggagagcggccacagcctgaagagcagcctgagccacgccatggtgattgacagcaggaacagcagcatcctgccccggcggggggccctgctgaaggtgaaccaggagctggccggctacacaggaggagatgtgtccttcatcaaggaggactttgagctgcagctgaacaagcagctgatctttgacagcgtcttcagcgccagcttctggggcggcatgctggtgcccatcggggacaagcccagcagcattgctgaccgcttctacctgggcggccccaccagcatccggggcttctccatgcacagcatcggcccccagagcgagggggactacctgggcggggaggcctactgggccggcggcctgcacctgtacacccccctgcccttccggcccggccagggcggctttggagagctgttccgcacccacttcttcctgaatgccggcaacctgtgcaacctgaactatggagagggccccaaggcccacatcaggaagctggccgagtgcatccgctggagctatggagctggcatcgtgctgcggctgggcaacatcgcccggctggagctgaactactgtgtgcccatgggcgtgcagacaggagaccgcatctgtgatggagtgcagtttggagctggcatccgcttcctgtag

SEQ ID NO: 171153 - DNA, 1425 bp, synthetic construct
  misc_feature 1..1425: note = Description of Artificial Sequence: Synthetic coding sequence
  source 1..1425: mol_type = other DNA
atggccagcggcggcggcggctgcagcgccagcgagcggctgcccccacccttccctggcctggagcctgagagcgagggcgctgctgggggcagcgagcctgaggccggggacagcgacacagaaggagaggacatcttcaccggggctgctgtggtgtccaagcaccagagccccaagatcaccaccagcctgctgcccatcaacaacggcagcaaagaaaatggcatccacgaggagcaggaccaggagccccaggacctgtttgctgatgccaccgtggagctgagcctggacagcacccagaacaaccagaagaaggtgctggccaagaccctcatcagcctgcccccccaggaggccaccaacagcagcaagccccagcccacctatgaggagctggaggaggaggagcaggaggaccagtttgacctgactgtgggcatcacagatcctgagaagattggagatggcatgaatgcctacgtggcctacaaggtgaccacccagaccagcctgcccctcttccgcagcaagcagtttgctgtgaagaggcgcttcagtgacttcctgggcctgtatgagaagctgtctgagaagcacagccagaatggcttcatcgtgcccccacctcctgagaagagcctgattggcatgaccaaggtgaaggtgggcaaggaggacagcagcagcgctgagttcctggagaagaggcgggccgccctggagcgctacctgcagagaattgtgaaccaccccaccatgctgcaggaccctgatgtgcgggagttcctggagaaggaggagctgcccagggctgtgggcacccagaccctgagcggggccggcctgctgaagatgttcaacaaggccacagatgctgtgtccaagatgaccatcaagatgaatgaaagtgacatctggtttgaggagaagctgcaggaggtggagtgtgaggagcagaggctgaggaagctgcatgctgtggtggagaccctggtgaaccacaggaaggagctggccctgaacacagcccagtttgccaagagcctggccatgctgggcagcagcgaggacaacacagccctgagccgggccctgagccagctggccgaggtggaggagaagattgagcagctgcaccaggagcaggccaacaatgacttcttcctgctggccgagctgctgagtgactacatccggctgctggccatcgtgcgctgggagagccgggtgacccagtatgagcgggactttgagcgcatcagcacagtggtgaggaaggaggtgatccgctttgagaaggagaagagcaaggacttcaagaaccacgtgatcaagtacctggagaccctgctgtacagccagcagcagctggccaagtactgggaggccttcctgcctgaggccaaggccatctcctag

SEQ ID NO: 171154 - DNA, 1569 bp, synthetic construct
  misc_feature 1..1569: note = Description of Artificial Sequence: Synthetic coding sequence
  source 1..1569: mol_type = other DNA
atggccagcggcggcggcggctgcagcgccagcgagcggctgcccccacccttccctggcctggagcctgagagcgagggcgctgctgggggcagcgagcctgaggccggggacagcgacacagaaggagaggacatcttcaccggggctgctgtggtgtccaagcaccagagccccaagatcaccaccagcctgctgcccatcaacaacggcagcaaagaaaatggcatccacgaggagcaggaccaggagccccaggacctgtttgctgatgccaccgtggagctgagcctggacagcacccagaacaaccagaagaaggtgctggccaagaccctcatcagcctgcccccccaggaggccaccaacagcagcaagccccagcccacctatgaggagctggaggaggaggagcaggaggaccagtttgacctgactgtgggcatcacagatcctgagaagattggagatggcatgaatgcctacgtggcctacaaggtgaccacccagaccagcctgcccctcttccgcagcaagcagtttgctgtgaagaggcgcttcagtgacttcctgggcctgtatgagaagctgtctgagaagcacagccagaatggcttcatcgtgcccccacctcctgagaagagcctgattggcatgaccaaggtgaaggtgggcaaggaggacagcagcagcgctgagttcctggagaagaggcgggccgccctggagcgctacctgcagagaattgtgaaccaccccaccatgctgcaggaccctgatgtgcgggagttcctggagaaggaggagctgcccagggctgtgggcacccagaccctgagcggggccggcctgctgaagatgttcaacaaggccacagatgctgtgtccaagatgaccatcaagatgaatgaaagtgacatctggtttgaggagaagctgcaggaggtggagtgtgaggagcagaggctgaggaagctgcatgctgtggtggagaccctggtgaaccacaggaaggagctggccctgaacacagcccagtttgccaagagcctggccatgctgggcagcagcgaggacaacacagccctgagccgggccctgagccagctggccgaggtggaggagaagattgagcagctgcaccaggagcaggccaacaatgacttcttcctgctggccgagctgctgagtgactacatccggctgctggccatcgtgcgggccgcctttgaccagaggatgaagacctggcagcgctggcaggatgcccaggccaccctgcagaagaagcgggaggccgaggcccggctgctgtgggccaacaagccagacaagctgcagcaggccaaggatgagatcctggagtgggagagccgggtgacccagtatgagcgggactttgagcgcatcagcacagtggtgaggaaggaggtgatccgctttgagaaggagaagagcaaggacttcaagaaccacgtgatcaagtacctggagaccctgctgtacagccagcagcagctggccaagtactgggaggccttcctgcctgaggccaaggccatctcctag

SEQ ID NO: 171155 - DNA, 1374 bp, synthetic construct
  misc_feature 1..1374: note = Description of Artificial Sequence: Synthetic coding sequence
  source 1..1374: mol_type = other DNA
atggccagcggcggcggcggctgcagcgccagcgagcggctgcccccacccttccctggcctggagcctgagagcgagggcgctgctgggggcagcgagcctgaggccggggacagcgacacagaaggagaggacatcttcaccggggctgctgtggtgtccaagcaccagagccccaagatcaccaccagcctgctgcccatcaacaacggcagcaaagaaaatggcatccacgaggagcaggaccaggagccccaggacctgtttgctggagatggcatgaatgcctacgtggcctacaaggtgaccacccagaccagcctgcccctcttccgcagcaagcagtttgctgtgaagaggcgcttcagtgacttcctgggcctgtatgagaagctgtctgagaagcacagccagaatggcttcatcgtgcccccacctcctgagaagagcctcatcggcatgaccaaggtgaaggtgggcaaggaggacagcagcagcgctgagttcctggagaagagaagagctgccctggagcgctacctgcagagaattgtgaaccaccccaccatgctgcaggaccctgatgtgcgggagttcctggagaaggaggagctgcccagggctgtgggcacccagaccctgtctggagctggcctgctgaagatgttcaacaaggccacagatgctgtgtccaagatgaccatcaagatgaatgaaagtgacatctggtttgaggagaagctgcaggaggtggagtgtgaggagcagaggctgaggaagctgcatgctgtggtggagaccctggtgaaccacaggaaggagctggccctgaacacagcccagtttgccaagagcctggccatgctgggcagcagcgaggacaacacagccctgagccgggccctgagccagctggccgaggtggaggagaagattgagcagctgcaccaggagcaggccaacaatgacttcttcctgctggccgagctgctgagtgactacatccggctgctggccatcgtgcgggccgcctttgaccagaggatgaagacctggcagcgctggcaggatgcccaggccaccctgcagaagaagcgggaggccgaggcccggctgctgtgggccaacaagccagacaagctgcagcaggccaaggatgagatcctggagtgggagagccgggtgacccagtatgaaagagactttgagcgcatcagcacagtggtgaggaaggaggtgatccgctttgagaaggagaagagcaaggacttcaagaaccacgtgatcaagtacctggagaccctgctgtacagccagcagcagctggccaagtactgggaggccttcctgcctgaggccaaggccatctcctag

SEQ ID NO: 171156 - DNA, 1374 bp, synthetic construct; identical to SEQ ID NO: 171155
  misc_feature 1..1374: note = Description of Artificial Sequence: Synthetic coding sequence
  source 1..1374: mol_type = other DNA

SEQ ID NO: 171157 - DNA, 3018 bp, synthetic construct
  misc_feature 1..3018: note = Description of Artificial Sequence: Synthetic coding sequence
  source 1..3018: mol_type = other DNA
atggccgcccggcccagccgggccaccggcccccggggcggccagaggagccgggtgaagcccccacctggaagaaggctgaaggagcagctgccccccctggccgccgcccgggctgtgtttgctgctgccacagctgtgatcatgctgacagaggccagcctgagcatctggggctggggcagcctgggcatcgtgctcttcctgatcaccttcggcccctttgtgatcttctacctgaccttctacatcctgtgctttgtgggcggcggcctggtggtgaccctgctgtttgggaagaccaacagcgagaagtacctggagcagtgtgagcacagcttcctgccccccaccagccctggggtgcccaagtgcctggaggagatgaagcgggaggcccggaccatcaagattgaccggcggctgactggagccaacatcattgatgagcccctgcagcaggtgatccagttcagcctgcgggactatgtgcagtactggtactacaccctgagtgatgatgagagcttcctgctggagatccggcagaccctgcagaatgccctgatccagtttgccaccaggagcaaggagattgactggcagccctacttcaccaccagaattgtggatgactttggcacccacctgcgggtcttcaggaaggcccagcagaagatcacagagaaggatgaccaggtgaagggcacagctgaggacctggtggacaccttctttgaggtggaggtggagatggagaaggaggtgtgccgggacctggtgtgcaccagccccaaggatgaggagggcttcctgcgggacctgtgtgaggtgctgctgtacctgctgctgcccccaggggacttccagaacaagatcatgagatactttgtgcgggagatcctggcccggggcatcctgctgcccctcatcaaccagctgagtgaccctgactacatcaaccagtatgtgatctggatgatccgggacagcaactgcaactatgaggccttcatgaacatcatcaagctgagtgacaacatcggggagctggaggccgtgcgggacaaggctgctgaggagctgcagtacctgcggagcctggacacagctggagatgacatcaacaccatcaagaaccagatcaacagcctgctgtttgtgaagaaggtgtgtgacagccgcatccagaggctgcagagcggcaaggagatcaacacagtgaagctggccgccaactttgggaagctgtgcaccgtgcccctggacagcatcctggtggacaacgtggccctgcagttcttcatggactacatgcagcagacaggaggccaggcccacctgttcttctggatgacagtggagggctacagagtgacagcccagcagcagctggaggtgctgctgagccggcagagagatggcaagcaccagaccaaccagaccaagggcctgctgcgggctgctgctgtgggcatctatgagcagtacctgtctgagaaggccagcccccgggtgacagtggatgactacctggtggccaagctggccgacaccctgaaccacgaggaccccaccccagagatctttgatgacatccagaggaaggtgtatgagctgatgctgagagatgagcgcttctaccccagcttccggcagaatgccctgtatgtgaggatgctggccgagctggacatgctgaaggaccccagcttccggggcagtgatgatggagatggagagagcttcaacggcagccccaccggcagcatcaacctgagcctggatgacctgagcaatgtgtccagtgatgacagcgtgcagctgcacgcctacatcagtgacaccggggtgtgcaatgaccacggcaagacctacgccctgtatgccatcaccgtgcacagaagaaacctgaacagcgaggagatgtggaagacctaccgccgctacagcgacttccatgacttccacatgaggatcacagagcagtttgagagcctgagcagcatcctgaagctgcccgggaagaagaccttcaacaacatggaccgggacttcctggagaagaggaagaaggacctgaatgcctacctgcagctgctgctggcccctgagatgatgaaggccagccctgccctggcccactacgtgtatgacttcctggagaacaaggcctacagcaagggcaagggggactttgccaggaagatggacacctttgtgaaccccctgagaaattccatgagaaatgtgtccaatgctgtgaagagcctgcctgacagcctggccgagggcatgaccaagatgtctgacaacatgggcaagatgtctgagcggctgggccaggacatcaagcagagcttcttcaaggtgcccccactcatccccaagacagacagcgaccctgagcacagaagagtgtctgcccagctggatgacaacgtggatgacaacatccccctgcgggtgatgctgctgctgatggatgaggtgtttgacctgaaggagaggaaccagtggctgcggaggaacatcaagaacctgctgcagcagctgatccgggccacctatggagacaccatcaacaggaagatcgtggaccacgtggactggatgaccagccctgagcaggtggccgacagcgtgaagcgcttcagagatgccttctggcccaacggcatcctggccgaggccgtgccctgccgggacaagagcatccgcatgaggaccagggtggccggcaagaccaagctgctggccatcatgccagatgagctgaagcacatcatcggggctgagaccaccaggaagggcatcctgcgggtgtttgagatgttccagcacaaccagctgaacagaaggatggtgtatgtgttcctggagggcttcctggagaccctcttcccccagtacaagttccgggagctgttcaacaagctgcacagccgcagcaagcagatgcagaagtacaagcagaagctgcagaccacccaggcccccagcctgcagaagaggtag

SEQ ID NO: 171158 - DNA, 2874 bp, synthetic construct
  misc_feature 1..2874: note = Description of Artificial Sequence: Synthetic coding sequence
  source 1..2874: mol_type = other DNA
atgctgacagaggccagcctgagcatctggggctggggcagcctgggcatcgtgctcttcctgatcaccttcggcccctttgtgatcttctacctgaccttctacatcctgtgctttgtgggcggcggcctggtggtgaccctgctgtttgggaagaccaacagcgagaagtacctggagcagtgtgagcacagcttcctgccccccaccagccctggggtgcccaagtgcctggaggagatgaagcgggaggcccggaccatcaagattgaccggcggctgactggagccaacatcattgatgagcccctgcagcaggtgatccagttcagcctgcgggactatgtgcagtactggtactacaccctgagtgatgatgagagcttcctgctggagatccggcagaccctgcagaatgccctgatccagtttgccaccaggagcaaggagattgactggcagccctacttcaccaccagaattgtggatgactttggcacccacctgcgggtcttcaggaaggcccagcagaagatcacagagaaggatgaccaggtgaagggcacagctgaggacctggtggacaccttctttgaggtggaggtggagatggagaaggaggtgtgccgggacctggtgtgcaccagccccaaggatgaggagggcttcctgcgggacctgtgtgaggtgctgctgtacctgctgctgcccccaggggacttccagaacaagatcatgagatactttgtgcgggagatcctggcccggggcatcctgctgcccctcatcaaccagctgagtgaccctgactacatcaaccagtatgtgatctggatgatccgggacagcaactgcaactatgaggccttcatgaacatcatcaagctgagtgacaacatcggggagctggaggccgtgcgggacaaggctgctgaggagctgcagtacctgcggagcctggacacagctggagatgacatcaacaccatcaagaaccagatcaacagcctgctgtttgtgaagaaggtgtgtgacagccgcatccagaggctgcagagcggcaaggagatcaacacagtgaagctggccgccaactttgggaagctgtgcaccgtgcccctggacagcatcctggtggacaacgtggccctgcagttcttcatggactacatgcagcagacaggaggccaggcccacctgttcttctggatgacagtggagggctacagagtgacagcccagcagcagctggaggtgctgctgagccggcagagagatggcaagcaccagaccaaccagaccaagggcctgctgcgggctgctgctgtgggcatctatgagcagtacctgtctgagaaggccagcccccgggtgacagtggatgactacctggtggccaagctggccgacaccctgaaccacgaggaccccaccccagagatctttgatgacatccagaggaaggtgtatgagctgatgctgagagatgagcgcttctaccccagcttccggcagaatgccctgtatgtgaggatgctggccgagctggacatgctgaaggaccccagcttccggggcagtgatgatggagatggagagagcttcaacggcagccccaccggcagcatcaacctgagcctggatgacctgagcaatgtgtccagtgatgacagcgtgcagctgcacgcctacatcagtgacaccggggtgtgcaatgaccacggcaagacctacgccctgtatgccatcaccgtgcacagaagaaacctgaacagcgaggagatgtggaagacctaccgccgctacagcgacttccatgacttccacatgaggatcacagagcagtttgagagcctgagcagcatcctgaagctgcccgggaagaagaccttcaacaacatggaccgggacttcctggagaagaggaagaaggacctgaatgcctacctgcagctgctgctggcccctgagatgatgaaggccagccctgccctggcccactacgtgtatgacttcctggagaacaaggcctacagcaagggcaagggggactttgccaggaagatggacacctttgtgaaccccctgagaaattccatgagaaatgtgtccaatgctgtgaagagcctgcctgacagcctggccgagggcatgaccaagatgtctgacaacatgggcaagatgtctgagcggctgggccaggacatcaagcagagcttcttcaaggtgcccccactcatccccaagacagacagcgaccctgagcacagaagagtgtctgcccagctggatgacaacgtggatgacaacatccccctgcgggtgatgctgctgctgatggatgaggtgtttgacctgaaggagaggaaccagtggctgcggaggaacatcaagaacctgctgcagcagctgatccgggccacctatggagacaccatcaacaggaagatcgtggaccacgtggactggatgaccagccctgagcaggtggccgacagcgtgaagcgcttcagagatgccttctggcccaacggcatcctggccgaggccgtgccctgccgggacaagagcatccgcatgaggaccagggtggccggcaagaccaagctgctggccatcatgccagatgagctgaagcacatcatcggggctgagaccaccaggaagggcatcctgcgggtgtttgagatgttccagcacaaccagctgaacagaaggatggtgtatgtgttcctggagggcttcctggagaccctcttcccccagtacaagttccgggagctgttcaacaagctgcacagccgcagcaagcagatgcagaagtacaagcagaagctgcagaccacccaggcccccagcctgcagaagaggtag

SEQ ID NO: 171159 - DNA, 771 bp, synthetic construct
  misc_feature 1..771: note = Description of Artificial Sequence: Synthetic coding sequence
  source 1..771: mol_type = other DNA
atgagccggcaggccaaggatgacttcctgcggcactacacagtgtctgaccccaggacccaccccaagggctacacagagtacaaggtgacagcccagttcatcagcaagaaggaccctgaagatgtgaaggaggtggtggtgtggaagcgctacagcgacttcaggaagctgcatggagacctggcctacacccacaggaacctcttccggcggctggaggagttccctgccttcccccgggcccaggtgtttggccgctttgaggcctctgtgattgaggagaggaggaaaggagctgaggacctgctgcgcttcaccgtgcacatcccagccctgaacaacagcccccagctgaaggagttcttccggggcggggaggtgacccggcccctggaggtgtcccgggacctgcacatcctgcccccacccctcatccccaccccacctccagatgacccccggctgagccagctgctgcctgctgagcggcggggcctggaggagctggaggtgcctgtggaccccccacccagcagccctgcccaggaggccctggacctgctcttcaactgtgagagcacagaggaggccagcggcagccctgcccggggccccctgacagaggccgagctggccctgtttgaccccttcagcaaggagggggaccccctgcctgcccggcaggagggcgtgaagaagaaggctgctgagtacctgaagagagctgaggagatcctgcggctgcacctgagccagctgcccccatag

SEQ ID NO: 171160 - DNA, 1029 bp, synthetic construct
  misc_feature 1..1029: note = Description of Artificial Sequence: Synthetic coding sequence
  source 1..1029: mol_type = other DNA
atgagccggcaggccaaggatgacttcctgcggcactacacagtgtctgaccccaggacccaccccaagggctacacagagtacaaggtgacagcccagttcatcagcaagaaggaccctgaagatgtgaaggaggtggtggtgtggaagcgctacagcgacttcaggaagctgcatggagacctggcctacacccacaggaacctcttccggcggctggaggagttccctgccttcccccgggcccaggtgtttggccgctttgaggcctctgtgattgaggagaggaggaaaggagctgaggacctgctgcgcttcaccgtgcacatcccagccctgaacaacagcccccagctgaaggagttcttccggggcggggaggtgacccggcccctggaggtgtcccgggacctgcacatcctgcccccacccctcatccccaccccacctccagatgacccccggctgagccagctgctgcctgctgagcggcggggcctggaggagctggaggtgcctgtggaccccccacccagcagccctgcccaggaggccctggacctgctcttcaactgtgagagcacagaggaggccagcggcagccctgcccggggccccctgacagaggccgagctggccctgtttgaccccttcagcaaggaggagggcgccgcccccagccccacccacgtggccgagctggccaccatggaggtggagagcgcccggctggaccaggagccctgggagcccggcggccaggaggaggaggaggatggagagggcggccccaccccagcctacctgagccaggccacagagctgatcacccaggccctgagagatgagaaggccggggcctatgctgctgccctgcagggctacagagatggagtgcacgtgctgctgcagggcgtgcccagcgaccccctgcctgcccggcaggagggcgtgaagaagaaggctgctgagtacctgaagagagctgaggagatcctgcggctgcacctgagccagctgcccccatag

SEQ ID NO: 171161 - DNA, 1608 bp, synthetic construct
  misc_feature 1..1608: note = Description of Artificial Sequence: Synthetic coding sequence
  source 1..1608: mol_type = other DNA
atgtctgagggggagagccagacagtgctgagcagcggcagtgaccccaaggtggagagcagcagcagcgcccctggcctgacctctgtgagcccccctgtgaccagcaccaccagcgctgccagccctgaggaggaggaggagagtgaagatgaaagtgagatcctggaggagagcccctgtggccgctggcagaagagaagagaggaggtgaaccagagaaatgtgcccggcattgattctgcctacctggccatggacacagaggagggcgtggaggtggtgtggaatgaggtgcagttcagcgagaggaagaactacaagctgcaggaggagaaggtgcgggctgtgtttgacaacctgatccagctggagcacctgaacatcgtgaagttccacaagtactgggccgacatcaaggagaacaaggcccgggtcatcttcatcacagagtacatgagcagcggcagcctgaagcagttcctgaagaagaccaagaagaaccacaagaccatgaatgagaaggcctggaagcgctggtgcacccagatcctgagcgccctgagctacctgcacagctgtgacccccccatcatccacggcaacctgacctgtgacaccatcttcatccagcacaacggcctcatcaagattggctctgtggccccagacaccatcaacaaccacgtgaagacctgccgggaggagcagaagaacctgcacttctttgccccagaatatggagaggtgaccaacgtgaccacagctgtggacatctacagctttggcatgtgtgccctggagatggctgtgctggagatccagggcaatggagagagcagctatgtgccccaggaggccatcagcagcgccatccagctgctggaggaccccctgcagcgggagttcatccagaagtgcctgcagagcgagcccgcccggcggcccacagcccgggagctgctcttccacccagccctgtttgaggtgcccagcctgaagctgctggccgcccactgcatcgtgggccaccagcacatgatcccagaaaatgccctggaggagatcaccaagaacatggacaccagcgctgtgctggccgagatcccagctggccctggccgggagcctgtgcagaccctgtacagccagagccctgccctggagctggacaagttcctggaggatgtgagaaatggcatctaccccctgacagccttcggcctgccccggccccagcagccccagcaggaggaggtgaccagccctgtggtgccccccagcgtgaagacccccaccccagagcctgctgaggtggagaccaggaaggtggtgctgatgcagtgcaacattgaatctgtggaggagggcgtgaagcaccacctgaccctgctgctgaagctggaggacaagctgaacagacacctgagctgtgacctgatgcccaatgaaaacatccctgagctggccgctgagctggtgcagctgggcttcatcagcgaggccgaccagagccggctgaccagcctgctggaggagaccctgaacaagttcaactttgccaggaacagcaccctgaacagcgctgctgtgacagtgagcagctag

SEQ ID NO: 171162 - DNA, 1338 bp, synthetic construct
  misc_feature 1..1338: note = Description of Artificial Sequence: Synthetic coding sequence
  source 1..1338: mol_type = other DNA
atgcacttcagcatccctgagacagagagccgcagcggggacagcggcggcagcgcctacgtgctgaggaaggagtatggagccaacgtgctgcctgccttcccccccaagaagctgttcagcctgaccccagctgaggtggagcagaggcgggagcagctggagaagtacatgcaggccgtgcggcaggaccccctgctgggcagcagcgagaccttcaacagcttcctgcggcgggcccagcaggagacccagcaggtgcccacagaggaggtgtccctggaggtgctgctgagcaatggccagaaggtgctggtgaatgtgctgaccagtgaccagacagaagatgtgctggaggccgtggccgccaagctggacctgcctgatgacctgattggctacttcagcctcttcctggtgcgggagaaggaggatggagccttctcctttgtgaggaagctgcaggagtttgagctgccctacgtgtctgtgaccagcctgcggagccaggagtacaagatcgtgctgaggaagagctactgggacagcgcctatgatgatgatgtgatggagaacagagtgggcctgaacctgctgtatgcccagacagtgtctgacatcgagcggggctggatcctggtgaccaaggagcagcaccggcagctgaagagcctgcaggagaaggtgtccaagaaggagttcctgcggctggcccagaccctgcggcactacggctacctgcgctttgatgcctgtgtggccgacttccctgagaaggactgccctgtggtggtgtctgctggcaacagcgagctgagcctgcagctgcggctgcccggccagcagctgcgggagggcagcttccgggtgaccaggatgcgctgctggagggtgaccagctctgtgcccctgcccagcggcagcaccagcagccctggccggggccgcggggaggtgcggctggagctggcctttgagtacctgatgagcaaggaccggctgcagtgggtgaccatcaccagcccccaggccatcatgatgagcatctgcctgcagagcatggtggatgagctgatggtgaagaagagcggcggcagcatcaggaagatgctgcggaggagagtgggcggcaccctgcggcggagtgacagccagcaggccgtgaagagcccccccctgctggagagcccagatgccacccgggagagcatggtgaagctgagcagcaagctgtctgctgtgtccctgcggggcatcggcagccccagcacagatgccagcgccagtgatgtgcacggcaactttgcctttgagggcattggagatgaggacctgtag

SEQ ID NO: 171163 - DNA, 771 bp, synthetic construct
  misc_feature 1..771: note = Description of Artificial Sequence: Synthetic coding sequence
  source 1..771: mol_type = other DNA
atggagaacagagtgggcctgaacctgctgtatgcccagacagtgtctgacatcgagcggggctggatcctggtgaccaaggagcagcaccggcagctgaagagcctgcaggagaaggtgtccaagaaggagttcctgcggctggcccagaccctgcggcactacggctacctgcgctttgatgcctgtgtggccgacttccctgagaaggactgccctgtggtggtgtctgctggcaacagcgagctgagcctgcagctgcggctgcccggccagcagctgcgggagggcagcttccgggtgaccaggatgcgctgctggagggtgaccagctctgtgcccctgcccagcggcagcaccagcagccctggccggggccgcggggaggtgcggctggagctggcctttgagtacctgatgagcaaggaccggctgcagtgggtgaccatcaccagcccccaggccatcatgatgagcatctgcctgcagagcatggtggatgagctgatggtgaagaagagcggcggcagcatcaggaagatgctgcggcggcgggtgggcggcaccctgcggcggagtgacagccagcaggccgtgaagagcccccccctgctggagagcccagatgccacccgggagagcatggtgaagctgagcagcaagctgtctgctgtgtccctgcggggcatcggcagccccagcacagatgccagcgccagtgatgtgcacggcaactttgcctttgagggcattggagatgaggacctgtag

SEQ ID NO: 171164 - DNA, 771 bp, synthetic construct; identical to SEQ ID NO: 171163
  misc_feature 1..771: note = Description of Artificial Sequence: Synthetic coding sequence
  source 1..771: mol_type = other DNA

SEQ ID NO: 171165 - DNA, 1560 bp, synthetic construct
  misc_feature 1..1560: note = Description of Artificial Sequence: Synthetic coding sequence
  source 1..1560: mol_type = other DNA
atggctgctgagcgggagcccccacccctgggagatggcaagcccacagactttgaggacctggaggatggagaagatctcttcaccagcacagtgtccaccctggagagcagccccagcagccctgagcccgccagcctgcctgctgaggacatcagcgccaacagcaatggccccaagcccacagaggtggtgctggatgatgaccgggaggacctgtttgctgaggccacagaggaggtgtccctggacagccctgagcgggagcccatcctgagcagcgagcccagccctgctgtgacccctgtgacccccaccaccctgattgcccccagaattgagagcaagtccatgtctgcccctgtgatctttgacaggagccgggaggagattgaggaggaggccaacggggacatctttgacatcgagattggagtgtctgaccctgagaaggtgggagatggcatgaatgcctacatggcctacagagtgaccaccaagaccagcctgtccatgttcagcaagtctgagttctctgtgaagaggcgcttcagtgacttcctgggcctgcacagcaagctggccagcaagtacctgcacgtgggctacatcgtgcccccagcccctgagaagagcatcgtgggcatgaccaaggtgaaggtgggcaaggaggacagcagcagcacagaatttgtggagaagagaagagctgccctggagcgctacctgcagaggacagtgaagcaccccaccctgctgcaggaccctgacctgcggcagttcctggagagcagcgagctgcccagggctgtgaacacccaggccctgtctggagctggcatcctgaggatggtgaacaaggctgctgatgctgtgaacaagatgaccatcaagatgaatgaaagtgatgcctggtttgaggagaagcagcagcagtttgagaacctggaccagcagctgaggaagctgcacgtgtctgtggaggccctggtgtgccacaggaaggagctgagcgccaacacagctgcctttgccaagtctgctgccatgctgggcaacagcgaggaccacacagccctgagccgggccctgagccagctggccgaggtggaggagaagattgaccagctgcaccaggagcaggcctttgctgacttctacatgttcagcgagctgctgagtgactacatccggctgattgctgctgtgaagggcgtgtttgaccacaggatgaagtgctggcagaagtgggaggatgcccagatcaccctgctgaagaagcgggaggccgaggccaagatgatggtggccaacaagccagacaagatccagcaggccaagaatgagatccgggagtgggaggccaaggtgcagcagggcgagcgggactttgagcagatcagcaagaccatcaggaaggaggtgggccgctttgagaaggagcgggtgaaggacttcaagacagtcatcatcaagtacctggagagcctggtgcagacccagcagcagctgatcaagtactgggaggccttcctgcctgaggccaaggccatcgcctag

SEQ ID NO: 171166 - DNA, 390 bp, synthetic construct
  misc_feature 1..390: note = Description of Artificial Sequence: Synthetic coding sequence
  source 1..390: mol_type = other DNA
atggccagccctgagcaccctggcagccctggctgcatgggccccatcacccagtgcacagcccggacccagcaggaggccccagccaccggccctgacctgccccaccctggcccagatggccacctggacacccacagcggcctgagcagcaacagctccatgaccacccgggagctgcagcagtactggcagaaccagaagtgccgctggaagcacgtgaagctgctgtttgagatcgccagcgccagaattgaggagaggaaggtgtccaagtttgtgatgggcaagagcaggcctggagagatgacctacccaggcagcagaggagagaccggcacagcccctgagccagacccccgctgcccccggcagagcgacatgctgtag

SEQ ID NO: 171167 - DNA, 951 bp, synthetic construct
  misc_feature 1..951: note = Description of Artificial Sequence: Synthetic coding sequence
  source 1..951: mol_type = other DNA
atggccagccctgagcaccctggcagccctggctgcatgggccccatcacccagtgcacagcccggacccagcaggaggccccagccaccggccctgacctgccccaccctggcccagatggccacctggacacccacagcggcctgagcagcaacagctccatgaccacccgggagctgcagcagtactggcagaaccagaagtgccgctggaagcacgtgaagctgctgtttgagatcgccagcgccagaattgaggagaggaaggtgtccaagtttgtggtgtaccagatcatcgtcatccagacaggcagctttgacaacaacaaggctgtgctggagcggcgctacagcgactttgccaagctgcagaaggccctgctgaagaccttccgggaggagattgaagatgtggagttccccaggaagcacctgaccggcaactttgctgaggagatgatctgtgaaagaagaagagccctgcaggagtacctgggcctgctgtatgccatccgctgtgtgagaagaagccgggagttcctggacttcctgaccaggcctgagctgcgggaggccttcggctgcctgcgggccggccagtacccccgggccctggagctgctgctgcgggtgctgcccctgcaggagaagctgacagcccactgcccagctgctgctgtgcctgccctgtgtgctgtgctgctgtgccaccgggacctggacaggcctgctgaggcctttgctgctggggagcgggccctgcagaggctgcaggcccgggagggccaccgctactatgcccccctgctggatgccatggtgcggctggcctatgccctgggcaaggactttgtgaccctgcaggagcggctggaggagagccagctgcggcggcccaccccccggggcatcaccctgaaggagctgactgtgcgggagtacctgcactag

SEQ ID NO: 171168 - DNA, 459 bp, synthetic construct
  misc_feature 1..459: note = Description of Artificial Sequence: Synthetic coding sequence
  source 1..459: mol_type = other DNA
atggccagccctgagcaccctggcagccctggctgcatgggccccatcacccagtgcacagcccggacccagcaggaggccccagccaccggccctgacctgccccaccctggcccagatggccacctggacacccacagcggcctgagcagcaacagctccatgaccacccgggagctgcagcagtactggcagaaccagaagtgccgctggaagcacgtgaagctgctgtttgagatcgccagcgccagaattgaggagaggaaggtgtccaagtttgtggtgtaccagatcatcgtcatccagacaggcagctttgacaacaacaaggctgtgctggagcggcgctacagcgactttgtgaccctgcaggagcggctggaggagagccagctgcggcggcccaccccccggggcatcaccctgaaggagctgactgtgcgggagtacctgcactag

SEQ ID NO: 171169 - DNA, 309 bp, synthetic construct
  misc_feature 1..309: note = Description of Artificial Sequence: Synthetic coding sequence
  source 1..309: mol_type = other DNA
atggccagccctgagcaccctggcagccctggctgcatgggccccatcacccagtgcacagcccggacccagcaggaggccccagccaccggccctgacctgccccaccctggcccagatggccacctggacacccacagcggcctgagcagcaacagctccatgaccacccgggagctgcagcagtactggcagaaccagaagtgccgctggaagcacgtgaagctgctgtttgagatcgccagcgccagaattgaggagaggaaggtgtccaagtttgtggccccagccccagatgccaccccctag

SEQ ID NO: 171170 - DNA, 807 bp, synthetic construct
  misc_feature 1..807: note = Description of Artificial Sequence: Synthetic coding sequence
  source 1..807: mol_type = other DNA
atgcagcagatccggccccccttcatccggggccccccccaccacgccagcaaccccaacagccccctgagcaaccccatgctgcccggcatcggccccccacctgggggccccaggaacctgggccccaccagcagccccatgcaccggcccatgctgagcccccacatccacccccccagcacccccaccatgcctggcaaccccccaggcctgctgcccccacctcctcctggggcccccctgcccagcctgcccttcccccctgtgtccatgatgcccaacggccccatgcctgtgccccagatgatgaactttggcctgcccagcctggcccccctggtgcccccacccaccctgctggtgccctaccctgtgattgtgcccctgcctgtgcccatccccatccccatccccatcccccacgtgtctgacagcaagccacccaagaagctgctgagccctgaggagcctgctgtgtctgagctggagagcgtgaaggagaacaactgtgccagcaactgccacctggatggagaggccgccaagaagctgatgggagaggaggccctggccggcggggacaagagtgaccccaacctgaacaacccagcagatgaagatcatgcctatgccctgaggatgctgcccaagacaggctgtgtgatccagcctgtgcccaagccagctgagaaggccgccatggccccctgcatcatcagcagccccatgctgtctgctggccctgaggacctggagccccccctgaagaggcgctgcctgcgcatccggaaccagaacaagtag

SEQ ID NO: 171171 - DNA, 423 bp, synthetic construct
  misc_feature 1..423: note = Description of Artificial Sequence: Synthetic coding sequence
  source 1..423: mol_type = other DNA
atggccgagaccgtggccgacaccaggaggctcatcaccaagccccagaacctgaatgatgcctacggcccccccagcaacttcctggagattgacaccaacctgcccatcttcaagctgaaggagagcacagtgagaagacgctacagcgactttgagtggctgcggtctgagctggagcgggagagcaaggtggtggtgccccccctgcccgggaaggccttcctgcggcagctgcccttcagaggagatgatggcatctttgatgacaacttcatcgaggagaggaagcagggcctggagcagttcatcaacaaggtggccggccaccccctggcccagaatgaacgctgcctgcacatgttcctgcaggatgagatcatcgacaagagctacacccccagcaagatcagacatgcctag

SEQ ID NO: 171172 - DNA, 342 bp, synthetic construct
  misc_feature 1..342: note = Description of Artificial Sequence: Synthetic coding sequence
  source 1..342: mol_type = other DNA
atggccgagaccgtggccgacaccaggaggctcatcaccaagccccagaacctgaatgatgcctacggcccccccagcaacttcctggagattgatgtgagcaacccccagacagtgggcgtgggccggggccgcttcaccacctatgagatccgggtgaagaccaacctgcccatcttcaagctgaaggagagcacagtgagaagacgctacagcgactttgagtggctgcggtctgagctggagcgggagagcaagccctgcctgaggatgaccagcgaggcccggagccacggccgcacctggtgtgcccagaatgatgagaagctgttctgtgactag

SEQ ID NO: 171173 - DNA, 393 bp, synthetic construct
  misc_feature 1..393: note = Description of Artificial Sequence: Synthetic coding sequence
  source 1..393: mol_type = other DNA
atggccgagaccgtggccgacaccaggaggctcatcaccaagccccagaacctgaatgatgcctacggcccccccagcaacttcctggagattgatgtgagcaacccccagacagtgggcgtgggccggggccgcttcaccacctatgagatccgggtgaaggtggtggtgccccccctgcccgggaaggccttcctgcggcagctgcccttcagaggagatgatggcatctttgatgacaacttcatcgaggagaggaagcagggcctggagcagttcatcaacaaggtggccggccaccccctggcccagaatgaacgctgcctgcacatgttcctgcaggatgagatcatcgacaagagctacacccccagcaagatcagacatgcctag

SEQ ID NO: 171174 - DNA, 1353 bp, synthetic construct
  misc_feature 1..1353: note = Description of Artificial Sequence: Synthetic coding sequence
  source 1..1353: mol_type = other DNA
atggagcaggcccccccagaccctgagcggcagctgcagcctgcccccctggagcccctgggcagcccagatgctggcctgggcgctgctgtgggcaaggaggccgagggcgctggggaggagagcagtggagtggacaccatgacccacaacaacttctggctgaagaagattgagatctctgtgtctgaggccgagaagaggactggaagaaatgccatgaacatgcaggagacctacacagcctacctgattgagaccaggtctgtggagcacacagatggccagagcgtgctgacagacagcctgtggaggcgctacagcgagtttgagctgctgcggagctacctgctggtgtactacccccacatcgtggtgccccccctgcctgagaagagagctgagtttgtgtggcacaagctgtctgctgacaacatggaccctgactttgtggagcggcggcgcatcggcctggagaacttcctgctgagaattgccagccaccccatcctgtgccgggacaagatcttctacctgttcctgacccaggagggcaactggaaggagaccgtgaatgagaccggcttccagctgaaggctgacagccggctgaaggccctgaatgccaccttccgggtgaagaacccagacaagcgcttcacagacctgaagcactacagtgatgagctgcagagcgtcatcagccacctgctgcgggtgcgggcccgggtggccgaccggctgtatggagtgtacaaggtgcacggcaactacggccgggtcttcagcgagtggagcgccatcgagaaggagatgggagatggcctgcagagcgctggccaccacatggatgtgtatgccagcagcattgatgacatcctggaggatgaggagcactatgctgaccagctgaaggagtacctgttctatgcagaggccctgcgggctgtgtgcaggaagcatgagctgatgcagtatgacctggagatggccgcccaggacctggccagcaagaagcagcagtgtgaggagctggtgactggaacagtgaggaccttcagcctgaagggcatgaccaccaagctgtttggccaggagaccccagagcagcgggaggcccgcatcaaggtgctggaggagcagatcaatgaaggagagcagcagctgaagagcaagaacctggagggccgggagtttgtgaagaatgcctgggccgacatcgagcgcttcaaggagcagaagaacagagacctgaaggaggccctgatctcctatgctgtgatgcagatctccatgtgcaagaagggcatccaggtgtggaccaatgccaaggagtgcttcagcaagatgtag

SEQ ID NO: 171175 - DNA, 918 bp, synthetic construct
  misc_feature 1..918: note = Description of Artificial Sequence: Synthetic coding sequence
  source 1..918: mol_type = other DNA
atggaccctgactttgtggagaggagaagaattggcctggagaacttcctgctgcgcatcgccagccaccccatcctgtgccgggacaagatcttctacctgttcctgacccaggagggcaactggaaggagaccgtgaatgaaacaggcttccagctgaaggctgacagccggctgaaggccctgaatgccaccttccgggtgaagaacccagacaagcgcttcacagacctgaagcactacagtgatgagctgcagagcgtcatcagccacctgctgcgggtgcgggcccgggtggccgaccggctgtatggagtgtacaaggtgcacggcaactacggccgggtcttcagcgagtggagcgccatcgagaaggagatgggagatggcctgcagagcgctggccaccacatggatgtgtatgccagcagcattgatgacatcctggaggatgaggagcactacgccgaccagctgaaggagtacctgttctacgccgaggccctgcgggctgtgtgcaggaagcatgagctgatgcagtatgacctggagatggccgcccaggacctggccagcaagaagcagcagtgtgaggagctggtgacaggcaccgtgaggaccttcagcctgaagggcatgaccaccaagctgtttggccaggagaccccagagcagcgggaggcccgcatcaaggtgctggaggagcagatcaatgaaggagagcagcagctgaagagcaagaacctggagggccgggagtttgtgaagaatgcctgggccgacatcgagcgcttcaaggagcagaagaacagagacctgaaggaggccctgatctcctatgctgtgatgcagatctccatgtgcaagaagggcatccaggtgtggaccaatgccaaggagtgcttcagcaagatgtag

SEQ ID NO: 171176 - DNA, 1215 bp, synthetic construct
  misc_feature 1..1215: note = Description of Artificial Sequence: Synthetic coding sequence
  source 1..1215: mol_type = other DNA
atggctgctgtgcctgagctgctgcagcagcaggaggaggacaggagcaagctgcggtctgtgtctgtggacctgaatgtggaccccagcctgcagattgacatcccagatgccctgtctgagcgggacaaggtgaagttcaccgtgcacaccaagaccaccctgcccaccttccagagccctgagttctctgtgacccggcagcacgaggactttgtgtggctgcatgacaccctcatcgagaccacagattatgccggcctcatcatccccccagcccccaccaagccagactttgatggcccccgggagaagatgcagaagctgggggagggggagggctccatgaccaaggaggagtttgccaagatgaagcaggagctggaggccgagtacctggccgtgttcaagaagacagtgagcagccatgaggtgttcctgcagaggctgagcagccaccctgtgctgagcaaggacaggaacttccacgtgttcctggagtatgaccaggacctgtctgtgcggaggaagaacaccaaggagatgtttggaggcttcttcaagtctgtggtgaagtctgcagatgaggtgctcttcaccggggtgaaggaggtggatgacttctttgagcaggagaagaacttcctgatcaactactacaaccgcatcaaggacagctgtgtgaaggctgacaagatgaccaggagccacaagaatgtggctgatgactacatccacacagctgcctgcctgcacagcctggccctggaggagcccaccgtcatcaagaagtacctgctgaaggtggccgagctgtttgagaagctgaggaaggtggagggccgggtgtccagtgatgaggacctgaagctgacagagctgctgcgctactacatgctgaacatcgaggccgccaaggacctgctgtacagaaggaccaaggccctgattgattatgagaacagcaacaaggccctggacaaggcccggctgaagagcaaggatgtgaagctggccgaggcccaccagcaggagtgctgccagaagtttgagcagctgtctgagagcgccaaggaggagctgatcaacttcaagaggaagagggtggccgccttcaggaagaacctgattgagatgtctgagctggagatcaagcacgccaggaacaacgtgtccctgctgcagagctgcatcgacctcttcaagaacaactag

SEQ ID NO: 171177 - DNA, 1215 bp, synthetic construct; identical to SEQ ID NO: 171176
  misc_feature 1..1215: note = Description of Artificial Sequence: Synthetic coding sequence
  source 1..1215: mol_type = other DNA

SEQ ID NO: 171178 - DNA, 687 bp, synthetic construct
  misc_feature 1..687: note = Description of Artificial Sequence: Synthetic coding sequence
  source 1..687: mol_type = other DNA
atggctgctgtgcctgagctgctgcagcagcaggaggaggacaggagcaagaccaccctgcccaccttccagagccctgagttctctgtgacccggcagcatgaagattttgtgtggctgcatgacaccctgattgagaccacagattatgccggcctcatcatccccccagcccccaccaagccagactttgatggcccccgggagaagatgcagaagctgggggagggggagggctccatgaccaaggaggagtttgccaagatgaagcaggagctggaggccgagtacctggccgtgttcaagaagacagtgagcagccatgaggtgttcctgcagaggctgagcagccaccctgtgctgagcaaggacaggaacttccacgtgttcctggagtatgaccaggacctgtctgtgcggaggaagaacaccaaggagatgtttggaggcttcttcaagtctgtggtgaagtctgcagatgaggtgctcttcaccggggtgaaggaggtggatgacttctttgagcaggagaagaacttcctgatcaactactacaaccgcatcaaggacagctgtgtgaaggctgacaagatgaccaggagccacaagaatgtggctgatgactacatccacacagctgcctgcctgcacagcctggccctggaggagcccaccgtcatcaagtag

SEQ ID NO: 171179 - DNA, 810 bp, synthetic construct
  misc_feature 1..810: note = Description of Artificial Sequence: Synthetic coding sequence
  source 1..810: mol_type = other DNA
atggctgctgtgcctgagctgctgcagcagcaggaggaggacaggagcaagctgcggtctgtgtctgtggacctgaatgtggaccccagcctgcagattgacatcccagatgccctgtctgagcgggacaaggtgaagttcaccgtgcacaccaagatccccccagcccccaccaagccagactttgatggcccccgggagaagatgcagaagctgggggagggggagggctccatgaccaaggaggagtttgccaagatgaagcaggagctggaggccgagtacctggccgtgttcaagaagacagtgagcagccatgaggtgttcctgcagaggctgagcagccaccctgtgctgagcaaggacaggaacttccacgtgttcctggagtatgaccaggacctgtctgtgcggaggaagaacaccaaggagatgtttggaggcttcttcaagtctgtggtgaagtctgcagatgaggtgctcttcaccggggtgaaggaggtggatgacttctttgagcaggagaagaacttcctgatcaactactacaaccgcatcaaggacagctgtgtgaaggctgacaagatgaccaggagccacaagaatgtggctgatgactacatccacacagctgcctgcctgcacagcctggccctggaggagcccaccgtcatcaagaagtacctgctgaaggtggccgagctgtttgagaagctgaggaaggtggagggccgggtgtccagtgatgaggacctgaagctgacagagctgctgcgctactacatgctgaacattgaagctgccaagtag

SEQ ID NO: 171180 - DNA, 885 bp, synthetic construct
  misc_feature 1..885: note = Description of Artificial Sequence: Synthetic coding sequence
  source 1..885: mol_type = other DNA
atgaccaccctgacagagatcaagctgctgcccagcctggtgctgctggtgtgctgtgagtacctggccatcttcaagaagacagtggccatgcatgaggtgttcctgtgccgggtggccgcccaccccatcctgcggcgggacctgaacttccacgtgttcctggagtacaaccaggacctgtctgtgcggggcaagaacaagaaggagaagctggaggacttcttcaagaacatggtgaagtctgcagatggagtgattgtgtctggagtgaaggatgtggatgacttctttgagcacgagaggaccttcctgctggagtaccacaacagagtgaaggatgccagcgccaagagtgacaggatgaccaggagccacaagtctgctgctgatgactacaaccgcatcggcagcagcctgtatgccctgggcacccaggacagcacagacatctgcaagttcttcctgaaggtgtctgagctgtttgacaagaccaggaagattgaggcccgggtgtctgcagatgaggacctgaagctgagtgacctgctgaagtactacctgcgggagagccaggccgccaaggacctgctgtaccgccgcagccgcagcctggtggactatgaaaatgccaacaaggccctggacaaggcccgggccaagaacaaggatgtgctgcaggccgagaccagccagcagctgtgctgccagaagtttgagaagatcagcgagagcgccaagcaggagctgattgacttcaagacccggcgggtggccgccttcaggaagaacctggtggagctggccgagctggagctgaagcacgccaagggcaacctgcagctgctgcagaactgcctggccgtgctgaatggagacacctag

SEQ ID NO: 171181 - DNA, 1257 bp, synthetic construct
  misc_feature 1..1257: note = Description of Artificial Sequence: Synthetic coding sequence
  source 1..1257: mol_type = other DNA
atgagggcctgtgccggcccccggctgggcgccgccatgatggagggcctggatgatggccctgacttcctgtctgaagaagatcggggcctgaaggccatcaacgtggacctgcagagtgatgctgccctgcaggtggacatcagtgatgccctgtctgagcgggacaaggtgaagttcaccgtgcacaccaagagcagcctgcccaacttcaagcagaatgagttctctgtggtgcggcagcacgaggagttcatctggctgcatgacagctttgtggagaatgaagattatgccggctacatcatccccccagccccacccaggccagactttgatgccagccgggagaagctgcagaagctgggggagggggagggctccatgaccaaggaggagttcaccaagatgaagcaggagctggaggccgagtacctggccatcttcaagaagacagtggccatgcatgaggtgttcctgtgccgggtggccgcccaccccatcctgcggcgggacctgaacttccacgtgttcctggagtacaaccaggacctgtctgtgcggggcaagaacaagaaggagaagctggaggacttcttcaagaacatggtgaagtctgcagatggagtgattgtgtctggagtgaaggatgtggatgacttctttgagcacgagaggaccttcctgctggagtaccacaacagagtgaaggatgccagcgccaagagtgacaggatgaccaggagccacaagtctgctgctgatgactacaaccgcatcggcagcagcctgtatgccctgggcacccaggacagcacagacatctgcaagttcttcctgaaggtgtctgagctgtttgacaagaccaggaagattgaggcccgggtgtctgcagatgaggacctgaagctgagtgacctgctgaagtactacctgcgggagagccaggccgccaaggacctgctgtaccgccgcagccgcagcctggtggactatgaaaatgccaacaaggccctggacaaggcccgggccaagaacaaggatgtgctgcaggccgagaccagccagcagctgtgctgccagaagtttgagaagatcagcgagagcgccaagcaggagctgattgacttcaagacccggcgggtggccgccttcaggaagaacctggtggagctggccgagctggagctgaagcacgccaagggcaacctgcagctgctgcagaactgcctggccgtgctgaatggagacacctag

SEQ ID NO: 171182 - DNA, 873 bp, synthetic construct
  misc_feature 1..873: note = Description of Artificial Sequence: Synthetic coding sequence
  source 1..873: mol_type = other DNA
atgaccaaggaggagttcaccaagatgaagcaggagctggaggccgagtacctggccatcttcaagaagacagtggccatgcatgaggtgttcctgtgccgggtggccgcccaccccatcctgcggcgggacctgaacttccacgtgttcctggagtacaaccaggacctgtctgtgcggggcaagaacaagaaggagaagctggaggacttcttcaagaacatggtgaagtctgcagatggagtgattgtgtctggagtgaaggatgtggatgacttctttgagcacgagaggaccttcctgctggagtaccacaacagagtgaaggatgccagcgccaagagtgacaggatgaccaggagccacaagtctgctgctgatgactacaaccgcatcggcagcagcctgtatgccctgggcacccaggacagcacagacatctgcaagttcttcctgaaggtgtctgagctgtttgacaagaccaggaagattgaggcccgggtgtctgcagatgaggacctgaagctgagtgacctgctgaagtactacctgcgggagagccaggccgccaaggacctgctgtaccgccgcagccgcagcctggtggactatgaaaatgccaacaaggccctggacaaggcccgggccaagaacaaggatgtgctgcaggccgagaccagccagcagctgtgctgccagaagtttgagaagatcagcgagagcgccaagcaggagctgattgacttcaagacccggcgggtggccgccttcaggaagaacctggtggagctggccgagctggagctgaagcacgccaagggcaacctgcagctgctgcagaactgcctggccgtgctgaatggagacacctag

SEQ ID NO: 171183 - DNA, 873 bp, synthetic construct; identical to SEQ ID NO: 171182
  misc_feature 1..873: note = Description of Artificial Sequence: Synthetic coding sequence
  source 1..873: mol_type = other DNA

SEQ ID NO: 171184 - DNA, 1188 bp, synthetic construct
  misc_feature 1..1188: note = Description of Artificial Sequence: Synthetic coding sequence
  source 1..1188: mol_type = other DNA
atgaagatccccctgaacaagtttcctggctttgccaagccaggcacagagcagtacctgctggccaagcagctggccaagcccaaggagaagatccccatcatcgtgggggactatggccccatgtgggtgtaccccaccagcacctttgactgtgtggtggccgaccccaggaagggcagcaagatgtatggcctgaagagctacatcgagtaccagctgacccccaccaacaccaacagatctgtgaaccaccgctacaagcactttgactggctgtatgaaaggctgctggtgaagtttggaagtgccatccccatccccagcctgcctgacaagcaggtgacaggccgctttgaggaggagttcatcaagatgaggatggagcggctgcaggcctggatgaccaggatgtgccgccaccctgtgatcagcgagagcgaggtgttccagcagttcctgaacttcagagatgagaaggagtggaagacaggcaagaggaaggccgagagagatgagctggccggcgtgatgatcttcagcaccatggagcctgaggccccagacctggacctggtggagattgagcagaagtgtgaggccgtgggcaagttcaccaaggccatggatgatggagtgaaggagctgctgactgtgggccaggagcactggaagcgctgcaccggccccctgcccaaggagtaccagaagattggcaaggccctgcagagcctggccaccgtcttcagcagcagcggctaccagggcgagacagacctgaatgatgccatcacagaagctgggaagacctatgaggagatcgccagcctggtggccgagcagcccaagaaggacctgcacttcctgatggagtgcaaccacgagtacaagggcttcctgggctgcttcccagacatcatcggcacccacaagggggccatcgagaaggtgaaggagagtgacaagctggtggccaccagcaagatcaccctgcaggacaagcagaacatggtgaagagggtgtccatcatgtcctatgccctgcaggccgagatgaaccacttccacagcaaccgcatctatgactacaacagcgtcatccggctgtacctggagcagcaggtgcagttctatgagaccatcgccgagaagctgcggcaggccctgagccgcttccctgtgatgtag

SEQ ID NO: 171185 - DNA, 1788 bp, synthetic construct
  misc_feature 1..1788: note = Description of Artificial Sequence: Synthetic coding sequence
  source 1..1788: mol_type = other DNA
atggccaccaaggcccgggtgatgtatgactttgctgctgagcccggcaacaatgagctgactgtgaatgaaggagagatcatcaccatcaccaacccagatgtgggcggcggctggctggagggcaggaacatcaagggggagcggggcctggtgcccacagattatgtggagatcctgcccagtgatggcaaggaccagttcagctgtggcaacagcgtggccgaccaggccttcctggacagcctgagcgccagcacagcccaggccagcagcagcgctgccagcaacaaccaccaggtgggcagcggaaatgacccctggagcgcctggagcgccagcaagagcggcaactgggagagcagcgagggctggggcgcccagcctgagggcgctggggcccagaggaacaccaacacccccaacaactgggacacagccttcggccacccccaggcctaccagggccctgccactggagatgatgatgactgggatgaggactgggatggccccaagagcagcagctacttcaaggacagcgagagcgcagatgctgggggcgcccagaggggcaacagccgggccagcagcagctccatgaagatccccctgaacaagtttcctggctttgccaagccaggcacagagcagtacctgctggccaagcagctggccaagcccaaggagaagatccccatcatcgtgggggactatggccccatgtgggtgtaccccaccagcacctttgactgtgtggtggccgaccccaggaagggcagcaagatgtatggcctgaagagctacatcgagtaccagctgacccccaccaacaccaacagatctgtgaaccaccgctacaagcactttgactggctgtatgaaaggctgctggtgaagtttggaagtgccatccccatccccagcctgcctgacaagcaggtgacaggccgctttgaggaggagttcatcaagatgaggatggagcggctgcaggcctggatgaccaggatgtgccgccaccctgtgatcagcgagagcgaggtgttccagcagttcctgaacttcagagatgagaaggagtggaagacaggcaagaggaaggccgagagagatgagctggccggcgtgatgatcttcagcaccatggagcctgaggccccagacctggacctggtggagattgagcagaagtgtgaggccgtgggcaagttcaccaaggccatggatgatggagtgaaggagctgctgactgtgggccaggagcactggaagcgctgcaccggccccctgcccaaggagtaccagaagattggcaaggccctgcagagcctggccaccgtcttcagcagcagcggctaccagggcgagacagacctgaatgatgccatcacagaagctgggaagacctatgaggagatcgccagcctggtggccgagcagcccaagaaggacctgcacttcctgatggagtgcaaccacgagtacaagggcttcctgggctgcttcccagacatcatcggcacccacaagggggccatcgagaaggtgaaggagagtgacaagctggtggccaccagcaagatcaccctgcaggacaagcagaacatggtgaagagggtgtccatcatgtcctatgccctgcaggccgagatgaaccacttccacagcaaccgcatctatgactacaacagcgtcatccggctgtacctggagcagcaggtgcagttctatgagaccatcgccgagaagctgcggcaggccctgagccgcttccctgtgatgtag

SEQ ID NO: 171186 - DNA, 1788 bp, synthetic construct; identical to SEQ ID NO: 171185
  misc_feature 1..1788: note = Description of Artificial Sequence: Synthetic coding sequence
  source 1..1788: mol_type = other DNA

SEQ ID NO: 171187 - DNA, 1308 bp, synthetic construct
  misc_feature 1..1308: note = Description of Artificial Sequence: Synthetic coding sequence
  source 1..1308: mol_type = other DNA
atgggcctgtccttcagcctcttccccctgagaaatcatgtgaatgtggagggcgccacccacaagcaggtggtggacctgatccgggccggggagaaggagctgatcctgactgtgctgtctgtgccccctcatgaagctgacaacctggaccccagtgatgacagcctgggccagagcttctatgactacacagagaagcaggccgtgcccatctctgtgccccgctacaagcacgtggagcagaatggagagaagtttgtggtgtacaacgtgtacatggccggccggcagctgtgcagcaagcgctaccgggagtttgccatcctgcaccagaacctgaagcgggagtttgccaacttcaccttcccccggctgcccgggaagtggcccttcagcctgtctgagcagcagctggatgccaggagaagaggcctggaggagtacctggagaaggtgtgcagcatccgggtgattggagagagtgacatcatgcaggagttcctgtctgagagtgatgagaactacaatggagtgtctgatgtggagctgcgggtggccctgcctgatggcaccaccgtgacagtgcgggtgaagaagaacagcaccacagaccaggtgtaccaggccatcgccgccaaggtgggcatggacagcaccaccgtgaactactttgccctgtttgaggtgatcagccacagctttgtgaggaagctggccccaaatgagttcccccacaagctgtacatccagaactacaccagcgctgtgcccggcacctgcctgaccatcaggaagtggctgttcaccacagaggaggagatcctgctgaatgacaatgacctggccgtgacctacttcttccaccaggccgtggatgatgtgaagaagggctacatcaaggccgaggagaagagctaccagctgcagaagctgtatgagcagaggaagatggtgatgtacctgaacatgctgcggacctgtgagggctacaatgagatcatcttcccccactgtgcctgtgacagcaggaggaagggccacgtgatcacagccatcagcatcacccacttcaagctgcacgcctgcacagaggagggccagctggagaaccaggtgattgcctttgagtgggatgagatgcagcgctgggacacagatgaggagggcatggccttctgctttgaatatgcccggggggagaagaagccccgctgggtgaagatcttcaccccctacttcaactacatgcatgaatgttttgagagggtcttctgtgagctgaagtggaggaaggaggagtactag

SEQ ID NO: 171188 - DNA, 1587 bp, synthetic construct
  misc_feature 1..1587: note = Description of Artificial Sequence: Synthetic coding sequence
  source 1..1587: mol_type = other DNA
atggctgatgaagatggagagggcatccaccccagcgccccccacagaaatggaggcggcggcggcggcggcggcagcggcctgcactgtgctggaaatggaggcggcggcggcggcggcccccgggtggtgcgcatcgtgaagtctgagagcggctacggcttcaacgtgcggggccaggtgtctgagggcggccagctgcggagcatcaatggagagctgtatgcccccctgcagcacgtgtctgctgtgctgcccggcggcgctgctgacagagctggggtgaggaaaggagaccgcatcctggaggtgaaccacgtgaatgtggagggcgccacccacaagcaggtggtggacctgatccgggccggggagaaggagctgatcctgactgtgctgtctgtgccccctcatgaggccgacaacctggaccccagtgatgacagcctgggccagagcttctatgactacacagagaagcaggccgtgcccatctctgtgccccgctacaagcacgtggagcagaatggagagaagtttgtggtgtacaacgtgtacatggccggccggcagctgtgcagcaagcgctaccgggagtttgccatcctgcaccagaacctgaagcgggagtttgccaacttcaccttcccccggctgcccgggaagtggcccttcagcctgtctgagcagcagctggatgcccggcggcggggcctggaggagtacctggagaaggtgtgcagcatccgggtcatcggggagagtgacatcatgcaggagttcctgtctgagagtgatgagaactacaacggggtgtctgatgtggagctgcgggtggccctgcctgatggcaccaccgtgacagtgcgggtgaagaagaacagcaccacagaccaggtgtaccaggccatcgccgccaaggtgggcatggacagcaccaccgtgaactactttgccctgtttgaagtcatcagccacagctttgtgaggaagctggccccaaatgagttcccccacaagctgtacatccagaactacaccagcgctgtgcccggcacctgcctgaccatcaggaagtggctgttcaccacagaggaggagatcctgctgaatgacaatgacctggccgtgacctacttcttccaccaggccgtggatgatgtgaagaagggctacatcaaggccgaggagaagagctaccagctgcagaagctgtatgagcagaggaagatggtgatgtacctgaacatgctgcggacctgtgagggctacaatgagatcatcttcccccactgtgcctgtgacagcagaagaaaaggacatgtgatcacagccatcagcatcacccacttcaagctgcacgcctgcacagaggagggccagctggagaaccaggtgattgcctttgagtgggatgagatgcagcgctgggacacagatgaggagggcatggccttctgctttgaatatgcccggggggagaagaagccccgctgggtgaagatcttcaccccctacttcaactacatgcatgagtgctttgagagggtcttctgtgagctgaagtggaggaaggaggagtactag

SEQ ID NO: 171189 - DNA, 1626 bp, synthetic construct
  misc_feature 1..1626: note = Description of Artificial Sequence: Synthetic coding sequence
  source 1..1626: mol_type = other DNA
atggctgatgaagatggagagggcatccaccccagcgccccccacagaaatggaggcggcggcggcggcggcggcagcggcctgcactgtgctggaaatggaggcggcggcggcggcggcccccgggtggtgcgcatcgtgaagtctgagagcggctacggcttcaacgtgcggggccaggtgtctgagggcggccagctgcggagcatcaatggagagctgtatgcccccctgcagcacgtgtctgctgtgctgcccggcggcgctgctgacagagctggggtgaggaaaggagaccgcatcctggaggtgaaccacgtgaatgtggagggcgccacccacaagcaggtggtggacctgatccgggccggggagaaggagctgatcctgactgtgctgtctgtgccccctcatgaggccgacaacctggaccccagtgatgacagcctgggccagagcttctatgactacacagagaagcaggccgtgcccatctctgtgccccgctacaagcacgtggagcagaatggagagaagtttgtggtgtacaacgtgtacatggccggccggcagctgtgcagcaagcgctaccgggagtttgccatcctgcaccagaacctgaagcgggagtttgccaacttcaccttcccccggctgcccgggaagtggcccttcagcctgtctgagcagcagctggatgcccggcggcggggcctggaggagtacctggagaaggtgtgcagcatccgggtcatcggggagagtgacatcatgcaggagttcctgtctgagagtgatgagaactacaacggggtgtctgatgtggagctgcgggtggccctgcctgatggcaccaccgtgacagtgcgggtgaagaagaacagcaccacagaccaggtgtaccaggccatcgccgccaaggtgggcatggacagcaccaccgtgaactactttgccctgtttgaagtcatcagccacagctttgtgaggaagctggccccaaatgagttcccccacaagctgtacatccagaactacaccagcgctgtgcccggcacctgcctgaccatcaggaagtggctgttcaccacagaggaggagatcctgctgaatgacaatgacctggccgtgacctacttcttccaccaggccgtggatgatgtgaagaagggctacatcaaggccgaggagaagagctaccagctgcagaagctgtatgagcagaggaagatggtgatgtacctgaacatgctgcggacctgtgagggctacaatgagatcatcttcccccactgtgcctgtgacagcagaagaaaaggacatgtgatcacagccatcagcatcacccacttcaagctgcacgcctgcacagaggagggccagctggagaaccaggtgattgcctttgagtgggatgagatgcagcgctgggacacagatgaggagggcatggccttctgctttgaatatgcccggggggagaagaagccccgctgggtgaagatcttcaccccctacttcaactacatgcatgagtgctttgagagggtcttctgtgagctgaagtggaggaaggagaacatcttccagatggcccggagccagcagagagatgtggccacctag

SEQ ID NO: 171190 - DNA, 2640 bp, synthetic construct
  misc_feature 1..2640: note = Description of Artificial Sequence: Synthetic coding sequence
  source 1..2640: mol_type = other DNA
atggccggcggcggcggggacctgagcacccggcggctgaatgaatgcatcagccctgtggccaatgagatgaaccacctgcctgcccacagccatgacctgcagaggatgttcacagaggaccagggcgtggatgaccggctgctgtatgacatcgtgttcaagcacttcaagaggaacaaggtggagatcagcaatgccatcaagaagaccttccccttcctggagggcctgcgggaccgggacctgatcaccaacaagatgtttgaggacagccaggacagctgcaggaacctggtgcctgtgcagagggtggtgtacaacgtgctgtctgagctggagaagaccttcaacctgcctgtgctggaggccctcttcagtgatgtgaacatgcaggagtacccagacctgatccacatctacaagggctttgaaaatgtcatccatgacaagctgcccctgcaggagagcgaggaggaggagcgggaggagaggagcggcctgcagctgagcctggagcagggcaccggggagaacagcttccgcagcctgacctggcccccatctggcagccccagccatgctggcaccaccccaccagaaaatggcctgtctgagcacccctgtgaaacagagcagatcaatgccaagaggaaggacaccaccagtgacaaggatgacagcctgggcagccagcagaccaatgagcagtgtgcccagaaggccgagcccacagagagctgtgagcagattgctgtgcaggtgaacaatggagatgctggccgggagatgccctgccccctgccctgtgatgaggagagccctgaggccgagctgcacaaccacggcatccagatcaacagctgcagcgtgcggctggtggacatcaagaaggagaagcccttcagcaacagcaaggtggagtgccaggcccaggcccggacccaccacaaccaggccagtgacatcatcgtcatcagcagtgaagattctgagggcagcacagatgtggatgagcccctggaggtgttcatcagcgcccccaggtctgagcccgtcatcaacaatgacaaccccctggagagcaatgatgagaaggagggccaggaggccacctgcagccggccccagatcgtgcctgagcccatggacttcaggaagctgagcaccttccgggagagcttcaagaagagggtcatcggccaggaccatgacttcagcgagagcagcgaggaggaggccccagctgaggccagcagcggggccctgcggagcaagcatggagagaaggcccccatgaccagccgcagcaccagcacctggaggatccccagcaggaagaggcgcttcagcagcagtgacttcagtgacctgagcaatggagaggagctgcaggagacctgcagcagcagcctgcggcggggcagcggcagccagccccaggagcctgagaacaagaagtgcagctgtgtgatgtgcttccccaagggcgtgcccaggagccaggaggccaggacagagagcagccaggccagtgacatgatggacaccatggatgtggagaacaacagcaccctggagaagcacagcggcaagaggaggaagaagagaagacacaggagcaaggtgaatggcctgcagaggggcaggaagaaggaccggcccaggaagcacctgaccctgaacaacaaggtgcagaagaagcgctggcagcagaggggcaggaaggccaacacccggcccctgaagagaagaaggaagaggggcccccgcatccccaaggatgagaacatcaacttcaagcagagcgagctgcctgtgacctgtggggaggtgaagggcaccctgtacaaggagcgcttcaagcagggcaccagcaagaagtgcatccagagcgaggacaagaagtggttcaccccccgggagtttgaaattgaaggagacagaggagccagcaagaactggaagctgagcatccgctgtggcggctacaccctgaaggtgctgatggagaacaagttcctgcctgagccccccagcaccaggaagaagaggatcctggagagccacaacaacaccctggtggacccctgtgaggagcacaagaagaagaacccagatgcctctgtgaagttcagcgagttcctgaagaagtgcagcgagacctggaagaccatctttgccaaggagaagggcaagtttgaggacatggccaaggctgacaaggcccactatgagcgggagatgaagacctacatcccccccaagggggagaagaagaagaagttcaaggaccccaatgcccccaagaggcctcccctggccttcttcctgttctgcagcgagtaccggcccaagatcaagggggagcaccctggcctgagcattgatgatgtggtgaagaagctggccggcatgtggaacaacacagctgctgctgacaagcagttctatgagaagaaggccgccaagctgaaggagaagtacaagaaggacattgctgcctaccgggccaagggcaagcccaacagcgccaagaagagggtggtgaaggccgagaagagcaagaagaagaaggaggaggaggaggatgaggaggatgagcaggaggaggagaatgaagaagatgatgacaagtag

SEQ ID NO: 171191 - DNA, 2658 bp, synthetic construct
  misc_feature 1..2658: note = Description of Artificial Sequence: Synthetic coding sequence
  source 1..2658: mol_type = other DNA
atggccggcggcggcggggacctgagcacccggcggctgaatgaatgcatcagccctgtggccaatgagatgaaccacctgcctgcccacagccatgacctgcagaggatgttcacagaggaccagggcgtggatgaccggctgctgtatgacatcgtgttcaagcacttcaagaggaacaaggtggagatcagcaatgccatcaagaagaccttccccttcctggagggcctgcgggaccgggacctgatcaccaacaagatgtttgaggacagccaggacagctgcaggaacctggtgcctgtgcagagggtggtgtacaacgtgctgtctgagctggagaagaccttcaacctgcctgtgctggaggccctcttcagtgatgtgaacatgcaggagtacccagacctgatccacatctacaagggctttgaaaatgtcatccatgacaagctgcccctgcaggagagcgaggaggaggagcgggaggagaggagcggcctgcagctgagcctggagcagggcaccggggagaacagcttccgcagcctgacctggcccccatctggcagccccagccatgctggcaccaccccaccagaaaatggcctgtctgagcacccctgtgaaacagagcagatcaatgccaagaggaaggacaccaccagtgacaaggatgacagcctgggcagccagcagaccaatgagcagtgtgcccagaaggccgagcccacagagagctgtgagcagattgctgtgcaggtgaacaatggagatgctggccgggagatgccctgccccctgccctgtgatgaggagagccctgaggccgagctgcacaaccacggcatccagatcaacagctgcagcgtgcggctggtggacatcaagaaggagaagcccttcagcaacagcaaggtggagtgccaggcccaggcccggacccaccacaaccaggccagtgacatcatcgtcatcagcagtgaagattctgagggcagcacagatgtggatgagcccctggaggtgttcatcagcgcccccaggtctgagcccgtcatcaacaatgacaaccccctggagagcaatgatgagaaggagggccaggaggccacctgcagccggccccagatcgtgcctgagcccatggacttcaggaagctgagcaccttccgggagagcttcaagaagagggtcatcggccaggaccatgacttcagcgagagcagcgaggaggaggccccagctgaggccagcagcggggccctgcggagcaagcatggagagaaggcccccatgaccagccgcagcaccagcacctggaggatccccagcaggaagaggcgcttcagcagcagtgacttcagtgacctgagcaatggagaggagctgcaggagacctgcagcagcagcctgcggcggggcagcggcagccagccccaggagcctgagaacaagaagtgcagctgtgtgatgtgcttccccaagggcgtgcccaggagccaggaggccaggacagagagcagccaggccagtgacatgatggacaccatggatgtggagaacaacagcaccctggagaagcacagcggcaagaggaggaagaagagaagacacaggagcaaggtgaatggcctgcagaggggcaggaagaaggaccggcccaggaagcacctgaccctgaacaacaaggtgcagaagaagcgctggcagcagaggggcaggaaggccaacacccggcccctgaagagaagaaggaagaggggcccccgcatccccaaggatgagaacatcaacttcaagcagagcgagctgcctgtgacctgtggggaggtgaagggcaccctgtacaaggagcgcttcaagcagggcaccagcaagaagtgcatccagagcgaggacaagaagtggttcaccccccgggagtttgaaattgaaggagacagaggagccagcaagaactggaagctgagcatccgctgtggcggctacaccctgaaggtgctgatggagaacaagttcctgcctgagccccccagcaccaggaagaagaggatcctggagagccacaacaacaccctggtggacccctgcccagagaacagcaacatctgtgaggtgtgcaacaagtggggccgcctcttctgctgtgacacctgccccaggagcttccacgagcactgccacatccccagcgtggaggccaacaagaacccctggagctgcatcttctgccgcatcaagaccatccaggagcgctgcccagagagccagagcggccaccaggagagcgaggtgctgatgaggcagatgctgcctgaggagcagctgaagtgtgagttcctgctgctgaaggtgtactgtgacagcaagagctgcttctttgccagcgagccctactacaaccgggagggcagccagggcccccagaagcccatgtggctgaacaaggtgaagaccagcctgaatgagcagatgtacaccagggtggagggctttgtgcaggacatgaggctcatcttccacaaccacaaggagttctaccgggaggacaagttcacccggctgggcatccaggtgcaggacatctttgagaagaacttcaggaacatctttgccatccaggagaccagcaagaacatcatcatgttcatctag

SEQ ID NO: 171192 - DNA, 1422 bp, synthetic construct
  misc_feature 1..1422: note = Description of Artificial Sequence: Synthetic coding sequence
  source 1..1422: mol_type = other DNA
atggccggcggcggcggggacctgagcacccggcggctgaatgaatgcatcagccctgtggccaatgagatgaaccacctgcctgcccacagccatgacctgcagaggatgttcacagaggaccagggcgtggatgaccggctgctgtatgacatcgtgttcaagcacttcaagaggaacaaggtggagatcagcaatgccatcaagaagaccttccccttcctggagggcctgcgggaccgggacctgatcaccaacaagatgtttgaggacagccaggacagctgcaggaacctggtgcctgtgcagagggtggtgtacaacgtgctgtctgagctggagaagaccttcaacctgcctgtgctggaggccctcttcagtgatgtgaacatgcaggagtacccagacctgatccacatctacaagggctttgaaaatgtcatccatgacaagctgcccctgcaggagagcgaggaggaggagcgggaggagaggagcggcctgcagctgagcctggagcagggcaccggggagaacagcttccgcagcctgacctggcccccatctggcagccccagccatgctggcaccaccccaccagaaaatggcctgtctgagcacccctgtgaaacagagcagatcaatgccaagaggaaggacaccaccagtgacaaggatgacagcctgggcagccagcagaccaatgagcagtgtgcccagaaggccgagcccacagagagctgtgagcagattgctgtgcaggtgaacaatggagatgctggccgggagatgccctgccccctgccctgtgatgaggagagccctgaggccgagctgcacaaccacggcatccagatcaacagctgcagcgtgcggctggtggacatcaagaaggagaagcccttcagcaacagcaaggtggagtgccaggcccaggcccggacccaccacaaccaggccagtgacatcatcgtcatcagcagtgaagattctgagggcagcacagatgtggatgagcccctggaggtgttcatcagcgcccccaggtctgagcccgtcatcaacaatgacaaccccctggagagcaatgatgagaaggagggccaggaggccacctgcagccggccccagatcgtgcctgagcccatggacttcaggaagctgagcaccttccgggagagcttcaagaagagggtcatcggccaggaccatgacttcagcgagagcagcgaggaggaggccccagctgaggccagcagcggggccctgcggagcaagcatggagagaaggcccccatgaccagccgcagcaccagcacctggaggatccccagcaggaagaggcagctgaagaagaagaagaagaagaagcagtgccacccccagccccagccccagaggggcctgctggagcagagctag

SEQ ID NO: 171193 - DNA, 2067 bp, synthetic construct
  misc_feature 1..2067: note = Description of Artificial Sequence: Synthetic coding sequence
  source 1..2067: mol_type = other DNA
atggccggcggcggcggggacctgagcacccggcggctgaatgaatgcatcagccctgtggccaatgagatgaaccacctgcctgcccacagccatgacctgcagaggatgttcacagaggaccagggcgtggatgaccggctgctgtatgacatcgtgttcaagcacttcaagaggaacaaggtggagatcagcaatgccatcaagaagaccttccccttcctggagggcctgcgggaccgggacctgatcaccaacaagatgtttgaggacagccaggacagctgcaggaacctggtgcctgtgcagagggtggtgtacaacgtgctgtctgagctggagaagaccttcaacctgcctgtgctggaggccctcttcagtgatgtgaacatgcaggagtacccagacctgatccacatctacaagggctttgaaaatgtcatccatgacaagctgcccctgcaggagagcgaggaggaggagcgggaggagaggagcggcctgcagctgagcctggagcagggcaccggggagaacagcttccgcagcctgacctggcccccatctggcagccccagccatgctggcaccaccccaccagaaaatggcctgtctgagcacccctgtgaaacagagcagatcaatgccaagaggaaggacaccaccagtgacaaggatgacagcctgggcagccagcagaccaatgagcagtgtgcccagaaggccgagcccacagagagctgtgagcagattgctgtgcaggtgaacaatggagatgctggccgggagatgccctgccccctgccctgtgatgaggagagccctgaggccgagctgcacaaccacggcatccagatcaacagctgcagcgtgcggctggtggacatcaagaaggagaagcccttcagcaacagcaaggtggagtgccaggcccaggcccggacccaccacaaccaggccagtgacatcatcgtcatcagcagtgaagattctgagggcagcacagatgtggatgagcccctggaggtgttcatcagcgcccccaggtctgagcccgtcatcaacaatgacaaccccctggagagcaatgatgagaaggagggccaggaggccacctgcagccggccccagatcgtgcctgagcccatggacttcaggaagctgagcaccttccgggagagcttcaagaagagggtcatcggccaggaccatgacttcagcgagagcagcgaggaggaggccccagctgaggccagcagcggggccctgcggagcaagcatggagagaaggcccccatgaccagccgcagcaccagcacctggaggatccccagcaggaagaggcgcttcagcagcagtgacttcagtgacctgagcaatggagaggagctgcaggagacctgcagcagcagcctgcggcggggcagcggcagccagccccaggagcctgagaacaagaagtgcagctgtgtgatgtgcttccccaagggcgtgcccaggagccaggaggccaggacagagagcagccaggccagtgacatgatggacaccatggatgtggagaacaacagcaccctggagaagcacagcggcaagaggaggaagaagagaagacacaggagcaaggtgaatggcctgcagaggggcaggaagaaggaccggcccaggaagcacctgaccctgaacaacaaggtgcagaagaagcgctggcagcagaggggcaggaaggccaacacccggcccctgaagagaagaaggaagaggggcccccgcatccccaaggatgagaacatcaacttcaagcagagcgagctgcctgtgacctgtggggaggtgaagggcaccctgtacaaggagcgcttcaagcagggcaccagcaagaagtgcatccagagcgaggacaagaagtggttcaccccccgggagtttgaaattgaaggagacagaggagccagcaagaactggaagctgagcatccgctgtggcggctacaccctgaaggtgctgatggagaacaagttcctgcctgagccccccagcaccaggaagaaggtgatgatcaagtag

SEQ ID NO: 171194 - DNA, 1443 bp, synthetic construct
  misc_feature 1..1443: note = Description of Artificial Sequence: Synthetic coding sequence
  source 1..1443: mol_type = other DNA
atggccggcggcggcggggacctgagcacccggcggctgaatgaatgcatcagccctgtggccaatgagatgaaccacctgcctgcccacagccatgacctgcagaggatgttcacagaggaccagggcgtggatgaccggctgctgtatgacatcgtgttcaagcacttcaagaggaacaaggtggagatcagcaatgccatcaagaagaccttccccttcctggagggcctgcgggaccgggacctgatcaccaacaagatgtttgaggacagccaggacagctgcaggaacctggtgcctgtgcagagggtggtgtacaacgtgctgtctgagctggagaagaccttcaacctgcctgtgctggaggccctcttcagtgatgtgaacatgcaggagtacccagacctgatccacatctacaagggctttgaaaatgtcatccatgacaagctgcccctgcaggagagcgaggaggaggagcgggaggagaggagcggcctgcagctgagcctggagcagggcaccggggagaacagcttccgcagcctgacctggcccccatctggcagccccagccatgctggcaccaccccaccagaaaatggcctgtctgagcacccctgtgaaacagagcagatcaatgccaagaggaaggacaccaccagtgacaaggatgacagcctgggcagccagcagaccaatgagcagtgtgcccagaaggccgagcccacagagagctgtgagcagattgctgtgcaggtgaacaatggagatgctggccgggagatgccctgccccctgccctgtgatgaggagagccctgaggccgagctgcacaaccacggcatccagatcaacagctgcagcgtgcggctggtggacatcaagaaggagaagcccttcagcaacagcaaggtggagtgccaggcccaggcccggacccaccacaaccaggccagtgacatcatcgtcatcagcagtgaagattctgagggcagcacagatgtggatgagcccctggaggtgttcatcagcgcccccaggtctgagcccgtcatcaacaatgacaaccccctggagagcaatgatgagaaggagggccaggaggccacctgcagccggccccagatcgtgcctgagcccatggacttcaggaagctgagcaccttccgggagagcttcaagaagagggtcatcggccaggaccatgacttcagcgagagcagcgaggaggaggccccagctgaggccagcagcggggccctgcggagcaagcatggagagaaggcccccatgaccagccgcagcaccagcacctggaggatccccagcaggaagaggcgcttcagcagcagtgacttcagtgacctgagcaatggagaggagctgcaggagacctgcagcagcagcctgcggcggggcagcggcaaggaggactag

SEQ ID NO: 171195 - DNA, 1068 bp, synthetic construct
  misc_feature 1..1068: note = Description of Artificial Sequence: Synthetic coding sequence
  source 1..1068: mol_type = other DNA
atggatgtggagaacaacagcaccctggagaagcacagcggcaagaggaggaagaagaggaggcacaggagcaaggtgaatggcctgcagaggggcaggaagaaggaccggcccaggaagcacctgaccctgaacaacaaggtgcagaagaagcgctggcagcagaggggcaggaaggccaacacccggcccctgaagagaagaaggaagaggggcccccgcatccccaaggatgagaacatcaacttcaagcagagcgagctgcctgtgacctgtggggaggtgaagggcaccctgtacaaggagcgcttcaagcagggcaccagcaagaagtgcatccagagcgaggacaagaagtggttcaccccccgggagtttgaaattgaaggagacagaggagccagcaagaactggaagctgagcatccgctgtggcggctacaccctgaaggtgctgatggagcgcatcctggagagccacaacaacaccctggtggacccctgcccagagaacagcaacatctgtgaggtgtgcaacaagtggggccgcctcttctgctgtgacacctgccccaggagcttccacgagcactgccacatccccagcgtggaggccaacaagaacccctggagctgcatcttctgccgcatcaagaccatccaggagcgctgcccagagagccagagcggccaccaggagagcgaggtgctgatgaggcagatgctgcctgaggagcagctgaagtgtgagttcctgctgctgaaggtgtactgtgacagcaagagctgcttctttgccagcgagccctactacaaccgggagggcagccagggcccccagaagcccatgtggctgaacaaggtgaagaccagcctgaatgagcagatgtacaccagggtggagggctttgtgcaggacatgaggctcatcttccacaaccacaaggagttctaccgggaggacaagttcacccggctgggcatccaggtgcaggacatctttgagaagaacttcaggaacatctttgccatccaggagaccagcaagaacatcatcatgttcatctag
